United States Patent Application Publication US 2006/0134663 A1 - sequence listing, part 10

SEQ ID NO: 23386 - DNA, 10568 bp, Homo Sapiens
ttaaaaaaaaacataccgttaatttaaatttctaacctttagcagtttctgagtgctttcacaaacctgacctcatttaatccccacatactccagtgaggtagatatggctaatgtatccagtttacagaagaggagaaacagggtgaagtaacttgcctaaaatcataccaagtgggagaagaccaaacctggccttctaattctaaatcccaggagtactccatctttcgggaaaaaaatcccaccccagcacaaagcctatgaaatgctatacaaatatgtgattactactttggggcaaggatgaataagcccaaagaagcatcatgcctgacgctgagttggctggccggtgaaggcgtctgtcccttcccttggtatccctatgacttacctgttggacaggtagggggaaggggagagtaatgagtctcacctgctcagagcaagggtggggcaagacacaccccatcccttccattggttttttccttagtcttactgacagagccttgtccaatcaggaggaagtaactttctatctgccaatagatgcaatgttaggatgagacctcaagttagagtccatccctagagccgactggcagtccccggggccaatggcaagcggataaacagaggcggccgtggaagaggactggaggcgaggctccgcccctccacgggacagtcaggcgagatagccagtgagctcgcaccagagggtgggcgtctcccccaggggcggagcttcgaggtggcgaggggcgtggcttggctgtcaggtctcttcgccttttgttcggttactgagttgctgccttggccagagtccggagcagccgccgcccgaccgcgccgagctcagttcgctgtccgcgccggctcccaccccggcccgaccccgacccggcccggtcaggccccatactcagtagccacgatggaggtgatgaacctgatggagcagcctatcaaggtgactgagtggcagcagacatacacctacgactcgggtatccactcgggcgccaacacctgcgtgccctccgtcagcagcaagggcatcatggaggaggatgaggcctgcgggcgccagtacacgctcaagaaaaccaccacttacacccagggggtgccccccagccaaggtcaggacccctggggactattgcatggggcagaaaacctgcctgggtcctggagagaggtcagagtgaaaggaggcagattgtagggggtctctggtctgagggaggaggcacagctcatgctaactaggggcccacccagtctgaaggaggaggtgcagctacttcagggtgctgcatctgggagggtcacagaatcctcttctgtgaaccatcagtagggagggaaggcatagtccctgcccttagggtgcctccagtctgaaggaaaagccatagtccttgccttctgtgaacataagaatctgatgaagacattgggtacggtggctcatgcctgtaatcccagcactttgggaggctgaggtgggcagatcacctgaggtcaggagtttgagaccagcctggccaacatgatgaaaccccgtctctactaaaaatacaaaaattagccgggtgtggtggcgcatgcacctgtagtcccagctacttgggaggctgaggcaggagaattgcttgaacccaggaggcagaggttggagtgagctgagattgcgccactgcactccagcctgggcgacagagtgagactccgtctcaaaaaatagtaaaaaaaagagtctgatgaggatgtatactatggctctcagggagcccatggatggcagggaggacgcagccctttggctgcaggagcctcacgtttgtgggagagccagggccgtagcccccaggaacccccagggattcccctttgggtagaggggtgtaggtgtcaagcctgagggcccctcgttggggttggagggagaccaggcctctgcggctgacctgcagataggccaaggctgtgggatgagtgactgactcagctctggggcttagtccgggatggggatgccccgccagcccaagcctcccctgcccctctgggagagaggaatagccaggccctagaactgttggccacaggtgcctccagggccctgaacatgccagggggtgggctgtgggtgctgggagtagtgtgagtagactgtggctggtggggctctatggagctcagccctcgcatgccagtctcctccctgacagctggtaggggtagcagggggccttttggctggcagggccaggcactgtgttggtagcaaaaagtacagcatccaggtgggaaagccatgcagctgtctcctccttctcgactaattagagggtggaacctctgcgtccctctccctgggggcatcaggacagttgccagggtgtggctgcttgggcacctacctgtgggactcccagacccacccaggggatggaagctagagaggaacctgacgtctcagctgaggacccagctcctgctctctgaacccacagccctgactttccctctgatctgctgtgagatgtgatgttggtggttctctgggcctctgtttgcctgcctgtatagtgggaggattgctaccgttggggatgatgagggtgtaattagactcctgagatttcagggttgaaaacagacctgatgggtaagggaggagaatagagtaggggtttgggcccctgagtcaggctgccttataacccctctgtgcccagttttcccatctgtaaagtggagccagtgatagtacttaccttgcagggtcgttgtcaggttatgtgagaaaatataagcagggcattgaattcactgccaggcacataataagtgtgccaaaaaaaaaaaaaaaattcccgtgatagacagaacatgtggggcctattttacagagattactgaggtgatggtgacttccccaaggttcctggtgagaggtagaatggccagtcatgtgctgggggtttgggcagggcaagaggtagcccagaggacccaggtggggctgtctgtggcctgccctgctccccagtgtctgcccagcccactgcctgcactcagtccctgtccccatggcccccaggtgacctggagtaccagatgtccacaacagccagggccaaacgggtgcgggaggccatgtgccctggtgtgtcaggcgaggacagctcgcttctgctggccacccaggtggaggggcaggccaccaacctgcagcgactggccgagccgtcccagctgctcaagtcggccattgtgcatctcatcaactaccaggacgatgccgagctggccactcgcgccctgcccgagctcaccaaactgctcaacgacgaggacccggtctgtgagggtccctgctagggtgggggctgggcagggaggggagagagcagatgtcctcaggggagggacattgtaggggtggagggaggttatgacccagactctcccgtgtgtgatgagtctgactggggccctcctcagctctgtggaagggtatcccggcctctccttagtgctcacgtccccgcccctgcctttgccctccaggtggtggtgaccaaggcggccatgattgtgaaccagctgtcgaagaaggaggcgtcgcggcgggccctgatgggctcgccccagctggtggccgctgtcgtgcgtaccatgcagaataccagcgacctggacacagcccgctgcaccaccagcatcctgcacaacctctcccaccaccgggaggggctgctcgccatcttcaagtcgggtggcatccctgctctggtccgcatgctcaggtacccaccctgctcactgcatgagcccaggaccccctctcacttgggcctctcccctcccttccctgagcttccataaatatccagtgagcacctactatgtgccaggcagaagcacaccccatccgggtgctcggtggctcacagcccagcagggaacacaggcatgtaaacagcaggttaatgatcaggatacgacacaggctatggcagaagagcattgagattgctcaaaggtggaatcgcttaatggcaggggattgacagatgagtggagtttggctagtgtagaggaagggaagagtgtcccaggcagagggaacagcaaatgcaaagtcccttgcaaactttctgtttcctggccccctacaaaatgtggattggcctcatttctttttttttttttgagatgaggccttgctctgtcacccaagctggagtgcagtggcgtgatctcagctcactgcagcctccacctcctgggttcgaatgattctcctgcctcagtctcctgagtagctgggattacaagcatctgccaccatacctagctatttttttttttgttttgagatggagttttcctcctgttgcccaggctggagtgcaatggcacagtctcggcttactgcaacctctgcctcccgggttcaagagattctcctgcctcagcctcccaagtagcagggattacaggcacccacgaccatgcctggctaatttttgtatttttagtaaaaatggggtttcaccatgttggccaggctagtcttgaactcctgacctcaggtgatctgccccccttggcctcccaaagtgctgggattataggcgtctgccaccatgcccagctcaattttgtatttttagtagagacggggtttcaccacgttggccaggctggtttcgaactcctaacctcagggtgatccacctgcctcagcctccccaagcgctgagtttacagacgtgagccactgctcctggccttatttctcatccccataccaggctggaagctccctgaaggggagactgatttcactcccctctgaacgccttgcaaggcctctctaatatgtggccttccacatggtggttacttagtagggatcagtgtctaggggacctactgtgcgctcagcacagggctggggactcagaagcaggaggagtcattgtcccagttgggagaagagaggtgctgtttgcttcatgcttaagagcagggcaggctcaaggagtgatgagattttagcgaagggatatttccagaggggcgtcagtagcggggaggcttcctgggggaggtgggaacccatgccaggctcacatgtatgccaggcctctgggacctcagcgtactaacccctgcccacccccccagctcccctgtggagtcggtcctgttctatgccatcaccacgctgcacaacctgctcctgtaccaggagggcgccaagatggccgtgcgcctggccgacgggctgcaaaagatggtgcccctgctcaacaagaacaaccccaagttcctggccatcaccaccgactgcctgcagctcctggcctacggcaaccaggagagcaaggtgggccctccccaaccctcccgaggcctgaagcccacccttgcgccatcttctatcctgcacagccttgggccgctgcccccttactccttttagatgagatataggtgcagatatacatgcttcatcatgcgactgaattgcccagaattattattttgaggataagggaaaaaaaaaatcactcatcctcatatagccactattgtcattcgatgtgcttccttaagagctgttctgtgggcagattacagatgtgtacacatccttgtcatcataacaatctgcaatattgcatctgtttctgcctgattttttttttttttttttgaaacagggtctaactttgtcacacaggctagagtgcagtggtgtaatcagggctcactgcagccttgacttcctgggctcagatgatcctcctacctcagcctccagagtagctgggacttcaggcgtgtgctaccacgcccgactaattttttttttccttttcttttctttcttttttttttttgtttgagatggagtctcactttgtcacccaggcaggagtgcaatggcacgatctcggctcactgcaaccttcgcctcccgggttcaagcgattctcctgcttcagcctcccaagtagctaggattacaggtgcccgccaccacacccagctaatttttgtatttttagtagagacaaggtttcaccacattggccaggctggtctcgaactcctgaccttaggttgtccatctgcctcggcctaataaaatgctgggattacaggcatgagacaccgtgccccacccccaactaattttttatagagatgggatttctccatgttgcccaggctggtctcaaactcctgggctcaagtgatctgcctgccttggcctcccaaagtatcaggattacaggtgtgagccactgtgcctggcctgtatgatgtttaaaaaaaatttttttttgctatattgtcctcaaaaccaccctctaataatgacagattgcctttcctttcccttttccccctcccctttcctttttccttttccttttccttttcctttccctctcttcctctctttcttctttccttcccattctttccttttctttcttttttgagacagggtctcactgtgttacccaggctagagtgcagtggcatgatcctagctcactgcatcctcaaactcctgagctcaagcattcgtcccatcttagtcttcctgatagctaggactatgagaacatactactgagctaattagcacccgggctaagttttaaattttttgtggggatggtgtcttgctctgttgcccaggctaccctcaaggaatcctcctgcttcagcctccgaaatgctgggattaaagtcatgggccaccatacccagcctacagatagcatttcattaagtggagacctcaggctttattctgagggagggtatttagattgctcctattccacctttataaacaatgctgtaatgaatgtctagcctttgtcaaagagcggaaaaaattctcatcaatttttaacacttctaggcttttccccaaatggccagattgatttccagaaggattggactaatttccagtgccataactggtaatgggtgtgcatatagttttgtcatgtccttgtcagcactgggtattatccttttttcaaaattttggcttacataacagtcatgaaactattggggtgggctgggtgtggtggttcacgcctgtaatcccagcactttgggaggcagaggcgggtgaattgcctgaggtcaggagtttgaaaccagcctggccaacatagtgaaaccctgtctctaccaaaaactacagaaattagccgggcgtgatggcacacgcctgtaatcccagctacttgggaggctgaggcatgagaattgcttgaacccgggaggcggaggttgtagtgacctgagatcgtgccactgcactccagcctgggtgacagagcgagactctatctcaaaaaaaaaaacaaaaaaacttattggggtgcttggctgggtgtggtggctcacatctgtaatcccagcactttgggaggctgaggtgtgaggatcacttgaggccaggagttctagaccagcctgggcagcatagtgagacccccatctttataaaaagaaaaaaatacattaaaagaaaaaaacgaactattcgtgctttagctgaagctcagtaatgacagttctgtctcctgtcccgcgcttccttgttcctgtcatattccccgtccatctcacactcattccctctttacccatagctgatcatcctggccaatggtgggccccaggccctcgtgcagatcatgcgtaactacagttatgaaaagctgctctggaccaccagtcgtgtgctcaaggtgctatccgtgtgtcccagcaataagcctgccattgtggaggctggtgagtatgatggccttgagggcggctggggtgggagctctgcccagctgccaggctcagtcagccatgctccccgtggctgatggcacccctatccctgccccaggtgggatgcaggccctgggcaagcacctgaccagcaacagcccccgcctggtgcagaactgcctgtggaccctgcgcaacctctcagatgtggccaccaagcaggtgagggaggtatctgggcctggggttgacctcttcagctgccccatccagcctcctgtctgggcatctgacctgaggtactgtgggaggactgggggctctaaatctctcttccttgtgactgaggctggaaatgccttgaaaaccctcatctctttttttttttttttttttttttttcctgacggagtctcactctgtcacctaggctggagtgcagtggtgcaatctcggctcactgcaagctccgcctcctgggctcaagtgattctcctgcctcagcctcccgagtagttgggactacaggcacctgccatcatgtctggctaatttttgtatttttatggagacagggtttcaccatgttgggcaggctggtcttgaactcctgacctcaggtgatccacccgccttggcctcccaaagtgctgggattacaggcgtgagccaccacatccagcaaaagaacagttttgacctgggccctgggctggagcaatagtgtaccaagagacaggcccccatgactaaaaatacaatttaaggaaaaatgcagctccagggcaagtgccctgtgcctccttccaacaaccattccccaggcctcccctagcaatatgctgtttatcaagtgctcaccctgtgctggccctctgcgtggcatttgtggacagtagctcattcaacctggggttagagtgtgggaccccgtgggttagatgaagacactgaggctcggggagctaatggccatggtcacaggtagtaaatggcagaactgggatttgaacccaggactgtccgtccccaaagctggggtttttctgttccaccacaaggcccacgtgtctccctgggagaagtgagatagacgtctgaggtagtgattttactggaaatggatttggctcagggccccagggtggtggggcagcagtgaaggcccagaaaggtgacaagcgagtagacatggctcagctgggccactgaatcatgcggccccctcaacaattgcctcctggtctcgaggcctcccttggccaccgtactttggcctgaggagggttctgcctgggtctgagggccccagggaaaggctgatgagttggagggaagagatgtggggcttagagccaagcctgggttcagatccagccactagctgtgtgtctgtgggcaagttccccaacctctctgagcctcattgcctcacttgcaccacaggatagtaacgccctctcacagggtgtggcgggtcatagggatgaaagttcccgggcacacacaggcagggctgacccctttaggtcatcccactccccttggacatattcgagaaggctccctggagttggctgctccctgactcccccgtcccttccttgccctccaggagggcctggagagtgtgctgaagattctggtgaatcagctgagtgtggatgacgtcaacgtcctcacctgtgccacgggcacactctccaacctgacatgcaacaacagcaagaacaagacgctggtgacacagaacagcggtgtggaggctctcatccatgccatcctgcgtgctggtgacaaggacgacatcacggagcctgccgtctgcgctctgcgccacctcactagccgccaccctgaggccgagatggcccagaactctgtgcgtctcaactatggcatcccagccatcgtgaagctgctcaaccagcccaaccagtggccactggtcaaggtactgctgttaggcgaggggaggagctccctgcagcaggcttaggtgctgtattggtataggcaaagccgctgtagcaaagaagccctaaatacagtggctcgaataagacagaagtttatttctctctcgtgtaatagtttagacctcaacaatggctctgctctaaaattccagaattgggatttctatcttgtagctctaccagcccctagggcagagctcagagttcaaaatgcacatgagtaccctgggtggtttcattaaattgcaggttccagggccaggcacggtggctcatgcctgtaatcccaacactttgggaggcaaaggtaggaggattgcttgaggccaggaatttgagaccagtctggacaacatagcaagacctgtctcgacaacaataacaacaacagaaattagccaggtgtggtggtgcacgcctgtggtcccagctactggggaggggaggctcaggttggaggatcgcttgagcacaggagttggaggttacagtgagctatgattgcatcagtgcactccagcctgggtgacagagcaagaacccgtgtcttaaaagaaaagaaaaacaggaggctgggtgcagtggctcacatctgtagttccagcactttgggaggtgcaggcagaggcggaagcggaaggatcacttgaggccaggagtttgagaccatcatgggtaacatagtgagacacccatctcttacaaaaaatttggaaaaaaaaaaaa

SEQ ID NO: 23387 - DNA, 2709 bp, Homo Sapiens
gaattcggcacgaggttagcaataaggctggagaaggaaaagccggcgcgcccgcggcccgcgcgatttcccgccgagcccgcgtccccggcggcgggcgggctccgggggcgcccgggccgcggcggcgcggcggcgcgagctgcgcctccgggccggtgaatcatcccggcagacaccaagagccgcggcagcagagaggagcgctgaaacatggctgaagcggccacgggctttctggagcagctcaagtcctgcatagtttggtcttggacgtatctgtggaccgtgtggttcttcatcgtgctattcctggtctacatcctgcgggtgcctttgaaaatcaacgacaacttgagcacagtgagcatgtttttgaacacattaacaccgaagttctacgtggccctaacaggcacttcctcactaatatcagggcttattttgatatttgaatggtggtattttcgcaaatacggaacttcattcattgaacaagtctcagtaagccacttgcgcccccttctgggaggggttgacaacaactcttccaacaattctaattccagtaacggggactcagattccaataggcaaagtgtctcagaatgcaaagtatggcgaaatccactaaatttatttaggggtgctgaatacaatcggtatacttgggtgacaggacgagagcctcttacttactatgacatgaatctctctgcccaagaccaccagacattctttacttgtgactcggaccatctgcgtcccgcagatgcaataatgcagaaagcctggagagagagaaacccccaagctaggatttctgcagctcatgaagccttggagataaatgaaattaggtccagagttgaagttcccctaattgcttcctctaccatctgggagataaaattgttaccaaagtgtgcaactgcttatattctcttggctgaagaggaagcaacaaccattgctgaagcagaaaaattatttaagcaggccctgaaggctggagatggctgttaccgacgctctcagcagctacaacatcatggatcccagtatgaagcccaacatagacgagacaccaatgtcttggtgtacatcaaaagaaggctagcaatgtgtgccagaagactcgggaggaccagggaagcagtgaaaatgatgagagatttaatgaaggagttcccccttctgagtatgttcaatatccatgaaaaccttttagaagcccttctggaactacaagcatatgctgatgttcaggcagtcttagcaaagtatgatgatataagcttaccaaagtcagcaacaatatgctacacagctgctttgctcaaagcaagagctgtctctgacaaattctctcctgaggctgcatctcggcgggggctgagcacagcagagatgaatgcagtagaggccattcatagagctgtggaattcaatcctcatgtgccaaaatacctactagaaatgaaaagcttaatcctacccccagaacatatcctgaagagaggagacagtgaagcaatagcatatgcattctttcatcttgcacactggaagagagtggaaggggctttgaatcttttgcattgtacgtgggaaggcacttttcggatgatcccttatcccttggaaaaggggcacctattttatccttacccaatctgtacagaaacagcagaccgagagctgcttccatctttccatgaagtctcagtttacccaaagaaggagcttcccttctttattctctttactgctggattatgttccttcacagccatgctggccctcctgacacatcagttcccggaacttatgggggtcttcgcaaaagctatgattgacattttctgctcggcagagttcagggactggaattgcaagagtattttcatgcgtgttgaagatgaactggaaatccctccggcacctcaatctcaacatttccaaaactgaactcatcacccctcttcccccaccaccaaaactgctcctcctcctgtattcctgacctccgccatccaccccgttgctcaagccggaaactcggcagcccttccaaactcttccctctctcactccccacatcccatcgtctcggccttcacaatctgtcagttctaacctcctaagcaactaggccttcagtaaatgtgattcacctcttctttccctccttttcccaaagcatccctcttagtctaggtccttgttgtttcttgcctgaactcctgccatagtcttaactggtctccttgcttcctgtcttatcctccaccgtctttcttttatactgacacaagaatggtctttctgaattgcacatgtgagcatgtcacttccctgcttaaatttctccagtggattcccagggacttcaggatcaagtcctagttgttcagcatggcatccaagactctttatgatctggcccttgcttacctctcagccttagctctcccaactcttgcacagtcactgctcttcagccatagtggatcactcaccattcccagatgtaccaggctctcgcacacctctgcacctttgcacgtgctgtttgctgtgcgtggaatgcccttcactgtcaccaccctgctcatccactctactaatgcctcttcattcttttatactcagctttctttaaagttcttctaagctgagttaggtgtctgtcctttatgatcccgc

SEQ ID NO: 23388 - DNA, 10531 bp, Homo Sapiens
taggagccggaggaggagccgccgccgccgttgacccggccgccggccgggagctgggagagatgcggagcccggccaccggcgtccccctcccaacgccgccgccgccgctgctgctgctgttgctgctgctgctgccgccgccactattgggagaccaagtggggccctgtcgttccttggggtccaggggacgaggctcttcgggggcctgcgcccccatgggctggctctgtccatcctcagcgtcgaacctctggctctacaccagccgctgcagggatgcgggcactgagctgactggccacctggtaccccaccacgatggcctgagggtttggtgtccagaatccgaggcccatattcccctaccaccagctcctgaaggctgcccctggagctgtcgcctcctgggcattggaggccacctttccccacagggcaagctcacactgcccgaggagcacccgtgcttaaaggctccacggctcagatgccagtcctgcaagctggcacaggcccccgggctcagggcaggggaaaggtcaccagaagagtccctgggtgggcgtcggaaaaggaatgtaaatacagccccccagttccagccccccagctaccaggccacagtgccggagaaccagccagcaggcacccctgttgcatccctgagggccatcgacccggacgagggtgaggcaggtcgactggagtacaccatggatgccctctttgatagccgctccaaccagttcttctccctggacccagtcactggtgcagtaaccacagccgaggagctggatcgtgagaccaagagcacccacgtcttcagggtcacggcgcaggaccacggcatgccccgacgaagtgccctggctacactcaccatcttggttactgacaccaatgaccatgaccctgtgttcgagcagcaggagtacaaggagagcctcagggagaacctggaggttggctatgaggtgctcactgtcagggccacggatggtgatgcccctcccaatgccaatattctgtaccgcctgctggaggggtctgggggcagcccctctgaagtctttgagatcgaccctcgctctggggtgatccgaacccgtggccctgtggatcgggaagaggtggaatcctaccagctgacggtagaggcaagtgaccagggtcgggacccgggtcctcggagtaccacagccgctgttttcctttctgtggaggatgacaatgataatgccccccagtttagtgagaagcgctatgtggtccaggtgagggaggatgtgactccaggggccccagtactccgagtcacagcctcggatcgagacaaggggagcaatgccgtggtgcactatagcatcatgagtggcaatgctcggggacagttttatctggatgcccagactggagctctggatgtggtgagccctcttgactatgagacgaccaaggagtacaccctacgggtgcgagcacaggatggtggccgtcccccactctctaatgtctctggcttggtgacagtacaggtcctggatatcaacgacaatgcccccatcttcgtcagcacccctttccaggctactgtcctggagagcgtccccttaggctacctggttctccatgtccaggctatcgacgctgatgctggtgacaatgcccgcctggaataccgccttgctggggtgggacatgacttccccttcaccatcaacaatggcacaggctggatctctgtggctgctgaactggaccgggaggaagttgatttctacagctttggggtagaagctcgagaccatggcactccagcactcactgcctcggccagtgtcagcgtgactgtcctggatgtcaacgacaacaatccaacctttacccaaccagagtacacagtgcggctcaatgaggatgcagctgtgggcaccagcgtggtgacggtgtcagctgtggaccgtgatgctcatagtgtcatcacctaccagatcaccagtggcaatactcgaaaccgcttctccatcaccagccaaagtggtggtgggctggtatcccttgccctgccactggactacaaacttgagcggcagtatgtgttggctgttaccgcctccgatggcactcggcaggacacggcacagattgtggtgaatgtcaccgacgccaacacccatcgtcctgtctttcagagctcccactatacagtgaatgttaatgaggaccggccggcaggcaccacggtggtgctgatcagcgccacggatgaggacacaggtgagaatgcccgcatcacctacttcatggaggacagcatcccccagttccgcatcgatgcagacacgggggctgtcaccacccaggctgagctggactacgaagaccaagtgtcttacaccctggccattactgctcgggacaatggcattccccagaagtccgacaccacctacctggagatcctggtgaacgacgtgaatgacaatgcccctcagttcctgcgagactcctaccagggcagtgtctatgaggatgtgccacccttcactagcgtcctgcagatctcagccactgatcgtgattctggacttaatggcagggtcttctacaccttccaaggaggcgacgatggagacggtgactttattgttgagtccacgtcaggcatcgtgcgaacgctacggaggctggatcgagagaacgtggcccagtatgtcttgcgggcatatgcagtggacaaggggatgcccccagcccgcacacctatggaagtgacagtcactgtgttggatgtgaatgacaatccccctgtctttgagcaggatgagtttgatgtgtttgtggaagagaacagccccattgggctagccgtggcccgggtcacagccactgaccccgatgaaggcaccaatgcccagattatgtaccagattgtggagggcaacatccctgaggtcttccagctggacatcttctccggggagctgacagccctggtagacttagactacgaggaccggcctgagtacgtcctggtcatccaggccacgtcagctcctctggtgagccgggctacagtccacgtccgcctccttgaccgcaatgacaacccaccagtgctgggcaactttgagatccttttcaacaactatgtcaccaatcgctcaagcagcttccctgggggtgccattggccgagtacctgcccatgaccctgatatctcagatagtctgacttacagctttgagcggggaaatgaactcagcctggtcctgctcaatgcctccacgggtgagctgaagctaagccgcgcactggacaacaaccggcctctggaggccatcatgagcgtgctggtgtcagacggcgtacacagcgtgaccgcccagtgcgcgctgcgtgtgaccatcatcaccgatgagatgctcacccacagcatcacgctgcgcctggaggacatgtcacccgagcgcttcctgtcaccactgctaggcctcttcatccaggcggtggccgccacgctggccacgccaccggaccacgtggtggtcttcaacgtacagcgggacaccgacgcccccgggggccacatcctcaacgtgagcctgtcggtgggccagccgccagggcccgggggcgggccgcccttcctgccctctgaggacctgcaggagcgcctatacctcaaccgcagcctgctgacggccatctcggcacagcgcgtgctgcccttcgacgacaacatctgcctgcgggagccctgcgagaactacatgcgctgcgtgtcggtgctgcgcttcgactcctccgcgcccttcatcgcctcctcctccgtgctcttccggcccatccaccccgtcggagggctgcgctgccgctgcccgcccggcttcacgggtgactactgcgagaccgaggtggacctctgctactcgcggccctgtggcccccacgggcgctgccgcagccgcgagggcggctacacctgcctctgtcgtgatggctacacgggtgagcactgtgaggtgagtgctcgctcaggccgttgcaccccgggtgtctgcaagaatgggggcacctgtgtcaacctgctggtgggcggtttcaagtgcgattgcccatctggagacttcgagaagccctactgccaggtgaccacgcgcagcttccccgcccactccttcatcacctttcgcggcctgcgccagcgtttccacttcaccctggccctctcgtttgccacaaaggagcgcgacgggttgctgttgtacaatgggcgtttcaatgagaagcatgactttgtggccctcgaggtgatccaggagcaggtccagctcaccttctctgcaggggagtcaaccaccacggtgtccccattcgtgcccggaggagtcagtgatggccagtggcatacggtgcagctgaaatactacaataagccactgttgggtcagacagggctcccacagggcccatcagagcagaaggtggctgtggtgaccgtggatggctgtgacacaggagtggccttgcgcttcggatctgtcctgggcaactactcctgtgctgcccagggcacccagggtggcagcaagaagtctctggatctgacggggcccctgctactaggcggggtgcctgacctgcccgagagcttcccagtccgaatgcggcagttcgtgggctgcatgcggaacctgcaggtggacagccggcacatagacatggctgacttcattgccaacaatggcaccgtgcctggctgccctgccaagaagaacgtgtgtgacagcaacacttgccacaatgggggcacttgcgtgaaccagtgggacgcgttcagctgcgagtgccccctgggctttgggggcaagagctgcgcccaggaaatggccaatccacagcacttcctgggcagcagcctggtggcctggcatggcctctcgctgcccatctcccaaccctggtacctcagcctcatgttccgcacgcgccaggccgacggtgtcctgctgcaggccatcaccagggggcgcagcaccatcaccctacagctacgagagggccacgtgatgctgagcgtggagggcacagggcttcaggcctcctctctccgtctggagccaggccgggccaatgacggtgactggcaccatgcacagctggcactgggagccagcggggggcctggccatgccattctgtccttcgattatgggcagcagagagcagagggcaacctgggcccccggctgcatggtctgcacctgagcaacataacagtgggcggaatacctgggccagccggcggtgtggcccgtggctttcggggctgtttgcagggtgtgcgggtgagcgatacgccagagggggttaacagcctggatcccagccatggggagagcatcaacgtggagcaaggctgtagcctgcctgacccttgtgactcaaacccgtgtcctgctaacagctattgcagcaacgactgggacagctattcctgcagctgtgatccaggttactatggtgacaactgtactaatgtgtgtgacctgaacccgtgtgagcaccagtctgtgtgtacccgcaagcccagtgccccccatggctatacctgcgagtgtcccccaaattaccttgggccatactgtgagaccaggattgaccagccttgtccccgtggctggtggggacatcccacatgtggcccatgcaactgtgatgtcagcaaaggctttgacccagactgcaacaagacaagcggcgagtgccactgcaaggagaaccactaccggcccccaggcagccccacctgcctcttgtgtgactgctaccccacaggctccttgtccagagtctgtgaccctgaggatggccagtgtccatgcaagccaggtgtcatcgggcgtcagtgtgaccgctgtgacaacccttttgctgaggtcaccaccaatggctgtgaagtgaattatgacagctgcccacgagcgattgaggctgggatctggtggccccgtacccgcttcgggctgcctgctgctgctccctgtcccaaaggctcctttgggactgctgtgcgccactgtgatgagcacagggggtggctccccccaaacctcttcaactgcacgtccatcaccttctcagaactgaagggcttcgctgagcggctacagcggaatgagtcaggcctagactcagggcgctcccagcagctagccctgctcctgcgcaacgccacgcagcacacagctggctacttcggcagcgacgtcaaggtggcctaccagctggccacgcggctgctggcccacgagagcacccagcggggctttgggctgtctgccacacaggacgtgcacttcactgagaatctgctgcgggtgggcagcgccctcctggacacagccaacaagcggcactgggagctgatccagcagacagagggtggcaccgcctggctgctccagcactatgaggcctacgccagtgccctggcccagaacatgcggcacacctacctaagccccttcaccatcgtcacgcccaacattgtcatctccgtagtgcgcttggacaaagggaactttgctggggccaagctgccccgctacgaggccctgcgtggggagcagcccccggaccttgagacaacagtcattctgcctgagtctgtcttcagagagacgccccccgtggtcaggcccgcaggccccggagaggcccaggagccagaggagctggcacggcgacagcgacggcacccggagctgagccagggtgaggctgtggccagcgtcatcatctaccgcaccctggccgggctactgcctcataactatgaccctgacaagcgcagcttgagagtccccaaacgcccgatcatcaacacacccgtggtgagcatcagcgtccatgatgatgaggagcttctgccccgggccctggacaaacccgtcacggtgcagttccgcctgctggagacagaggagcggaccaagcccatctgtgtcttctggaaccattcaatcctggtcagtggcacaggtggctggtcggccagaggctgtgaagtcgtcttccgcaatgagagccacgtcagctgccagtgcaaccacatgacgagcttcgctgtgctcatggacgtttctcggcgggagaatggggagatcctgccactgaagacactgacatacgtggctctaggtgtcaccttggctgcccttctgctcaccttcttcttcctcactctcttgcgtatcctgcgctccaaccaacacggcatccgacgtaacctgacagctgccctgggcctggctcagctggtcttcctcctgggaatcaaccaggctgacctcccttttgcctgcacagtcattgccatcctgctgcacttcctgtacctctgcaccttttcctgggctctgctggaggccttgcacctgtaccgggcactcactgaggtgcgcgatgtcaacaccggccccatgcgcttctactacatgctgggctggggcgtgcctgccttcatcacagggctagccgtgggcctggaccccgagggctacgggaaccctgacttctgctggctctccatctatgacacgctcatctggagttttgctggcccggtggcctttgccgtctcgatgagtgtcttcctgtacatcctggcggcccgggcctcctgtgctgcccagcggcagggctttgagaagaaaggtcctgtctcgggcctgcagccctccttcgccgtcctcctgctgctgagcgccacgtggctgctggcactgctctctgtcaacagcgacaccctcctcttccactacctctttgctacctgcaattgcatccagggccccttcatcttcctctcctatgtggtgcttagcaaggaggtccggaaagcactcaagcttgcctgcagccgcaagcccagccctgaccctgctctgaccaccaagtccaccctgacctcgtcctacaactgccccagcccctacgcagatgggcggctgtaccagccctacggagactcggccggctctctgcacagcaccagtcgctcgggcaagagtcagcccagctacatccccttcttgctgagggaggagtccgcactgaaccctggccaagggccccctggcctgggggatccaggcagcctgttcctggaaggtcaagaccagcagcatgatcctgacacggactccgacagtgacctgtccttagaagacgaccagagtggctcctatgcctctacccactcatcagacagtgaggaggaagaagaggaggaggaagaggaggccgccttccctggagagcagggctgggatagcctgctggggcctggagcagagagactgcccctgcacagtactcccaaggatgggggcccagggcctggcaaggccccctggccaggagactttgggaccacagcaaaagagagtagtggcaacggggcccctgaggagcggctgcgggagaatggagatgccctgtctcgagaggggtccctaggcccccttccaggctcttctgcccagcctcacaaaggcatccttaagaagaagtgtctgcccaccatcagcgagaagagcagcctcctgcggctccccctggagcaatgcacagggtcttcccggggctcctccgctagtgagggcagccggggcggcccccctccccgcccaccgccccggcagagcctccaggagcagctgaacggggtcatgcccatcgccatgagcatcaaggcaggcacggtggatgaggactcgtcaggctccgaatttctcttctttaacttcctgcattaaccctgggccgtggttcctacgcccgaggctcccttcccttccccagccgcactcatgccctgctcctgtcttgtgctttatcctgccccgctccccatcgcctgcccgcagcagcgacgaaacgtccatctgaggagcctgggccttgccgggaggggtactcaccccacctaaggccatctagtgccaactccccccccaccattcccctcactgcactttggacccctggggccaacatctccaagacaaagtttttcagaaaagaggaaaaaaagaatttaaaaaaggatctccactcttcatgacttcagggattcattttttttatacgctggaaattgactcccctttcccttcccaaagaggataggacctcccaggatgcttcccagcctctcctcagtttcccatctgctgtgcctctgggaggagagggactcctggggggcctgcccctcatacgccatcaccaaaaggaaaggacaaagccacacgcagccagggcttcacacccttcaggctgcacccgggcaggcctcagaacggtgaggggccagggcaaagggtgtgtctcgtcctgcccgcactgcctctcccaggaactggaaaagccctgtccggtgagggggcagaaggactcagcgcccctggacccccaaatgctgcatgaacacattttcaggggagcctgtgcccccaggcgggggtcgggcagccccagcccctctccttttcctggactctggccgtgcgcggcagcccaggtgtttgctcagttgctgacccaaaagtgcttcatttttcgtgcccgccccgcgccccgggcaggccagtcatgtgttaagttgcgcttctttgctgtgatgtgggtgggggaggaagagtaaacacagtgctggctcggctgccctgagggtgctcaatcaagcacaggtttcaagtctgggttctggtgtccactcacccaccccaccccccaaaatcagacaaatgctactttgtctaacctgctgtggcctctgagacatgttctatttttaaccccttcttggaattggctctcttcttcaaaggaccaggtcctgttcctctttctccccgactccaccccagctccctgtgaagagagagttaatatatttgttttatttatttgctttttgcgttgggatgggttcgtgtccagtcccgggggtctgatatggccatcacaggctgggtgttcccagcagccctggcttgggggcttgacgcccttccccttgccccaggccatcatctccccacctctcctcccctctcctcagttttgccgactgcttttcatctgagtcaccatttactccaagcatgtattccagacttgtcactgactttccttctggagcaggtggctagaaaaagaggctgtgggcaggaaagaaaggctcctgtttctcatttgtgaggccagcctctggcttttctgccgtggattctccccctgtcttctcccctcagcaattcctgcaaagggttaaaaatttaactggtttttactactgatgacttaaaaaaaatacaaagatgctggatgctaacttgatactaaccatcagattgtacagtttggttgttgctgtaaatatggtagcgttttgttgttgttgttttttcatgccccatactactgaataaactagttctgtgcgggt

SEQ ID NO: 23389 - DNA, 791 bp, Homo Sapiens
actcgtgtctcgctaccagctccccgctgccctgcgctcggcgggctggcatccggcccgggggaaagcggaccagcccttctgcaggtctgcggggccaagtgtcccggcggcgcacctcgtggcgagaatcgggagaaggaggagactacaaggataggcccaggagtaatggagtccaaagagaaactagcagtaaacagtctcagcatggaaaatgccaaccaagaaaatgaagaaaaggagcaagttgctaataaaggggagcccttggccctccctttggatgctggtgaatactgtgtgcctagaggaaatcgtaggcggttccgcgttaggcagcccatcctgcagtatagatgggatatgatgcataggcttggagaaccacaggcaaggatgagagaagagaatatggaaaggattggggagggggtgagacagctgatggaaaagctgagggaaaagcagttgagtcatagtctgcgggcagtcagcactgacccccctcaccatgaccatcatgatgagttttgccttatgccctgaatcctgatggtttccctaaagttattacggaaacagacccctgctttcgaatttacatgttcatgatgtgcccttgttgtaaacctttacctgtcacttgtttacgtgggtctcctattaccagcttctaattgaatattgtgtttttgaaccagtctgtaagatttttgttagcagaagaattttacctattgcatggaaagatgctcattatagtgaagttaataaagcacctttaaaaa

SEQ ID NO: 23390 - DNA, 1619 bp, Homo Sapiens
aacattcctgcaaatggtttcaatatatgcagatgtctcgatataggaatgaaattacgtctttggaacaacttaaataagtcaaatatacttggagctttaaaaattaaaaggagagagattcgagcaccttttctgctgccatgacaaccatgcaaggaatggaacaggccatgccaggggctggccctggtgtgccccagctgggaaacatggctgtcatacattcacatctgtggaaaggattgcaagagaagttcttgaagggagaacccaaagtccttggggttgtgcagattctgactgccctgatgagccttagcatgggaataacaatgatgtgtatggcatctaatacttatggaagtaaccctatttccgtgtatatcgggtacacaatttgggggtcagtaatgtttattatttcaggatccttgtcaattgcagcaggaattagaactacaaaaggcctggtccgaggtagtctaggaatgaatatcaccagctctgtactggctgcatcagggatcttaatcaacacatttagcttggcgttttattcattccatcacccttactgtaactactatggcaactcaaataattgtcatgggactatgtccatcttaatgggtctggatggcatggtgctcctcttaagtgtgctggaattctgcattgctgtgtccctctctgcctttggatgtaaagtgctctgttgtacccctggtggggttgtgttaattctgccatcacattctcacatggcagaaacagcatctcccacaccacttaatgaggtttgaggccaccaaaagatcaacagacaaatgctccagaaatctatgctgactgtgacacaagagcctcacatgagaaattaccagtatccaacttcgatactgatagacttgttgatattattattatatgtaatccaattatgaactgtgtgtgtatagagagataataaattcaaaattatgttctcatttttttccctggaactcaataactcatttcactggctctttatcgagagtactagaagttaaattaataaataatgcatttaatgaggcaacagcacttgaaagtttttcattcatcataagaactttatataaaggcattacattggcaaataaggtttggaagcagaagagcaaaaaaaagatattgttaaaatgaggcctccatgcaaaacacatacttccctcccatttatttaactttttttttctcctacctatggggaccaaagtgctttttccttcaggaagtggagatgcatggccatctccccctccctttttccttctcctgcttttctttccccatagaaagtaccttgaagtagcacagtccgtccttgcatgtgcacgagctatcatttgagtaaaagtatacatggagtaaaaatcatattaagcatcagattcaacttatattttctatttcatcttcttcctttcccttctcccaccttctactgggcataattatatcttaatcatatatggaaatgtgcaacatatggtatttgttaaatacgtttgtttttattgcagagcaaaaataaatcaaattagaagcaataaaaaaaaaaaaaaaaaaaa

SEQ ID NO: 23391 - DNA, 1180 bp, Homo Sapiens
ccgggtcactgttaagggggccgccatggcccggctgtggggcgcgctgagtctttggccactgtgggcggccgtgccgtggggcggggcggcagccgtcggtgtccgggcttgcagctccacggccgccccggacggcgtcgagggcccggcgctgcggcgctcctattggcgccacctgaggcgtctggtgctgggtcctcccgaaccgccgttctcgcacgtgtgccaagtcggggacccggtgctgcgcggcgtggcggccccggtggagcgggcgcagctaggcgggcccgagctgcagcggctgacgcaacggctggtccaggtgatgcggcggcggcgctgcgtgggcctaagcgcgccgcagctgggggtgccgcggcaggtgctggcgctggagctccccgaggcgctgtgtcgggagtgcccgccccgccagcgcgcgctccgccaaatggagcccttccccctgcgcgtgttcgtgaaccccagcctgcgagtgcttgacagccgcctggtcacctttcccgagggctgcgagagcgtcgccggcttcctggcctgcgtgccccgcttccaggcggtgcagatctcagggctggaccccaatggagaacaggtggtgtggcaggcgagcgggtgggcagcccgcatcatccagcacgagatggaccacctgcagggctgcctgtttattgacaaaatggacagcaggacgttcacaaacgtctattggatgaaggtgaatgactaaagctttgctactggggctgaggattccggataccaagacgcaaacactttcactttgagctgggcaaatcttacttggcatcaacttggatggctcgcatatgacaggaaactggattgccaaggcatggcagactgagctggaggaagatgtcagaaatgtttgccctgaaatcagttacggacaaaatgttggctacaacttgaggagaaaaatcacccccaaaggagtggacatttcctaacaattctgtatggaggaaggtggggtaattgcattcgtctgcagtagacacgagttcctcggacctgtataatctcccaaagccaaggtttggtaataatgtagtccccaaatacctgaaagctgtctttaaaaatgcaggtaagcatgtgactggcaaaaaaaaaaaaaaaaaaaaaa

SEQ ID NO: 23392 - DNA, 2787 bp, Homo Sapiens
gaattcgtgagatgagtactatttccactaaggcctagaattgcctactgtacaaatagtcctgatcaggcaatatacgaatggcccaaggaagccaccaaattgattttcaggttttacatgacctgcgacaaaaattccctgaagtacctgaagttgttgtatccaggtgcatgttacagaataataataacctggatgcctgctgtgctgttctctctcaggagagtacaagatatctttatggtgaaggagacttgaatttttcagatgattctggaatttctggtctacgcaatcacatgacttctctcaacttggacttgcaatcacagaacatttaccaccatggaagagaaggaagtagaatgaatggaagtaggactctaacgcacagcattagtgatggacaacttcaaggtggccagtccaatagtgaactatttcagcaggagccacagacagcaccagctcaagttcctcaaggctttaatgtttttggaatgtccagttcctctggtgcttcaaattcagcaccacatcttggatttcacttaggcagcaaaggaacatctagcctttctcaacaaactcccagatttaatcccattatggtaactttagccccaaatatccagactggtcgtaatactcctacatctttgcacatacatggtgtacctccacctgtacttaacagtccacagggaaattctatctatattaggccttacattacaactcctggtggtacaactcgacagacacaacagcattctggctgggtatctcagtttaatcccatgaaccctcagcaagtttatcagccttcacagcctggtccctggactacttgtcctgcatctaatcctctgtcacatacctcatctcaacagccaaatcagcaaggccaccagacctctcatgtctacatgccaatcagttcacctactacttcacaaccaccaaccattcattcatctggtagctcacagtcttctgcccatagccaatataacattcagaatatttcaacaggacctcgaaaaaaccagattgaaatcaaacttgaacccccacaaagaaataattcttcaaaactgcgttcttctggacctcgaacctccagcacttcctcttcagtcaatagccagaccttaaacagaaatcagcccactgtttacatagctgccagccccccaaatacggatgagctgatgtcccgtagtcaacctaaggtctatatttcagcgaatgctgccacaggagatgaacaggtcatgcggaatcagcccacactcttcatatccacaaactctggagcatctgctgcctccaggaacatgtctgggcaagtgagcatgggtcctgcctttattcatcaccatcctcccaaaagtcgagcaataggcaataactctgcaacctctcctcgagtggtagtcactcagcccaatacgaaatacactttcaaaattacagtctctcccaataagccccctgcagtttcaccaggggtggtgtcccctacctttgaacttacaaatcttcttaatcatcctgatcattatgtagaaaccgagaatattcagcacctcacggaccctacattagcacatgtggatagaataagtgaaacacggaaactgagtatgggatctgatgatgctgcctacacacaagctcttttggtacaccagaaggccagaatggaacgacttcaaagagaacttgagattcaaaagaaaaagctggataaattaaaatctgaggttaatgaaatggaaaataatctaactcgaaggcgcctgaaaagatcaaattctatatcccagataccttcccttgaagaaatgcagcagctgagaagttgtaatagacaactccagattgacattgactgcttaaccaaagaaattgatctttttcaagcccgaggaccacattttaaccccagcgctattcataacttttatgacaatattggatttgtaggtcctgtgccaccaaaacccaaagatcaaaggtccatcatcaaaacaccaaagactcaagacacagaagatgatgagggagctcagtggaattgtaccgcctgtacttttttgaaccatccagccttaattcgctgtgaacagtgtgagatgccaaggcatttctgagccaaatggccctgtatcttctctaaaaccacatctaaagttcaagaaactagtctgtcatcgggaaaaagtttcactgctacataggattttgtcaaattgaaggtgtgacaagatggtgttctgctaatgttaaatgtcagcccacagagctaataatacctcagtataatgtcatgagcagttgaaattcatcacatgaaaagtaatctgctgaaagacttggttgcccactgcctaactgtgtacagtgttaccagtgtcccattatggataattctcaatatgttaacacctaggtgttcccaatacctttttcccctcatgtcactactgaattttgacaggaggaaggaatagaatgatagcttgttttatttgtaaagctttcagtgaaacactacatacacgaagaaaaggaacaaggtttaactatttaagaaccatttgctgccgcatagtgccattggatagggaagaacttcagaaatctgtggtactcttggccttgtctttgtcttccctgaacgtgtctccactctgtgaagccagcatctaggggctaaagatgcaaaggaaagcagcatgcattgtctgtacaaatgtgcagcgaaatccggaattc

SEQ ID NO: 23393 - DNA, 7248 bp, Homo Sapiens
tactcaaaattcacatgataaaataattgatcctgaaaaacgtgttcctactcaaggaatgtttgataaaaatgggataaagggaggtttgaaaagtgtttctttattcacatcaaagttagcaaagccatccactatgtttgtgtcatctacagaggagttaaaccaaaagtctttttctggaccatctaatttgggtaaattcaccaaatgcacattattaggaaggacttcatattcttcgatcaatactccaaaatcacagttgaatggattttatggaaaccgatcagctggtagcatgcaaaaggcctagagcgaactcctgtgccaccagaagcagttctggagaaagcttagctcaatccccagacagtagtaaatctattaattgtgaaaaaatggtaaggtcacaaagtttttcacattccattcagaattcattccttccaccttcatctataaccagtcacattcctttatagagctgtggatcttacaaagccttatcagaaccaacagctatccattagagtgcctctacggtcaagtatgctaacaagaaattcccggcagccagaagtactcaatgggaatgaacatttggggtatggatttaataggccttatgctgctggtggaaagaagttggctttaccaaatggcccaggtgtaacttctactttaggttatagaatggttcatccctctctactgaaatctagccgatctccattttctgggactatgacagttgatggaaataaaaattcacctgctgacacatgtgtagaggaagatgctacagttttggctaaggacagagctgctaataaggaccaagaactgattgaaaatgaaagttatagaacaaaaaacaaccagaccatgaaacatgatgctaaaatgagatacctgagtgatgatgtggatgacatttccttgtcgtctttgtcatcttctgataagaatgatttaagtgaagactttagtgatgattttatagatatagaagactccaacagaactagaataactccagaggaaatgtctctcaaagaagagaaacatgaaaatgggccaccacaggatatgtttgattcccccaaggaaaatgaaaaagccttcagtaaaactgatgaatggatagatataagtgtctctgacaggagtgaatgtacaaaacatacttctgggaataatttggtttcaccagatacagactacagagctggttcttcgtttgaactctctccatctgatagctctgatggaacatacatgtgggatgaagaaggcttggaacccattggaaatgtccatccagttgggagctatgagtcctctgaaatgaacagcatagatattttgaataatcttgaatcatgtgaccttgaggatgatgatcttatgcttgatgtggatctgcctgaggatgcacctcttgaaaatgtggagtgtgacaatatgaaccgctttgaccgaccagacagaaatgttcggcagcctcaggaaggtttttggaaaaggccaccccagaggtggagtggacaggagcattaccacctcagccaccctgaccactatcatcaccatggaaaaagtgacttgagcagaggctctccctatagagaatctcctttgggtcattttgaaagctatggagggatgccctttttccaggctcagaagatgtttgttgatgtaccagaaaatacagtgatactggatgagatgacccttcggcacatggttcaggattgcactgctgtaaaaactcagttactcaaactgaaacgtctcctgcatcagcatgatggaagtggttcattgcatgatattcaactgtcattgccatccagtccagaaccagaagatggtgataaagtatataagaatgaagatttattaaatgaaataaaacaacttaaagacgaaataaagaaaaaagatgaaaagatccaactattagaacttcagcttgcaactcagcatatctgccaccaaaaatgtaaagaggaaaaatgcacttatgctgataaatatacccaaacaccctggagacgaattcctggtgggtattctgctccctccttctctccttggcagggctccttccaggggatcccacggactgttccaccgcaccgcagacagacctcaagtactacagccttccagcagccttcccagacccacagatcacacccagggaaaactaataaagccacaacgtatcgaggcccgcagtgaatgctcaatccaagacatgcatcagggcggtgcacatccggaagaaagctttacacacgtcttgcaccaagaaagcaactatggtttggaagagcagcctttttcatcaggcccacaattaacaatggatgtggctaagagtacaccttctgaagcaaacttaaacattactgtaaatgctcaagagccttatcatttggcaaacaatcaaattagtgacatgcagtttatacccacttctcttcagacacctcccgagtcaagtacagtagaccaggctaagagagttggaagaaatcagtctccgccagtgggttatatgtctcagcccaagtccttgcagcttttaaagccatccatattgagttctttggtaccgcctccagtttctgaatcatctccaagtaggactcccacttgtaaaaagtcaccaataatcacaacatgtaattcagcaaaacttcagccaacatctagtcaaacaaatcttgcaaataatcagaatctgaaagcatctaagctccgccccccctcaggctctttcaaacaaaaacaaacaaacagcccccaactagagcctcaaagcttccaggccaagacaagcatcccaaggccactaacacaacgaaaagaaatcatgcagaatccaaatggcaatttgcattctggggattgtttggcctctaatcgatattctcgtcttcctaaaccaaagatacattaagtacatagccatcacctgccaatttgtttcttaaaaacaatctcttctgtaatagctttatgtgcagcttgcagcttgctactgtggtggaggttccattgaaagcctgcaaatcttaaattaaaatgtggaagcttctactagtttggctccttcattttatatcctggttgaagtacatgccatttgagcataattatctcaggtaaacacgaaagtttgcttacccatttcagaggcctgccaaaggcccaaatcatgttatccatccctctccaggtcagaaaattcataatattttactgagcaggcaagaagtgtgctttgctggtttagtcctattaaggtctgtatttattgtggttgtcagaacctcaccccttttcacttgtctctcctgtgaatatggctactattttaactaaagatatggtgataatggaagatggtagtctgtaagcagagttctggccagtgttttgtatatttaaaaggtctatgcaaaagctttgtgatgaataaaggagattaggcttttaatggaaagtctatgtaagttttatttttccttgccagggtcagtcagctaatgttactgttgattcatttcccaaattccccagactgaaaatgtttcttattacatataaatcagttatatattcctttacatcttgttttacaaacacatgtgcatgcacacacacacatacacacacataccatttatgtttgtatttgttactgggtaaattttggagcgcttgagatacaccttgaaacctgtacctaaagatgtattcatttgtaacatatgttggtgctagagttttgctggtaattcaggtttgaacccttaggcttgtggatccatgatagccattttaaggttccacagcattatgtctttaattgtaatatttatatttattgattttctgctaatatctgaagactgaaataatgaacttgaaacatttgcacaaaactttgatggggtataaatataccatatatagggattgtaaactattttctatagcaaaacaagttaaaatattttgagaaaaataacaaatttaaataagactatcttgagaaagctggagttcataatattctccccctcccccatctccagtctcctaggtttcccttttctgtgttttttgtttttttctgtttgttttttgagacagagtcttgctccattgcccaggctggattacagtggcgcaatctcggctcactgcaacttctgcctcccgggttcaagcgattctcctgcctcagcctcctgagtagctgggactacaggcatgtgccaccatgcctggctaatttttttgtatttttagtagagatgaggtttcaccttgttggtcaggctggtctcgaactcctgacctcaagtgatccacccacctcgtctatggtgtatttttgaaagacaattttttaaaggtagatttgggaaaaaaatagaattgaagatgggaaattttgttttattaaaaaggtgctagaagatgtttcaaagacaatattcttattttaatacgctgtagaaggtaggtgtggaacctccatgctaccatgtgcacaaacctaattatgctttgggtcacttgtcagttcagtaaatctgccttcctcttctcccaaatcatgtcatctttaggttgttcacctgcagctgctttaaatgaattagtatctttcagatagataaccttacaaggagaatgtttgttttgagcagctgaccaaaaatatatcaaacaggattatggccaaaaagtcactcaaatttctagagattcctttaaaagatgtatgttgatgaaattgcccctttataagaaaaacaacagcaagtcttttagtagaaatttgaaagaagtgtttgctaccattttgacccattattcccttacctatcagatgaatttgccattcactggatagaaaccattcttggatttggtaagaggtgagcaagacaaatcttgtaccatactcttatgtaccagcacttctgatggagaagcagtgaagttcagaacgttcttcacatagtccagatactgttagagtcaggcaaatcagcaaagcactttgttatggagatgacccatgatggctgcagttgtaagtgggcatacatgttctatcattttgaaggagaaagaaaaccgttctcacatgtcgcaaatatgtgaatcatactatattcccctaaagtaaaaccagtgacttagtggtttttggtttatttagaagttggtttagacccttatgaaacattatttacgagttggccttatccttaagggaaaagttctaaatttttaaatttatttttaattccctagtctgagggaaatgtctttattgtccattacataaaaatgttgactccagtaatttatttttctctattttttcctccatgtatttactccatttttctctattttttccttccctgatggatttgcagaaatgttaaccaattagctcaacttttctctacctttgttgagtcttaatcttttagaagataggcttaccgtatatttatgaagcataatatattaaaagaaaacaaatctaggatgcttgcatgacataaagtatttgcctgcagttttcattaaaaactgcaagaatatcatgcttgtctgcttcttagtaaatgttaagtctgaaatggaagtgaggatgtaactctactgaataatcaaagatcatcttagatttggcttgatctgtgtttattgcttctattaatgtaaatcaactctgtgccaaatcctcctccacaaaccatttattgtcttagttctagtggtatcaatgaagatagttacagtatatgaattctaagtcctgaggaagaaattttatggggtttgttaagtttcacattcgtgaaagaggaaattagtagagtattcagactttgatatttggctgttaatgggatgcatatcaaatttttaaaagaaggcttggcctaaggagtttattggtacaggtgcagatgattttaaggcattaaaggattatagagttatgtcatttgagactgtttctaataactgagaccatctaacatttttcttttggagtctcatttttatttgtgcaatattttcaggcatataggctactgttcattgtatttatatatatattagaatttactaagtactttaacaagtaaaaatctgaatatgaaagaaaatatcagatttgcactttaaatgagcttaattgcttgaagttgtgcctgaaatatcgaattgcctcctattgggtgtggctttgttgaaataaatttgtaattgttgctgtttgaagatatcagtacagctgttcacagaaatatattcccagcatgtcacttttccattaaagcactaagttttctttgaatgttccattgttccgataagtattttacttttttctcagtacatcagagagagcgtgatccccctacagctgtcacttccaaatgttcctgtagcataaatggtgttacagacactgaggtgcactcttggtttctgagcagagttgtcatactggtttcctggctctagggcactggggatgtactttgaaatcaccgaacaggcttgcaattaagatcaataaggctgcagcaccatttcaatttactttccatcttacccagtagtttttgtgtttttaaattcgtttgggtggttatgtttgcatgcttaagcacacatttgaaaattaattatagctgtactacccgatgtttttccttggggatgatggccttgttcctttttaaattctgatgcttgaattctattttctagtgatttttcacatctccctttaagtttttgctgcagcaatttgagagagtacttttgattaaatgattctgatggtgggcaccaatctacaactatgtcattaactgaagatacatgttttaatcttgttgggaataagcttacccactttctccttggtaaagcgtttacttaacaaaataatacccgagaatgtaaggtctctaagtcattactaacaaagagcaaaaataatatctgcagtattgtttttcccattgattttaagtcagtttagagtacaaactgtatattagaatttgcctgtaaaatgaattctaaaaagcagatgtaaagtctctcctgaaaatgttggcatagtaaataaaaataaagttcataattataaagtaaaaaaaaaaaaaaaaaaaa

SEQ ID NO: 23394 - DNA, 2648 bp, Homo Sapiens
cttggcctctgtttatttgcaaaaacgagtaaagtgttacctacctgcaagtggttcagtgcgtgccggggtgtcaggctgcaggtatgtgagcttgttcaaggcttgtcttacccacatggctgtttttctaggcctcgggccagtgctcctttaaaaagtgatgttcagcgtagagtcgctggagcgggcggagctgtgcgagagcctcctcacttggatccagacatttaatgtggatgcaccatgccagaccgtggaagatttaacgaatggggttgtgatggcccaggttcttcaaaagatagatcctgcatattttgatgaaaattggctaaacagaatcaaaactgaagtaggagataattggaggctaaagataagcaatttaaagaaaattttaaaaggaatcttggattataatcatgagattttaggacagcaaattaatgactttacccttcctgatgtgaaccttattggggagcattctgatgcagcagagcttggaaggatgcttcagctcatcttaggctgtgctgtgaactgtgaacagaagcaagagtacatccaagccattatgatgatggaggaatctgttcaacatgttgtcatgacagccattcaagagctgatgagtaaagaatctcctgtctctgctggaaatgatgcctatgttgaccttgatcgtcagctgaagaaaactacagaggaactaaatgaagctttgtcagcaaaggaagaaattgctcaaagatgccatgaactggatatgcaggttgcagcattgcaggaagagaaaagtagtttgttggcagagaatcaggtattaatggaaagactcaatcaatctgattctatagaagaccctaacagtccagcaggaagaaggcatttgcagctccagactcaattagaacagctccaagaagaaacattcagactagaagcagccaaagatgattatcgaatacgttgtgaagagttagaaaaggagatctctgaacttcggcaacagaatgatgaactgaccactttggcagatgaagctcagtctctgaaagatgagatcgacgtgctgagacattcttctgataaagtatctaaactagaaggtcaagtagaatcttataaaaagaagctagaagaccttggtgatttaaggcggcaggttaaactcttagaagagaagaataccatgtatatgcagaatactgtcagtctagaggaagagttaagaaaggccaacgcagcgcgaagtcaacttgaaacctacaagagacaggtagtagaactacaaaacagattatccgaagaatcaaagaaagcagataaactagattttgaatataagcggctaaaagaaaaagttgacagtcttcaaaaagaaaaggacaggctgagaacagaaagggattctctgaaggaaaccattgaagagcttcgttgtgtacaagctcaagaagggcagctcacaacacaagggttaatgcctcttggaagtcaggagtcttcagacagtctagctgcagagattgttacacctgaaatcagggagaaacttattcgtcttcagcatgagaataagatgttaaagcttaaccaagaaggttcggacaatgaaaaaatagccttattgcagagccttctagatgatgcaaatctacgcaagaatgaactggagacagagaataggctggtgaatcaaagacttctggaagtacagtcacaagttgaagaattacaaaaatctttacaggatcaaggctcaaaagcagaagattcagtccttctaaaaaagaagcttgaagaacatctagagaagctgcatgaggccaataatgaactacagaagaagagagccattattgaagatctcgagccaagatttaacaacagctccttaaaaattgaagaattacaagaagctttacgaaagaaagaggaagaaatgaagcaaatggaagaacgatacaaaaaatacttagagaaagccaaaagtgtcatccgtactttagatcctaaacagaatcaaggagcagcaccagaaatacaagctcttaaaaatcagctccaggaacgagaccgactgttccactcattagagaaagaatatgagaaaacaaagagtcagagagagatggaagagaaatatattgttagtgcctggtacaatatgggaatgaccctgcataaaaaggcagctgaagatagactggcaagcacaggctcagggcagtcatttctggcgaggcagaggcaagcgaccagcagcagaagatcatacccaggccacgtgcagccggccacagcaaggtagagaagttgtgccgctcaatcacagacacctgcacccacaacatacttctgttacacacaagaacatttcaggaaactcagccagcttattttttgtttctcttctatgtcaatacttagtgtttctcattttgaggactttttctctctcctgtatctttgttttagtttctttggtttttattttgtagtcctttcagttatttttaatgtgccaaaaatttgtacatgttcaattaaaaatgttgtataatagtgtaatacttttctttgtatgaaaatgtcctcttcttcaaaggtataggctttgtaatgaattagattttctg

SEQ ID NO: 23395 - DNA, 1776 bp, Homo Sapiens
cggacgcgtgggcggacgcgtgggctcggagagtcccgggtgactgccgcaggctccatcgccctgtggcctgcaggtattgcgagatttatagggaggacgctgggacccccaaaagctgggaaatgggactattggcattcagggatgtggctctagaattctctccagaggagtgggaatgcctggacccagctcagcggagtttgtatagggatgtgatgttagagaactacagaaacctgatctcccttggtgaggatagcttcaatatgcaattcctatttcacagtcttgctatgtctaagccagaactgatcatctgtctggaggcaaggaaagagccctggaacgtgaacacagagaagacagccaaacactcagctttgtcttcttatcttactgaagacattttgccagagcagggcctgcaagtttcattccaaaaagtgatgctgagaagatatgaaagatgttgtcttgagaaattacgcttaaggaatgactgggaaattgtgggtgagtggaaagggcagaaggcaagttataatggacttgacctatgctcagcaactactcatagcaaaaactttcaatgcaataaatgtgtgaaaggttttagtaaatttgcaaatctaaataaatgtaagataagccatactggagaaaaaccattcaaatgcaaagaatgtggcaatgtctcttgcatgtctttaataatgactcaacagcagagaatccatattggagagaacccgtaccaatgtaaaaaatgtggcaaagcctttaatgagtgctcatgctttactgactgtaagagaattcatgttggagagaaacattgcaaatgtgaagaatgtaataacatttttaagtcttgctcaagtcttgctgttgttgagaaaaatcatactgaaaagaaaacctacagatgtgaagaatgtggcaaagcttttaacctgtgctcagttcttactaaacataagaaaattcatactggagagaaaccatacaaatgtgaagaatgtggcaaatcctttaagttgttcccataccttactcaacacaagagaattcatagtagagagaaaccctacaagtgtgaagaatgtggcaaagtctttaaattgttgtcataccttactcaacatagaagaattcatactggagagaaaaccttccgatgtgaagaatgtggaaaggcctttaaccagagctcacatctgactgaacataggagaattcatactggtgagaaaccatacaaatgtgaggaatgtggcaaagcttttacctggttctcataccttattcagcataagagaattcatactgggcagaaaccctacaaatgtgaggaatgtggcaaagcttttacctggttttcataccttactcaacataagagaattcatactggagagaaaccctacaaatgtgatgaatgtggcaaagcttttaactggttttcatatcttactaatcataagagaattcatactgaagaatgactaagacctactattcgatagcacaacagggtgactacagtcaataataatttaattgtagattttaaaataaccagaagagtataattggattgtttgtaacacaaaggatgcttgaggggatggacaccccattttccctgatgtaattattatacattgtatgcctctatcaaaacatctcatgtacctcatgaatatatacatgtacacacaaaaattaaaaataaaaaaagaaaaagaaaaaaaaaaaaaaaaaaaaaaa

SEQ ID NO: 23396 - DNA, 1598 bp, Homo Sapiens
gtgagttgaccagagaaggatgagagaattgccaagttgtactgaacgccaagctgagaatggtgattctgaagatagaatgcgtttgcaatggctgctactgtgaacttggaacttgatcccatttttttgaaagcactaggtttcttgcattcaaagagtaaagattctgctgaaaagctaaaagcactgcttgatgaatctttggctcggggcattgattccagttaccgtccatctcaaaaggatgtggagccacccaaaatttcaagcacaaaaaacatttccattaagcaagagcccaaaatatcatccagtcttccttctggtaataataatggcaaggtcctcacaactgaaaaggtaaagaaggaagctgaaaagagacctgctgataaaatgaaatcagacatcactgaaggagttgatattccaaagaaacctagattggagaaaccagaaacacagtcatctcccattactgtccaaagtagcaaggatttacctatggctgacctttccagttttgaggagaccagtgctgatgattttgccatggagatgggattggcctgcgttgtttgtaggcaaatgatggtggcatctggcaatcaattagtagaatgtcaggagtgccataatctctaccaccgagattgtcataaaccccaggtgacagacaaggaagcgaatgaccctcgcctggtgtggtattgtgcccgatgtaccagacaaatgaaaagaatggctcaaaaaactcagaaaccaccgcagaaaccagcccctgcagttgtttctgtaactccagctgtcaaagatccattggttaagaaaccagaaactaaactgaaacaagagacaacttttctagcgtttaagagaacagaagtcaagacatccacagttatttcaggaaattcttctagtgccagcgtttcctcgtcagtaactagtggcttaactggatgggcagcttttgcagccaaaacttcctctgctggtccttcaacagcaaaattgagttcaacaacacaaaacaatactgggaaacctgctacttcgtcagctaaccagaaacctgtgggtttgactggtctggcaacatcatccaaaggtggaataggttccaaaataggttccaataacagcactacgcccactgtacctttaaaaccacctccacctctaaccttgggtaaaactggccttagtcgctcagttagttgtgacaatgtcagcaaagtaggtcttcctagtccaagtagtttagttccaggaagcagcagccaactaagtgggaatggaaatagtggaacatcaggacctagtggaagtactaccagcaaaactacttcagaatccagcagctctccctcagcatcccttaaaggcccaacttcacaagatcacagctcaatgctatgaagcgattacagatggtcaagaagaaagctgcccaaaagaaactcaagaagtaatgtggccaagtaggtttttgtatcatattagcctaaagatgaaaggcttattattatgatataatctgtaatacactgtaatttaataaaagtcttcataatcaaaaaaaaaaaaaaaaa

SEQ ID NO: 23397 - DNA, 1909 bp, Homo Sapiens
gagagaggtggtgaaactcaagatccccatggacaacaaggaggtcccgggcgaggcgcccgcgccgtccgccgacccggcgcgtccccacgcgtgccccgactgcggccgcgccttcgcgcgccgctccacgctggcgaagcacgcgcgcacgcacacgggcgaacggcccttcgggtgcaccgagtgcgggcggcgcttctcacagaagtcggcgctgaccaaacacggccgcacgcacacgggcgagcggccctacgagtgccccgagtgcgacaaacgcttctcggccgcctcgaacctgcggcagcaccgacggcggcacacgggcgagaagccgtacgcatgcgcgcactgcggccgccgcttcgcgcagagctccaactacgcacagcacctgcgcgtgcacacgggcgagaagccgtacgcgtgcccggactgcggacgcgcctttggcggcagctcgtgcctggcgcgccaccgacgcacgcacacgggcgagcggccctacgcttgcgccgactgcggcacgcgcttcgctcagagctcggcgctggccaagcaccggcgcgtgcacacgggcgagaagccgcaccgctgcgctgtgtgtggccgtcgcttcggccaccgctccaacctggcggagcacgcgcgcacgcacacaggcgagcggccctacccctgcgccgagtgcggccgccgcttccgcctaagctcgcacttcattcgccaccgacgcgcgcacatgcggcgccgcctgtatatttgcgccggctgcggcagggacttcaagctgccccctggcgccacggccgccactgccaccgagcgttgcccggagtgtgagggcagctgagtcccgcagggctgcggaggggcgcgctggggcttcgacctggctgcactaacccaggctcctcctcgccccggcctccgggtctgggaaattgaggggacggcaggcccggctgccctggaactgggagacagggagaatcccctgccggggtccctggaaacagtgcccaccccacatcactacattccctcggcccgtgttagtgaataaagtattatatcctcaccccacccgtgcctgtgagtgaggtgggtgggagaggaagaaagttggggttctccaggctcaggtgccaagtgagttgtcaaggaaccaaatggggatgtaaacctaaaaggggttcccggcacctcggtttgtgttggttggaggtgatcgcacacttggcccttggttacgtcctcataaccttagacctgaaagggcccataaatatactatgttcacgatcagacacgcactgcattcggcagagctccagtgagcaaggcacgaccctcagatctcagtctagtgaaggagagaaaactgtaataacactacgttaaaggttttaactgctttgttatgtaagcttacccagcccggcgcacagtgactcacgcctgtaatcccagcactttgggagggcgaggctagcagatcacttgaggttaggagttcgataccagcctggccaacatggtgaaacccggtctctactaaaaatacaaaaattaactgggtgtggtggcgggcgcctgtaatcccagctactgagggggctgaggcatgagaatcacttgaacctgggagacagaggttgcaatgaaccgagatagtgccattgcactccggcctgggcaacagaggaagactgcctcaaacaaacaaaaaacaacaaaccaaaccaaaccaaaaaaatctcaaagcgattggacctagcagctcatgcctgtaatctccagcactttgggaggcggaggcaggaggatctcttgaagtcaagagtttgagatcagcctggagaacaaagtgagacccccatctattaaaaaaaaaaaaaaaaaa

SEQ ID NO: 23398 - DNA, 2208 bp, Homo Sapiens
gggcaccgtaaccagcgccgcggacaccggcaccggcgccacggactccgcaggaccccgcgcccgccgccgccgctatgctggggctgctggtggcgttgctggccctggggctcgctgtctttgcgctgctggacgtctggtacctggtgcgccttccgtgcgccgtgctgcgcgcgcgcctgctgcagccgcgcgtccgtgacctgctagctgagcagcgcttcccgggccgcgtgctgccctcggacttggacctgctgttgcacatgaacaacgcgcgctacctgcgcgaggccgactttgcgcgcgtcgcgcacctgacccgctgcggggtgctcggggcgctgagggagttgcgggcgcacacggtgctggcggcctcgtgcgcgcgccaccgccgctcgctgcgcctgctggagcccttcgaggtgcgcacccgcctgctgggctgggacgaccgcgcgttctacctggaggcgcgctttgtcagcctgcgggacggtttcgtgtgcgcgctgctgcgcttccggcagcacctgctgggcacctcacccgagcgcgtcgtgcagcacctgtgccagcgcagggtggagccccctgagctgcccgctgatctgcagcactggatctcctacaacgaggccagcagccagctgctccgcatggagagtgggctcagtgatgtcaccaaggaccagtgaccgccaccttcacaccgtctgccctggccaccatcctgggcctgggggctgcccacagatgggcagtctcagccatactctgttccagctggagtagcctcctgaccagcctggcccaccctgctccacccactgggcccccccagttattgatacccctctgtgctgggctccacgctaggcagaaggaggagtggcattggcatcctgacccagctctgccctcaaggtggggatggatgggcaaaggagagtcctgcctggccctacgatgaggccactcatgtgggcctaggtaggggaggatggtgcctggagcagagggacccacaagtgcctcccgagcctagatcctggctcggaccactgcaagggccgaggcagggccagaccagagcatcctgggtacaggcctgggctctccagggcctgggcctgattcaggtgcagtgggcactcctgaagggtcagagcggcatctgccaggcagcccctctggcttccgctgaggtggttgcaggcctggggcagagcctgggtggtcagaggccggggctagaggcagatggaagggaggcatttgctgacagaggacggggcacccgggctccccactgcagtcggccttgcctcctcctcctcctctacctccagtcaggctggacgggagggtagccttgtggctgagaggggtcagactaggtggcacaggggctcctggaaagacagcaggcttcctgctgggcgttcccttgttggagggaatagagtgggggtgggactctgcaggggtgtccttgtccactcgcacccctcgccgcccaccagggccatgctctgtgacttgggctgatccccaccctttctgggcctacagcaccacaggccgctgtacccccttagagctgcccctctctggcctggccggcaggcgtcttcttaactcctctgtcctctatattcagcatgttccttgtcagctgctgggccggccctgccttgcgctagcagagcctctcctggcagcttctcaggtctccctaatggagacaccaggctactaggacactggctggggccaccccctcctgcctaatgcctcaccttacagctggggaaactgaggcctggaatggcccagagtcaccaaggcaaagttggggctggtcccagcctgaggctccagctgatgccctcagctcccagagagggggtgccccatctagctgggtgcaggggtcactgcttgtcagctcagggccctgtgcccgcttgcctgttcccctacatctgtgcctgcacatccagaactgcctccttgccgctgcctccaggaagcccaccttgagccagagtcaagggctgcagcactgcccgatagaacacgcccgccctcactgctgttcttgccttacagccaccatgggaaagctgcaacctttctgttttatttaaagaaagcccaacattaaagggttttcattgcaaaaaaaaaaaaaaaaaa

SEQ ID NO: 23399 - DNA, 6722 bp, Homo Sapiens
ggcacggggacatcaggatatcctgagtgtgtctgcagatggtggcatcgtgatgggctattctagtggcgtcaccaatgggctgaatgatgccagcgactccatctacacgaaaggcaccccggagattgctttctggggaagcaatgctggggtgaaaacaacacggctagaagctcattctgaaatggggagcactgaaattttggaaaaggagaccccagaaaatctcagtaatggtaccagcagcaatgtggaagcagccaaaaggttggccaaacgcctttatcagctggacagattcaaaagatcagatgttgcaaaacaccttggcaagaacaacgaatttagcaaactagttgcagaagaatatctgaagttttttgattttacaggaatgacgctggatcagtcactcaggtatttctttaaagcattctctcttgtgggagaaactcaagaacgagagagagttttaatacacttctccaatagatatttttattgtaacccagataccattgcttcacaagatggagtccattgccttacctgtgcaataatgcttcttaataccgatctacatggccacgtgaatattggaaagaagatgacctgtcaggagttcattgcaaatctgcaaggggtaaatgagggtgttgatttctccaaggatctgctgaaagctctgtacaactcaatcaagaatgagaagcttgaatgggcagtagatgatgaagagaaaaaaaagtctccctcagaaagtactgaggagaaagctaacggaacacatccaaagaccatcagtcgtattggaagtactactaacccatttttggacattcctcatgatccaaatgctgctgtgtacaaaagtggattcttggctcggaaaattcatgcagatatggatggaaagaagactccaagaggaaaacgaggatggaaaaccttttatgctgtactgaagggaacagttctttacttgcaaaaggatgaatacaagccagaaaaggccttgtctgaagaggacttgaaaaacgctgtgagtgtgcaccacgcattggcatccaaggccacggactatgagaagaaaccaaacgtgtttaaacttaaaactgccgactggagggtcttgctttttcaaactcagagcccagaggaaatgcaagggtggataaacaaaatcaattgtgtggcagctgtattttctgcaccaccatttccagcagcaatcggctctcagaagaagtttagccgcccacttctgcctgccactacaacaaaactgtctcaggaggagcaactgaagtcacatgaaagtaagctgaagcagatcaccaccgagctggccgagcaccgctcatatccccccgacaagaaggtcaaagccaaggacgtcgatgagtacaaactgaaagaccactatctggagtttgagaaaacccgctatgaaatgtatgtcagcattctcaaggaaggaggcaaagagctactgagtaacgatgaaagcgaggctgcaggactgaagaagtcgcactcgagtccttcgctgaacccggatacttctccaatcactgccaaagtcaagcgtaacgtgtcagagaggaaggatcaccgacctgaaacaccaagcattaagcaaaaagttacttagagtccatctgcggccaggaagtgctggtcatggagcaaaatagggtttttcaagatctttctggtaatccgtgaatatatttaaaaaaaaaaaagtctgtgacaaaacggtgcattagtaattttttctattgtatatttttgttagtttctgtacagattgtctttgctcttgatttcttttgctttgatgatttttgcaacttgatagctaatgcaccttttctgtgaggaggaggggatcgtgatttcagaatgaattatgtatcccttctcttttggttttctcttgtttgcagtctgctcagttgttttatgtattctcatatcaactgttaaacttttttttaaggttaaagaatttaatccattgtgaaacacttaactggacaaactgtagttttagtaaattctagctggagttaatatacgcctttatatgtgaaatcttgcccagtcacagaggtagaattgagcactcacagatgctccagtaagaatcacagtgctgggaatctagttgctccaatatgaggcagcttcatgtgcagcttagcacttgttgttgagatcggaccctgctggaagcagggaaaagaagcgtgaagatcgtaggattgagaacttagggaagcacattagcttgcttgaagtgctgattccatttcagccaagcaagggaaagaggaagtggagtcattttgcctttgaaggctgaggaaagattgatacccagttaattttgtttgctaaaggatgggggcaataatcggcccttgaggagctgcagcagtaggcatgtgctcagtctgcaggaattgttacctcactcccacagggtctagactagaaatccatcatctctatcgttgatatccttccatccaggaatagatttttcttactctacatatgtgtgtgtgcgtgcgtgtgtgtgcgtgtgtgggcatggggttgtgtcctggttgtgatattgaggtcttccttcctaacaaattaatactaaaatgaaacagcttttcttgtgtccttaagacaaaataaggaaggaaaacgtagctgcagttgtccacgatggatattggttctttaaaatatatctgaaagtagtagtcagaatgaattatggttggaaaactgaggaatcttctggttgcaggtgcaaagtgactttgtttattcttgtctcagtctccttgatagccacttcactctgctactactcaactttctcctaaaaatacttcatctattttcagtcctttctttctgtctactcaaaatggttctattaactttgcagtcatgagcttgttccagttacagtccctttgaagttcagggtgataaacagaatattcttctgtagaggaagagaaaggagtgaaagtttagcccactgagacctagagctttgtgatttcctaaccttgaaactctgtaatccctaaagttaaaatctccgcaagtggcacaacttcagaactaatagtatcactttgatttttctttttcctcccttagaaagtttctctagttctatagtttatttgttgaaggtactatgaccaaagaatcagctgctctacaggaatagcatggttccagtgaattagagaaaacctgctgtaaagccatggtagtgtctaagtggtatgttattatgatgtactagcatttatttacagaattatttattaacgtttacttccttcccctctgtaaatgtccatgactattgcccagagaaggcttacccctctctagggttgcagttgctttctttgtaataagtattttgccacacctgtaaaaaaaaaaaacctcacttttaactctctgccttgtttgggtaaaggcagtaactaagtttatgtttcagaactgcaaaacaaacaggatagttaccaatatggcccatgtgtcagattgatttttgtagcctctcactgaatccaacatatccacaagcaagttatctgtctttctacctgataatctaaattatcaggatatttgttttctgcctaaatgtttatactaagccgaggggagagaggtacctagaccatgtcatctacgagcttcagtaactaaagaaaaaggaacttccctgagtggcttgaatgtgtttgcccacagtctatatctatgtatatagaatgtctgtatgtattttacttatttaatatacattgaatggtaccttgctacagtatttctgacatttagagtagtgttgaaatactcggctagcatcagcaccactatagcactgtccgtgtcatatgagtcactaatattaactccagggacttctggataggctaatagatcattggatacgaagggctcttttgaagcttcagtataccatgtttgcatagtttatctttaaaaacaactttaaaggttcttttgtgagccaggatctcagactgccgtagcatgatgctgtccatctttagcgcatgggctgagaacacctcttccctgaggcttctgaaggttgctgtctgtcatgagtgcatgaaggaggccaagagtttatgctatgggaggaaccagtcactgatttgcctagattctgagagtctggcccatagccaaccacattttcctttgggataatttatttcctgtggcatctagccagaagaaattgaggatgtttcctttcacagctgctccaagcctgttgcccaattcacggtacaagggagcaccccttccctttcctctgaaggtacgccacccacctccgtcgcccacctcagcgcccaggagccttgggacttccttccatatgataaatcattcttcttcacgtcaatacacttcatattaatttctagtacagaaaatcttgacagctatcagaatgccttggtcatagtgttgttgcaaaattgaccatacaggtggcccatgtataaaatctgaattttaggggtttgtccccacctcgcatgctggcttttacagggaggtgtctgggattcctcattagcaatcaaaacttaattactgggatgcagagtccttactttatcgccagcccgtaggcatttctgaagtgcacttttttgaaacatcattttgctaactctcagcagtgtctaattaaactgagcaatacttttgtgaattttaattaatctcagcaaaaccatgatgggagagagtcctctgatggaaatgtagtccctggattatgtgtaacctttttattgctcttagatgcagaggatagaaagcattttttggtgcagtggtcttgtggcaaacacaagaccctctatgcgtctccaactgttatcctaatctagaaaatgaggactggcccctgggcaaaagtgacatgaggaatttactctggaagaggaaaatctgggtggctttccaaggctaagataggtttgtatttcaccctgtggccaagctacagaacttctgagattgtggaagaatttttgcaaccagcagggaaagaggcctcttactgcctaaacacaaagttacactgagcttttctactgtcctttgcctattgctccctctatcatgtaaagatctgggaaggatgagaggcagggcctgcttgtcatgagctgcactcttttctttttaactaatcattgacaattggaagaaaattgacgttaaagaagtttctccattgtcttactaacaaaaccttttgggtttcattaattgtccttgaaattgagttcctttggcatttttccttgcagtcatcagttaagcatgttgcatcctgaattcacagaagtttagctttgcaggtttgaatctctgtaatttaactcccgtggacttggtcgagttttcagcaggttgggagccacctctcttcatttcagcagtgagtcatcccttgacttttcaaatgacagaattttttccaattgtaaaattagcactgtaaaacaaagaaccaaagtggcatcctaagagttgttaaacctgaagtctagtttatgaggaattgtccaagttggagtttaaatagtatctgcttttgtctcaaagcatctaagttattctgacagaaaatggtaagtcagctttgcaggcagatgcgcctctgggcctcctaccttgctccacagctttctggccatcttgtctcccaggccatgccactgctctgccacatgtcagcaaatttctttccaccagtcttatagcatcttacatgatcaaatcatcacagaataaccccgtgatagattattgatagcaatagagaggggcggctttgtcactgatttttctctcagattccttttccatctctcatccataaaggaaggactgaaatccaaaggcattctccttttgtacctacagtatccagaacccacgtgggcagccttctgcttatgacaataattggcccattgcatgcagagagaatgtcttcatagagagaatgtcattaaatacttgaatctgcatgacagtttgacttgaatgcaacagcaggaaaattttgcaagttacataattgtatatacagtaggttttcttaagtctcttcggttcatcctttgtaatttgtgtgtgtatctgtagtattgcaggcttttggagactattcttacaggcagtatgtcagtcatcaaagaaaatgctgtcacctgccattgttgtatttgtgggtatttatagttgtatgtatgtaaatgcatcagtgtgtagattgcatatcagtgtatggtacatgtacatcaaaattatttttgtccttaatcagtgtgatatgaaaagcaagtacaacctcataggactgattatataatgaagttgttgagagtatatatagtggtattgttttattaaacttaaactcaaataatattttgattaaaatttttaataagactttatgctagaaaattctttgagctttgaatcaccagggcaaaaatgactttcaactaaccttgtgaatcttttgcagtgtactgtgtgcaataccaagggcatagctccctgtaatttgggaaatacagaaagaaaagaaaaaaaaaaaaaaaaaa

SEQ ID NO: 23400 - DNA, 2457 bp, Homo Sapiens
gtccttgtcatgcccagcctcagaactcgccgtgaggaggcagagatggagctctcagttccaggaccatccccctggacccctgcagcccaggcccgtgtgagagatgctcctgctgtgacccaccctggatctgcagcctgtggtaccccctgctgtagtgatactgagctggaagccatctgccctcactatcagcagccagcagattgtgacaccaggactgaagacaaggagtttcttcacaaggaagacattcatgaagatttggaatcacaggcagaaatatcagaaaactatgctggtgatgtttcccaggtacccgagcttggagatctgtgtgatgatgtatcagaaagagactggggagtccccgaaggcaggaggctgccacagtccctctcccaggagggggacttcacaccagctgccatggggctccttaggggccccttaggggagaaagatctggactgtaatggttttgacagtcgcttcagtctgagcccaaacctgatggcatgtcaggaaatccctacagaagagaggccacatccatatgacatgggtggccagagtttccagcacagtgtggacctaactggtcatgagggggttcccacagctgaaagtccactcatatgtaatgagtgtgggaaaaccttccaaggaaatcctgaccttattcagcgtcaaatagtccacactggggaggcttcctttatgtgtgatgattgtgggaaaaccttcagccagaactcagttcttaaaaaccgtcatcgatctcatatgagtgagaaagcttaccagtgcagcgaatgtgggaaagccttccgagggcactcagacttttctaggcatcagagtcaccacagcagtgagaggccttatatgtgtaatgaatgtggaaaagccttcagccagaactcgagccttaaaaagcaccaaaagtctcacatgagtgagaagccctatgaatgcaatgaatgtgggaaggcttttaggcggagctcaaacctcatccaacatcaaagaatccattctggggagaaaccgtatgtgtgcagtgagtgtgggaaggccttcaggcgaagctcaaacctcatcaaacaccacaggactcacacaggagagaagccttttgagtgtggcgagtgtgggaaagccttcagccagagtgcacacctgaggaagcaccagagggtccacactggagagaagccttatgagtgtaatgattgtggcaagcccttcagtcgggtctccaacctcattaagcaccacagggttcacactggagagaagccctataagtgcagtgactgtgggaaagcatttagtcagagctccagccttattcagcatcggagaattcacactggagaaaagcctcacgtgtgtaatgtatgtggaaaagcctttagttatagctcagtgctccgaaagcaccagatcatccacacgggagagaagccgtacagatgcagtgtctgtgggaaggccttcagccacagctcagccctcattcagcaccagggcgtgcacacaggcgacaagccctacgcctgccacgagtgtgggaagacctttggtcgcagctccaacctcatccttcaccagcgagtccacactggagagaagccctatgaatgtactgaatgtggaaaaaccttcagccagagctcaaccctcattcagcatcagaggattcataatgggctgaagccccatgaatgtaaccagtgtggtaaagccttcaaccgaagctcaaatctcattcaccaccagaaagttcatactggggaaaaaccctacacctgtgttgaatgtggtaagggcttcagccaaagctcacacctcattcagcatcagataatccacacgggcgagcgcccctacaaatgcagtgagtgtgggaaagccttcagtcagcgttcggtcctcatccagcaccagaggattcacactggggtgaagccctatgactgtgctgcttgtgggaaagccttcagccagcgatcaaagttgatcaaacaccagttgattcacaccagggaataggctgttgggctggcaggagtgaaaccgagcatagtttcctctccaactcctctttggccattgtctcagcctctgccacttcccagaccgaaagcctggactcagctcactgcctacatccagtggccacatagcctgggaccctcctttgaaacatcctttacaggctcccttctcactgccactgctcttgcctcttgtgatgtcttgggtttgggcttgtttttacagcttgtgaacggactgcacgtttgttacaagggagaagattatggaggctgcatattcatgaatagagtttattattataatgaaaagttaccaaaaaagtaaagtgacgtttggtttgagataaccatagtagtttgtttgattggtaaaaaaaaaaaaaaaaaa

SEQ ID NO: 23401 - DNA, 2032 bp, Homo Sapiens
gctgttgagaagctacccgcggggttgtagacctcggacctcatggcagagataattcaggaacgcatagaagatcggctcccggaattggaacagctggagcgcattggactgttcagtcatgcggagattaaggctatcattaagaaggcttccgatctagagtacaaaatccagagaagaacccttttcaaggaagactttatcaattatgttcaatatgaaattaatcttttggagctgatccggagaagaagaacacgcattggatattcatttaagaaggatgagattgagaattctattgtacaccgggtacaaggtgttttccagcgtgcctcagcaaaatggaaagacgatgttcaactttggctctcctatgtggctttttgtaagaagtgggctactaaaactcgacttagcaaggtattctctgccatgttggcgattcattccaacaaaccagctttgtggattatggcagccaaatgggaaatggaagatcgattgtcttcagaaagcgcaaggcaactatttcttcgcgcactgcgctttcatccagagtgcccaaaactttataaagaatactttaggatggagctgatgcatgctgaaaaactgaggaaggagaaggaagaatttgaaaaagccagtatggatgtggagaatcctgattattctgaagaaatccttaagggcgagttggcatggatcatctacaaaaattctgtaagcataattaaaggtgcagaatttcacgtgtcactgctttcgattgcacagctatttgactttgccaaagatctacaaaaagagatttatgatgaccttcaggctctacacacagatgatcctctcacttgggattatgtggcaaggcgagaattagagattgagtcacagacagaagagcagcctacaacgaaacaagccaaagcagtggaggtcggccggaaggaggagaggtgctgtgctgtgtatgaagaggcagtgaagactctgccaacagaggccatgtggaagtgttacatcaccttttgcttggaaagatttactaagaagtcaaatagtgggttccttagagggaagaggttggaaagaaccatgactgtattcaggaaggcacatgaactgaagcttctgtcagaatgccaatacaagcagttgagtgtttcgttgctgtgttataacttcctgagggaagctctggaagtggcagtagctggaactgaattgtttagagactctgggacaatgtggcagctgaagctgcaggtgctgatcgagtcaaagagccctgacatagccatgctttttgaagaagcctttgtgcacctgaaaccccaggtttgtctgccattgtggatttcctgggcagagtggagtgaaggtgccaaaagccaagaagacactgaggcagtctttaagaaagctctcttagctgtcataggtgccgactcagtaaccctgaagaataagtacctggattgggcttatcgaagtggtggctacaaaaaggccagagctgtgtttaaaagtttacaggagagccgaccattttcagttgactttttcaggaaaatgattcagtttgaaaaggagcaagaatcctgcaatatggcgaacataagagaatattatgagagagctttgagagagtttggatccgcagattctgatctttggatggattatatgaaagaagaattgaaccacccccttggtagacctgagaactgtggacagatctactggcgagcgatgaaaatgttgcagggagagtcagcagaggcatttgtagctaaacatgctatgcatcagactggccatttatgaagatgaagaataccgtccgctttgtgaaatagtattgcaagccagccccgtgggcaaatttgtattgagtccatctgtaatttgctcagtgatggcagacaagatggctgtctggttttgagacacacactttaattttatgttaacttgttaaatctttttaaaaattaaaaaatttttatgattgaaaaaaaaa

SEQ ID NO: 23402 - DNA, 1347 bp, Homo Sapiens
ggcgtacttggcttggagactggcgcggcgttcgtgtccgagttctctgcaggtcactagtttcccggtagttcagctgcacatgaatagaacagcaatgagagccagtcagaaggactttgaaaattcaatgaatcaagtgaaactcttgaaaaaggatccaggaaacgaagtgaagctaaaactctacgcgctatataagcaggccactgaaggaccttgtaacatgcccaaaccaggtgtatttgacttgatcaacaaggccaaatgggacgcatggaatgcccttggcagcctgcccaaggaagctgccaggcagaactatgtggatttggtgtccagtttgagtccttcattggaatcctctagtcaggtggagcctggaacagacaggaaatcaactgggtttgaaactctggtggtgacctccgaagatggcatcacaaagatcatgttcaaccggcccaaaaagaaaaatgccataaacactgagatgtatcatgaaattatgcgtgcacttaaagctgccagcaaggatgactcaatcatcactgttttaacaggaaatggtgactattacagtagtgggaatgatctgactaacttcactgatattccccctggtggagtagaggagaaagctaaaaataatgccgttttactgagggaatttgtgggctgttttatagattttcctaagcctctgattgcagtggtcaatggtccagctgtgggcatctccgtcaccctccttgggctattcgatgccgtgtatgcatctgacagggcaacatttcatacaccatttagtcacctaggccaaagtccggaaggatgctcctcttacacttttccgaagataatgagcccagccaaggcaacagagatgcttatttttggaaagaagttaacagcgggagaggcatgtgctcaaggacttgttactgaagttttccctgatagcacttttcagaaagaagtctggaccaggctgaaggcatttgcaaagcttcccccaaatgtcttgagaatttcaaaagaggtaatcaggaaaagagagagagaaaaactacacgctgttaatgctgaagaatgcaatgtccttcagggaagatggctatcagatgaatgcacaaatgctgtggtgaacttcttatccagaaaatcaaaactgtgatgaccactacagcagagtaaagcatgtccaaggaaggatgtgctgttacctctgatttccagtactggaactaaataagcttcattgtgccttttgtagtgctagaatatcaattacaatggagatatttccctacagctctgatgaataaaaagttttgtaaaacaaaa

SEQ ID NO: 23403 - DNA, 2930 bp, Homo Sapiens
gttcggtcgaagccctccccttaattatgtgcaattcaagtccccactgcccgcccgcaagcccccactcatcctcgctgcgggcagggtggcccctgcactttacaagggggtgcaggagcgggagacggtcgtccgaacaccggctccccggcatgcgtagaccggcgggcggagcgggctcactttgcgccaatcctacgagaactcccagaactccgcttccctagtccaacccaagccagagttgcccacacctaagatggcggcgggggcgatgacaccgccccgcccggtccagccagctcggcccgggggcttcgggctgtcgggccggcgctcccttctctgccaggtggcgagtacacctgctcacgtaggcgtcatgaggtctccggttcgagacctggcccggaacgatggcgaggagagcacggaccgcacgcctcttctaccgggcgccccacgggccgaagccgctccagtgtgctgctctgctcgttacaacttagcaattttggccttttttggtttcttcattgtgtatgcattacgtgtgaatctgagtgttgcgttagtggatatggtagattcaaatacaactttagaagataatagaacttccaaggcgtgtccagagcattctgctcccataaaagttcatcataatcaaacgggtaagaagtaccaatgggatgcagaaactcaaggatggattctcggttcctttttttatggctacatcatcacacagattcctggaggatatgttgccagcaaaataggggggaaaatgctgctaggatttgggatccttggcactgctgtcctcaccctgttcactcccattgctgcagatttaggagttggaccactcattgtactcagagcactagaaggactaggagagggtgttacatttccagccatgcatgccatgtggtcttcttgggctccccctcttgaaagaagcaaacttcttagcatttcgtatgcaggagcacagcttgggacagtaatttctcttcctctttctggaataatttgctactatatgaattggacttatgtcttctacttttttggtactattggaatattttggtttcttttgtggatctggttagttagtgacacaccacaaaaacacaagagaatttcccattatgaaaaggaatacattctttcatcattaagaaatcagctttcttcacagaagtcagtgccgtgggtacccattttaaaatccctgccactttgggctatcgtagttgcacacttttcttacaactggactttttatactttattgacattattgcctacttatatgaaggagatcctaaggttcaatgttcaagagaatgggtttttatcttcattgccttatttaggctcttggttatgtatgatcctgtctggtcaagctgctgacaatttaagggcaaaatggaatttttcaactttatgtgttcgcagaatttttagccttataggaatgattggacctgcagtattcctggtagctgctggcttcattggctgtgattattctttggccgttgctttcctaactatatcaacaacactgggaggcttttgctcttctggatttagcatcaaccatctggatattgctccttcgtatgctggtatcctcctgggcatcacaaatacatttgccactattccaggaatggttgggcccgtcattgctaaaagtctgacccctgataacactgttggagaatggcaaaccgtgttctatattgctgctgctattaatgtttttggtgccattttctttacactattcgccaaaggtgaagtacaaaactgggctctcaatgatcaccatggacacagacactgaaggaaccaataaataatcctgcctctattaatgtatttttatttatcatgtaacctcaaagtgccttctgtattgtgtaagcattctatgtctttttttaattgtacttgtattagatttttaaggcctataatcatgaaatatcactagttgccagaataataaaatgaactgtgtttaattatgaataatatgtaagctaggacttctactttaggttcacatacctgcctgctagtcgggcaacatgaagtaggacagttctgttgattttttagggccatactaaagggaatgagctgaaacagacctcctgatacctttgcttaattaaactagatgataattctcaggtactgataaacacctgttgttgttcactttcctcataaaaattgtcagctctctctgacacttagacctcaaactttagcatctctgtggagctgccatccactgtataatttcgcctggcaactggactgaggggagtgtgcccaggcagctgccaagcactccctccctggcttcagggtcagagtgcccagcgtttatcagaggcagcatccaagcccagagccagtgtcgactcttcggctggtgcctttcctctgaggggctatcaatgtgtagataaagccctgagtaggcaagagcagtgagatccactgctatggtcttgatacatcctcaaactttcccttcccagcacagaggaatattggctggcatgcaacctgcaaaagaaaaatgcgaagcggccgggcacggtggctcatgcctgtaatcccagcactttggggggctgaggtgggcgaatcatgagatcaggagttcgagaccagcctggccagcatggtgaaaccccatctctactaaaaatacaaaaaattagctgggcgtggtgacgggcgcctgtaatcccagatactcaggaggctgaggtaggagaatcacttgaacctgggaggtggaagttgcagtgaaccaagatcacgccactgcactccagcctgggcgatggagcgagactccaactcaaaaaaaaaaaaaaaaa

SEQ ID NO: 23404 - DNA, 9645 bp, Homo Sapiens
atgcccaagcgcgcgcactggggggccctctccgtggtgctgatcctgctttggggccatccgcgagtggcgctggcctgcccgcatccttgtgcctgctacgtccccagcgaggtccactgcacgttccgatccctggcttccgtgcccgctggcattgctagacacgtggaaagaatcaatttggggtttaatagcatacaggccctgtcagaaacctcatttgcaggactgaccaagttggagctacttatgattcacggcaatgagatcccaagcatccccgatggagctttaagagacctcagctctcttcaggttttcaagttcagctacaacaagctgagagtgatcacaggacagaccctccagggtctctctaacttaatgaggctgcacattgaccacaacaagatcgagtttatccaccctcaagctttcaacggcttaacgtctctgaggctactccatttggaaggaaatctcctccaccagctgcaccccagcaccttctccacgttcacatttttggattatttcagactctccaccataaggcacctctacttagcagagaacatggttagaactcttcctgccagcatgcttcggaacatgccgcttctggagaatctttacttgcagggaaatccgtggacctgcgattgtgagatgagatggtttttggaatgggatgcaaaatccagaggaattctgaagtgtaaaaaggacaaagcttatgaaggcggtcagttgtgtgcaatgtgcttcagtccaaagaagttgtacaaacatgagatacacaagctgaaggacatgacttgtctgaagccttcaatagagtcccctctgagacagaacaggagcaggagtattgaggaggagcaagaacaggaagaggatggtggcagccagctcatcctggagaaattccaactgccccagtggagcatctctttgaatatgaccgacgagcacgggaacatggtgaacttggtctgtgacatcaagaaaccaatggatgtgtacaagattcacttgaaccaaacggatcctccagatattgacataaatgcaacagttgccttggactttgagtgtccaatgacccgagaaaactatgaaaagctatggaaattgatagcatactacagtgaagttcccgtgaagctacacagagagctcatgctcagcaaagaccccagagtcagctaccagtacaggcaggatgctgatgaggaagctctttactacacaggtgtgagagcccagattcttgcagaaccagaatgggtcatgcagccatccatagatatccagctgaaccgacgtcagagtacggccaagaaggtgctactttcctactacacccagtattctcaaacaatatccaccaaagatacaaggcaggctcggggcagaagctgggtaatgattgagcctagtggagctgtgcaaagagatcagactgtcctggaagggggtccatgccagttgagctgcaacgtgaaagcttctgagagtccatctatcttctgggtgcttccagatggctccatcctgaaagcgcccatggatgacccagacagcaagttctccattctcagcagtggctggctgaggatcaagtccatggagccatctgactcaggcttgtaccagtgcattgctcaagtgagggatgaaatggaccgcatggtatatagggtacttgtgcagtctccctccactcagccagccgagaaagacacagtgacaattggcaagaacccaggggagtcggtgacattgccttgcaatgctttagcaatacccgaagcccaccttagctggattcttccaaacagaaggataattaatgatttggctaacacatcacatgtatacatgttgccaaatggaactctttccatcccaaaggtccaagtcagtgatagtggttactacagatgtgtggctgtcaaccagcaaggggcagaccattttacggtgggaatcacagtgaccaagaaagggtctggcttgccatccaaaagaggcagacgcccaggtgcaaaggctctttccagagtcagagaagacatcgtggaggatgaagggggctcgggcatgggagatgaagagaacacttcaaggagacttctgcatccaaaggaccaagaggtgttcctcaaaacaaaggatgatgccatcaatggagacaagaaagccaagaaagggagaagaaagctgaaactctggaagcattcggaaaaagaaccagagaccaatgttgcagaaggtcgcagagtgtttgaatctagacgaaggataaacatggcaaacaaacagattaatccggagcgctgggctgatattttagccaaagtccgtgggaaaaatctccctaagggcacagaagtacccccgttgattaaaaccacaagtcctccatccttgagcctagaagtcacaccaccttttcctgctgtttctcccccctcagcatctcctgtgcagacagtaaccagtgctgaagaatcctcagcagatgtacctctacttggtgaagaagagcacgttttgggtaccatttcctcagccagcatggggctagaacacaaccacaatggagttattcttgttgaacctgaagtaacaagcacacctctggaggaagttgttgatgacctttctgagaagactgaggagataacttccactgaaggagacctgaaggggacagcagcccctacacttatatctgagccttatgaaccatctcctactctgcacacattagacacagtctatgaaaagcccacccatgaagagacggcaacagagggttggtctgcagcagatgttggatcgtcaccagagcccacatccagtgagtatgagcctccattggatgctgtctccttggctgagtctgagcccatgcaatactttgacccagatttggagactaagtcacaaccagatgaggataagatgaaagaagacacctttgcacaccttactccaacccccaccatctgggttaatgactccagtacatcacagttatttgaggattctactataggggaaccaggtgtcccaggccaatcacatctacaaggactgacagacaacatccaccttgtgaaaagtagtctaagcactcaagacaccttactgattaaaaagggtatgaaagagatgtctcagacactacagggaggaaatatgctagagggagaccccacacactccagaagttctgagagtgagggccaagagagcaaatccatcactttgcctgactccacactgggtataatgagcagtatgtctccagttaagaagcctgcggaaaccacagttggtaccctcctagacaaagacaccacaacagtaacaacaacaccaaggcaaaaagttgctccgtcatccaccatgagcactcacccttctcgaaggagacccaacgggagaaggagattacgccccaacaaattccgccaccggcacaagcaaaccccacccacaacttttgccccatcagagactttttctactcaaccaactcaagcacctgacattaagatttcaagtcaagtggagagttctctggttcctacagcttgggtggataacacagttaatacccccaaacagttggaaatggagaagaatgcagaacccacatccaagggaacaccacggagaaaacacgggaagaggccaaacaaacatcgatataccccttctacagtgagctcaagagcgtccggatccaagcccagcccttctccagaaaataaacatagaaacattgttactcccagttcagaaactatacttttgcctagaactgtttctctgaaaactgagggcccttatgattccttagattacatgacaaccaccagaaaaatatattcatcttaccctaaagtccaagagacacttccagtcacatataaacccacatcagatggaaaagaaattaaggatgatgttgccacaaatgttgacaaacataaaagtgacattttagtcactggtgaatcaattactaatgccataccaacttctcgctccttggtctccactatgggagaatttaaggaagaatcctctcctgtaggctttccaggaactccaacctggaatccctcaaggacggcccagcctgggaggctacagacagacatacctgttaccacttctggggaaaatcttacagaccctccccttcttaaagagcttgaggatgtggatttcacttccgagtttttgtcctctttgacagtctccacaccatttcaccaggaagaagctggttcttccacaactctctcaagcataaaagtggaggtggcttcaagtcaggcagaaaccaccacccttgatcaagatcatcttgaaaccactgtggctattctcctttctgaaactagaccacagaatcacacccctactgctgcccggatgaaggagccagcatcctcgtccccatccacaattctcatgtctttgggacaaaccaccaccactaagccagcacttcccagtccaagaatatctcaagcatctagagattccaaggaaaatgttttcttgaattatgtggggaatccagaaacagaagcaaccccagtcaacaatgaaggaacacagcatatgtcagggccaaatgaattatcaacaccctcttccgaccgggatgcatttaacttgtctacaaagctggaattggaaaagcaagtatttggtagtaggagtctaccacgtggcccagatagccaacgccaggatggaagagttcatgcttctcatcaactaaccagagtccctgccaaacccatcctaccaacagcaacagtgaggctacctgaaatgtccacacaaagcgcttccagatactttgtaacttcccagtcacctcgtcactggaccaacaaaccggaaataactacatatccttctggggctttgccagagaacaaacagtttacaactccaagattatcaagtacaacaattcctctcccattgcacatgtccaaacccagcattcctagtaagtttactgaccgaagaactgaccaattcaatggttactccaaagtgtttggaaataacaacatccctgaggcaagaaacccagttggaaagcctcccagtccaagaattcctcattattccaatggaagactccctttctttaccaacaagactctttcttttccacagttgggagtcacccggagaccccagatacccacttctcctgccccagtaatgagagagagaaaagttattccaggttcctacaacaggatacattcccatagcaccttccatctggactttggccctccggcacctccgttgttgcacactccgcagaccacgggatcaccctcaactaacttacagaatatccctatggtctcttccacccagagttctatctcctttataacatcttctgtccagtcctcaggaagcttccaccagagcagctcaaagttctttgcaggaggacctcctgcatccaaattctggtctcttggggaaaagccccaaatcctcaccaagtccccacagactgtgtccgtcaccgctgagacagacactgtgttcccctgtgaggcaacaggaaaaccaaagcctttcgttacttggacaaaggtttccacaggagctcttatgactccgaataccaggatacaacggtttgaggttctcaagaacggtaccttagtgatacggaaggttcaagtacaagatcgaggccagtatatgtgcaccgccagcaacctgcacggcctggacaggatggtggtcttgctttcggtcaccgtgcagcaacctcaaatcctagcctcccactaccaggacgtcactgtctacctgggagacaccattgcaatggagtgtctggccaaagggaccccagccccccaaatttcctggatcttccctgacaggagggtgtggcaaactgtgtcccccgtggagagccgcatcaccctgcacgaaaaccggaccctttccatcaaggaggcgtccttctcagacagaggcgtctataagtgcgtggccagcaatgcagccggggcggacagcctggccatccgcctgcacgtggcggcactgccccccgttatccaccaggagaagctggagaacatctcgctgcccccggggctcagcattcacattcactgcactgccaaggctgcgcccctgcccagcgtgcgctgggtgctcggggacggtacccagatccgcccctcgcagttcctccacgggaacttgtttgttttccccaacgggacgctctacatccgcaacctcgcgcccaaggacagcgggcgctatgagtgcgtggccgccaacctggtaggctccgcgcgcaggacggtgcagctgaacgtgcagcgtgcagcagccaacgcgcgcatcacgggcacctccccgcggaggacggacgtcaggtacggaggaaccctcaagctggactgcagcgcctcgggggacccctggccgcgcatcctctggaggctgccgtccaagaggatgatcgacgcgctcttcagttttgatagcagaatcaaggtgtttgccaatgggaccctggtggtgaaatcagtgacggacaaagatgccggagattacctgtgcgtagctcgaaataaggttggtgatgactacgtggtgctcaaagtggatgtggtgatgaaaccggccaagattgaacacaaggaggagaacgaccacaaagtcttctacgggggtgacctgaaagtggactgtgtggccaccgggcttcccaatcccgagatctcctggagcctcccagacgggagtctggtgaactccttcatgcagtcggatgacagcggtggacgcaccaagcgctatgtcgtcttcaacaatgggacactctactttaacgaagtggggatgagggaggaaggagactacacctgctttgctgaaaatcaggtcgggaaggacgagatgagagtcagagtcaaggtggtgacagcgcccgccaccatccggaacaagacttacttggcggttcaggtgccctatggagacgtggtcactgtagcctgtgaggccaaaggagaacccatgcccaaggtgacttggttgtccccaaccaacaaggtgatccccacctcctctgagaagtatcagatataccaagatggcactctccttattcagaaagcccagcgttctgacagcggcaactacacctgcctggtcaggaacagcgcgggagaggataggaagacggtgtggattcacgtcaacgtccagccacccaagatcaacggtaaccccaaccccatcaccaccgtgcgggagatagcagccgggggcagtcggaaactgattgactgcaaagctgaaggcatccccaccccgagggtgttatgggcttttcccgagggtgtggttctgccagctccatactatggaaaccggatcactgtccatggcaacggttccctggacatcaggagtttgaggaagagcgactccgtccagctggtatgcatggcacgcaacgagggaggggaggcgaggttgatcgtgcagctcactgtcctggagcccatggagaaacccatcttccacgacccgatcagcgagaagatcacggccatggcgggccacaccatcagcctcaactgctctgccgcggggaccccgacacccagcctggtgtgggtccttcccaatggcaccgatctgcagagtggacagcagctgcagcgcttctaccacaaggctgacggcatgctacacattagcggtctctcctcggtggacgctggggcctaccgctgcgtggcccgcaatgccgctggccacacggagaggctggtctccctgaaggtgggactgaagccagaagcaaacaagcagtatcataacctggtcagcatcatcaatggtgagaccctgaagctcccctgcacccctcccggggctgggcagggacgtttctcctggacgctccccaatggcatgcatctggagggcccccaaaccctgggacgcgtttctcttctggacaatggcaccctcacggttcgtgaggcctcggtgtttgacaggggtacctatgtatgcaggatggagacggagtacggcccttcggtcaccagcatccccgtgattgtgatcgcctatcctccccggatcaccagcgagcccaccccggtcatctacacccggcccgggaacaccgtgaaactgaactgcatggctatggggattcccaaagctgacatcacgtgggagttaccggataagtcgcatctgaaggcaggggttcaggctcgtctgtatggaaacagatttcttcacccccagggatcactgaccatccagcatgccacacagagagatgccggcttctacaagtgcatggcaaaaaacattctcggcagtgactccaaaacaacttacatccacgtcttctgaaatgtggattccagaatgattgcttaggaactgacaacaaagcggggtttgtaagggaagccaggttggggaataggagctcttaaataatgtgtcacagtgcatggtggcctctggtgggtttcaagttgaggttgatcttgatctacaattgttgggaaaaggaagcaatgcagacacgagaaggagggctcagccttgctgagacactttcttttgtgtttacatcatgccaggggcttcattcagggtgtctgtgctctgactgcaatttttcttcttttgcaaatgccactcgactgccttcataagcgtccataggatatctgaggaacattcatcaaaaataagccatagacatgaacaacacctcactaccccattgaagacgcatcacctagttaacctgctgcagtttttacatgatagactttgttccagattgacaagtcatctttcagttatttcctctgtcacttcaaaactccagcttgcccaataaggatttagaaccagagtgactgatatatatatatatattttaattcagagttacatacatacagctaccattttatatgaaaaaagaaaaacatttcttcctggaactcactttttatataatgttttatatatatattttttcctttcaaatcagacgatgagactagaaggagaaatactttctgtcttattaaaattaataaattattggtctttacaagacttggatacattacagcagacatggaaatataattttaaaaaatttctctccaacctccttcaaattcagtcaccactgttatattaccttctccaggaaccctccagtggggaaggctgcgatattagatttccttgtatgcaaagtttttgttgaaagctgtgctcagaggaggtgagaggagaggaaggagaaaactgcatcataactttacagaattgaatctagagtcttccccgaaaagcccagaaacttctctgcagtatctggcttgtccatctggtctaaggtggctgcttcttccccagccatgagtcagtttgtgcccatgaataatacacgacctgttatttccatgactgctttactgtatttttaaggtcaatatactgtacatttgataataaaataatattctcccaaaaaaaaaa

SEQ ID NO: 23405 - DNA, 1665 bp, Homo Sapiens
gaattcgccatgctgaaattagcagcattagaaagtaataaaatccaggacctggaaaagaaggagggacgtatagatgatttgctcagggctaactgtgatctcagacggcaaatagatgaacaacaaaaattacttgaaaaatacaaagaacgattaaataagtgcatatcaatgagcaagaaacttcttattgaaaagagtacacaagaaaagctgtcaagcagagagaagagtatgcaagatcgattacgcctcgggcactttacaacagttagacatggcgcttcatttactgaacaatggacagatggttttgcatttcagaatcttgtgaagcaacaagaatgggtgaatcagcaaagggaagatattgaaaggcaaaggaaacttctagccaaacgcaaacctcccacagctaataattctcaggcaccctctaccaattctgaaccaaaacaaaggaaaaacaaagcagtcaatggagcagagaatgatccctttgttagaccaaatttaccacaactgttgactttggcagaatatcatgaacaggaagaaattttcaaacttagactaggacatctcaaaaaggaagaggcagaaatccaggcagaacttgaacgtttggaaagagtcagaaatcttcacatacgtgagctgaaaagaataaacaatgaagataattcacagttcaaagatcacccaacattaaatgaaagatatttattacttcatctgcttggtagaggtggctttagtgaagtgtataaggcttttgacctttatgaacaaagatatgctgctgtgaagatacatcagcttaataaaagctggagagatgagaagaaagaaaactaccacaaacatgcctgcagagagtatagaatacacaaagaactggatcaccccagaatagttaaactctatgattatttctccttggatacagatacgttttgtacagtgttagaatactgtgaaggcaatgacttggatttctatctgaagcaacacaagttaatgtcagagaaagaagctcggtctattgtaatgcagattgtaaatgcactaagatatctcaatgagatcaaaccccctattatacattatgatcttaagccaggaaacatcctactggtagatggaacagcatgtggtgaaatcaaaatcactgattttggtctgtccaagattatggatgatgatagctatggtgtagatggaatggatctaacttcccagggggcaggcacttactggtatttacctcctgagtgttttgtagttggaaaagagccaccaaagatttccaacaaggttgatgtatggtcggttggagtcatcttctttcagtgtctttatggtagaaagccatttggtcacaatcaatctcaacaagacattcttcaagaaaatacaatattaaaagccacagaagtccagttccctgtaaaaccggttgtaagcagtgaagccaaggcatttataagacgctgtttggcatatcgaaaagaagatcgatttgatgtgcaccagctggcaaatgacccataccttctcccacacatgagaagatcaaattcttcaggaaacctacacatggctgggctgacagcatcccctacacccccttcttcaagcataattacttactgactcgag

SEQ ID NO: 23406 - DNA, 2032 bp, Homo Sapiens
gttactttttaaatggacaaaagtggctctcaatccagcacatgcacattgaagcaagttaaaggatttaatatgaagcacagaagcagatagtgccaaatagcaagcagtagttgttacacatttctggaaaagcagtgtccgtgttgttatgtacacctccaaaaaaagttcaaatgtgtaggggaattgttgtgtaaagtaaactgaactgcagggtagcagtattttaatagctattatagacctgtatttactgtatttaaatgagtaaaggaacaagcagtgacacatcactaggaagggtgagcagggcagcatttccttctcccactgctgctgagatggcagaaattagtcgaattcagtacgaaatggaatatactgaaggcattagtcagcgaatgagggtcccagaaaagttaaaagtagcaccgccaaacgctgacctggaacaaggattccaagaaggagttccaaatgctagtgtgataatgcaagttccggagaggattgttgtagcaggaaataatgaagatgtttcattttcaagaccagcagatcttgaccttattcagtcaactccctttaaacccctggcactgaaaacaccacctcgtgtacttacgctgagtgaaagaccactagattttctggatttagaaagacctcctacaacccctcaaaatgaagaaatccgagcagttggcagactaaaaagagagcggtctatgagtgaaaatgctgttcgccaaaatggacagctggtcagaaatgattctctgtggcacagatcagattctgccccaagaaataaaatttcaaggttccaggcaccgatttctgcaccggagtacactgtgacaccatcgccacaacaggctcgggtctgtcctccccatatgttacctgaagatggagctaatctttcctctgctcgtggcattttgtcgcttatccagtcttctactcgtagggcataccagcagatcttggatgtgctggatgaaaatcgcagacctgtgttgcgtggtgggtctgctgccgccacttctaatcctcatcatgacaacgtcaggtatggcatttcaaatatagatacaaccattgaaggaacgtcagatgacctgactgttgtagatgcagcttcactaagacgacagataatcaaactaaatagacgtctacaacttctggaagaggagaacaaagaacgtgctaaaagagaaatggtcatgtattcaattactgtagctttctggctgcttaatagctggctctggtttcgccgctagaggtaacatcagccctcaaaaatactgtctcaacagctggaaatataaaagatttgcaaacttctttgtttctgtctctgcattgtatgccattttatagtccacaccctgaaaatgtatttcttccagaaagtctggaggaaggacctatatttgtagaagtaaaggtatattctgtcactcagctgtattcacgtctgagcagttctgcagtaacacctgcttaaaattctccctttgcatgttttgtaaataggctccagttttgttttttaaaaggaatttattttttgcctcatcagtccacccaactgattctgaatgggagagagtctgtagagaattgattcagaaaagtgtctgtgaaagaaaaacaattattttgtcctgtttctcaaacagtgttaagcagttttgttaatagacatttttgcatcgacacttcaacattaacactttgaaagtcatggtctggtgccagatttaagaaactcgaaccacctaatatttcataaccttcttcattaggtacttgtacagattaatttctaacattgcagcagtttcatatgtgtgcaatatgtgcattctttcattttagttttgcacttggttttctataaagtacgtttttactcagttcatgcgtgaacaatttaaaaaacgacagaataaggtacaaatgtagtgtatttaataaactgtcaaccaaagaaaaaaaaaaaaaaaaaaaaaaa

SEQ ID NO: 23407 - DNA, 3278 bp, Homo Sapiens
ctctggctgctgctccaactctggcagacacgccaagctttgagaaagctcccagtgaggaactggtcttctggagactctgtgtggcatagagtgattcaaccaccttaagaagacctctggctttcctggaacacagatgtcgagacatctcccatggatttgtgatcagcgttgcagctctcccagcagccctggacggcggtgagtcccctcagctggccaggacagtactctgctctcacctctctgcttcttgggctccatcccaactccccatcaactgatcttcttgcaaacccacagggctccaggacaccctccttctggagcccatgctgcctacagcacttcactccccaccagtgatgacaacaattgctgttctttgtccaccttatttacttgtttatctttaatgacaaaagttttttttttgttgttttttttttttttttgaaacgggagtctcactcttcactcaggctgcagtgcagtggcgcaatctcagctcactgccacctctgcctcccaggttcacgccattctcctgcctcagcctcccgagtagctgggactacaggcgcccaccatcacgcctggctaattttttgtatttttagtagagatggggtctcactgtgttagccaggatggtctcgatctcctgacctcgtgatccgcccgcctcggcctcccataatgctgggattacaggcgtgagcaaccgcgcctggctgacaaaagttttatacctgcctgttaaaaaaattatataatacagaagcacaccttgtaaaaggtgcaatcctcagttatgggcatgactgcgtgttcccttcccccatcttcattataataaccccccaatccccccagatcctgtgagccaggtaccggaattatccctctttcacacacgggtaaagtgatccgtcacagagagatttaagtgatcttcataagcaagatcataggctaggaagtggcagagccaggattcaacctcggcgagcctggtggtgctctgacatccaccgaagcccccatcaagcccttttagctccacaacctaaaagggtctctctaagaggtatcctgaagcaaaagacaggagttctctttgaaacatagtatttctctctacagatagatagcctgtaggtatgtaagtaggtgggtgggtgggtaggtagacagtttgatgatatcccacattattctgcaactggacttctgctgtgagcacagactatattctggcctatgtcttgactccgtattcctgggaaagtgctcgactgagaccttgggagtcttgggaagtccaatgggtagggtagccggaatctgagggctgatccctgagggcactgggcagtaattggggcatgggatgggcatgagggcccgggtccctaaagttgcccactccacccgaaggcccccagccgcccgcatgtggctgccacggttctccagcaagacagtgacagtgctcctcctggcacagaccacctgcctcctgctcttcatcatctcccggccagggccctcatccccagccggcggcgaggatcgtgtgcacgtgctggtgctgtcctcgtggcgctcgggctcatccttcttgggccagctcttcagccagcaccccgacgtcttctacctgatggagcccgcgtggcatgtgtggaccaccctgtcgcagggcagcgcggcaacgctgcacatggccgtgcgcgacctgatgcgctctatctttttgtgcgacatggacgtgtttgatgcctacatgccacagagccgaaacctgtccgcctttttcaactgggcaacgagccgcgcgctgtgctcgccgcccgcctgcagcgcctttccccgaggcaccatcagcaagcaggacgtatgcaagacactgtgcacgcggcagccattcagcctggcccgggaggcctgccgctcctacagccacgtggtgctcaaggaggtgcgcttcttcaacctgcaggtgctctacccgctgctcagcgaccccgcgctcaacctgcgcatcgtgcacctggtgcgcgacccgcgggccgtgctgcgctcccgggaggcggcgggcccgatactggcacgcgacaacggcatcgtgctgggcaccaacggcaagtgggtggaggccgaccctcacctgcgcctgattcgcgaggtgtgccgcagccacgtgcgcatcgccgaggccgccacactcaagccgccacccttcctgcgcggccgctaccgcctggtgcgcttcgaggacctggcgcgggagccgctggcagagatccgcgcactctacgccttcaccggcctgaccctcacgccacagctcgaggcctggatccacaacatcacccacgggtcggggatcggcaagccaatcgaggccttccatacttcgtctaggaatgcgcgcaacgtctcccaggcctggcgccacgcgttgcccttcactaagatcctgcgcgtgcaggaggtgtgcgccggcgcgctgcagctgctgggctaccggcctgtgtactctgcggaccagcagcgtgacctcaccctggatctggtgctgccacgaggcccagaccacttcagctgggcatcgcctgactgagaactctgggccttagagcaggccccgaactgtggtcgccaggcccaggaggcgactgcatggtggagagggagctggggcgcatggggaagcaggtccctactatcaaccgggagtttggggtcctcccctgaagtaggcaaggactgcacgtttctttctctcctgattctcggttttcctttgagtcttctggagctgccttctcatcaggtgcactcttcatggaaagcaactcttgcccctacctcttctgggcgcagggagtaagttactgctaaattaaattaaatgtgtgccaggccgggtgcggtggctcatgcctgtaatcccagcattttgagaggctgaggcgggtggatcacctgaggtcaggagttcgaaaccagcctggccaacatagtgaaaccccctctctactaaaaatgcaaaaattagtccggcgtggtggcacactcctgtaatcccagctacttaggaggctgaggtgggagaatcacttggactccagaggtggaggttgcagtaagctgagatcatgccactgcaccctagcttgggtggcagagcaagactctatcaaaaaaataagtaataaatttgttcaaaagtccgaaaaaaaaaaaaaaaaaaaaaaaaaaaaaaa

SEQ ID NO: 23408 - DNA, 1877 bp, Homo Sapiens
ttgaaaagggtatcattcatgtggtttcagtttagaagagtccctcagagctttgcctcaagcaatttcaaattgtagtgataccctaaatcatgtattcaggatgccttctttagcatttagaaccccaactagacttatactttgactaaagtcagaggcagaccaatttagggaacagattttgttctttgcttttatgatacatttgtaactcacagctgttagcatgacctcacatcactgcgtaggacccggaaatcacatctcctggtcaggtcacgagaaagaacacaggcttgactattgtccagaagttactttccccttgactaaaggtttccccttagggtacacattgctatttaactttgcctcctacccttttttgttaccttccaaaatcaagacacttttaagaaacaaagatagttttctgaacattctgtgtcctgcctgtctcctgttgattcgcagatgtaatatcgagtattcatcaactggtctcaatttcctgaacacattcactgtatccctcattgtaaccgttatccccctgcttcaaaatgtgccagttccacttggtaataacgttgggaaaatgcaggtttatgaatgatgtggacttttagaggatcaaatcaataaattggattttttattttttgagggcagctgcctcactgttttaaataaagaatcttacataagaatgttgacaacattcacagtaagccattggcagaaaattgatctgcatgtcctagaccaatgattacaaggtgtctgtgggtctgtggtttagggggcccagcctatcattccttttccccttggcactcatgagagagatgccaagttcagtgtggatttttcttggtgctctatggagaaatggagtctgtgtgcttactgaagagtcccaaaaaccagagaccattttcatttactgccatcataaatattctccaccattcaagatgcctgtgtacacggctatttgggaaacttaagtgttggaggaggcaggggctgaaggtgtcaaaacctcctcagtaggataacccctttctcccctttggaccatctgccatctttcatgagtgtttcccatggtgtttttgcatccagagttgacagcaactcaattttgccttgaatttactcagtcttataaattaaaaatgtgcattttatataaagatgcattttatataaaaatgcacacctttaatctctatatggcagcatatacatatatatatatatataaaatgcacacttttaatctctatatggcagcatttttgaggctttatatctgcccgtgtaccctcaactgcctcttttttgcagagaacgatccccacaggaactggtctaagaacactgtctgcacatgattgatgcttaaaatccaatataccaccacatatcaaaggttgggattttcagagtccttcttgatttctgagctgaaaccttaacaaatagggaatttggcagggaagacacctgggtttttaattcagaaccctatttatatactgttaaaatttgaggtactatagtttatataaaagtcggatgttaagatattatatttcagtactaggagcttctttgcagtcattaacatgacaaattaagtaataaatataaaagtgattgtccataaattatcattgaattttttgtttattttgtagtgttctgtatttatctgcactttgtgtatatatacacacatacatatgccaacatgtaaataacctcatgtttattcctaatctaaattgccacaatatttttaatgtatggttacactgtgttttaaattactttaaaaataaactttgtaagcagaaaaaaaaaaa

SEQ ID NO: 23409 - DNA, 2720 bp, Homo Sapiens
gctcgatgggcttctcctgcgcgccgcccggtgtctggccgagtccagagagccgcggcgcctcgttccgaggagccatcgccgaagcccgaggccgggtcccgggttggggactgcaggggaaggcagcggcggcggcggcgggagccccaccggggtctgggactggggaactgcctccggcttcacgatgccagtatggacagaatagcttatgatgcttatccccacccaccacttccgaaacattgagcggaaaccagaatacctccagccagagaagtgtgtcccacccccctaccctggtcctgtgggaaccatgtggtttatccgtgacggctgtggcatcgcctgtgccatcgttacctggtttctggtcctctatgcggagttcgtggtcctctttgtcatgctgattccatctcgagactacgtgtatagcatcatcaacggaattgtgttcaacctgctggccttcttggccctggcctcccactgccgggccatgctgacggaccccggggcagtgcccaaaggaaatgccactaaagaattcatcgagagtttacagttgaagcctgggcaggtggtgtacaagtgccccaaatgctgcagcatcaagcccgaccgagcccaccactgcagtgtttgtaagcggtgcattcggaagatggaccaccactgtccctgggtcaacaactgtgtaggcgagaacaaccagaagtacttcgtcctgtttacaatgtacatagctctcatttccttgcacgccctcatcatggtgggattccacttcctgcattgctttgaagaagattggacaacctatggactgaacagggaagaaatggcagagactggaatctctcttcatgaaaaaatgcagccccttaacttcagttcgacagagtgcagctccttctctccacccaccacagtgattctccttatcctgctgtgctttgagggcctgctcttcctcattttcacatcagtgatgtttgggacccaggtgcactccatctgcacagatgagacgggaatagaacaattgaaaaaggaagagagaagatgggctaaaaaaacaaagtggatgaacatgaaagccgtttttggccaccccttctctctaggctgggccagcccctttgccacgccagaccaagggaaggcagacccgtaccagtatgtggtctgaaggaccccgaccggcatggccactcagacacaagtccacaccacagcactaccgtcccatccgttctcatgaatgtttaaatcgaaaaagcaaaacaactactcttaaaactttttttatgtctcaagtaaaatggctgagcattgcagagaaaaaaaaaagtccccacattttattttttaaaaaccatcctttcgatttcttttggtgaccgaagctgctctcttttccttttaaaatcacttctctggcctctggtttctctctgctgtctgtctggcatgactaatgtagagggcgctgtctcgcgctgtgcccattctactaactgagtgagacatgacgctgtgcgtggatggaatagtctggacacctggtgggggatgcatgggaaagccaggagggccctgacctcccactgcccaggaggcagtggcgggctccccgatgggacataaaacctcaccgaagatggatgcttaccccttgaggcctgagaagggcaggatcagaagggaccttggcacagcgacctcatcccccaagtggacacggtttgcctgctaactcgcaaagcaattgcctgccttgtactttatgggcttggggtgtgtagaatgattttgcgggggagtggggagaaagatgaaagaggtcttatttgtattctgaatcagcaattatattccctgtgattatttggaagagtgtgtaggaaagacgtttttccagttcaaaatgccttatacaatcaagaggaaaaaaaattacacaatttcaggcaagctacgttttcctttgtttcatctgcttcctctctcaccaccccatctccctctcttccccagcaagatgtcaattaagcagtgtgaattctgactgcaataggcaccagtgcccaacacatacagccccaccatcatccccttctcattttataaacctcaaagtggattcactttctgatagttaacccccataaatgtgcacgtacctgtgtcttatctatattttaacctgggagactgttgtcctggcatggagatgaccatgatgctggggttacctcacagtccccaccctttcaaagttgacatatggccatcccattggccagaatccacagacacacctaagcctgtggcactgggacagaatagattttccatttgagaggcacttcctgtgtcagtcttgtttgaaggaggtggtgatggtggatagaggtgaaggaggtagggagtgccctccaagtgcaaaaataacaaatatgattattgaccatcggggaattctcacacattgatttgttttttaagcaattgccagaaacccccttttttagcttttgcttggggtgggggtaggagttaaggtttattcaatcctgtcctgggtagggcgaaagttaatctagccatgtgatttttcagaaaagtaagtggaacatgctgccacttttcaattctgtcagtgcttccacatggaaacaaaatgcaataaaatttttccaaaacctgat

SEQ ID NO: 23410 - DNA, 3266 bp, Homo Sapiens
gcggtgcgggccgggcgggtgcattcaggccaaggcggggccgccgggatgctcagggttccggagccgcggcccggggaggcgaaagcggagggggccgcgccgccgaccccgtccaagccgctcacgtccttcctcatccaggacatcctgcgggacggcgcgcagcggcaaggcggccgcacgagcagccagagacagcgcgacccggagccggagccagagccagagccagagggaggacgcagccgcgccggggcgcagaacgaccagctgagcaccgggccccgcgccgcgccggaggaggccgagacgctggcagagaccgagccagaaaggcacttggggtcttatctgttggactctgaaaacacttcaggcgcccttccaaggcttccccaaacccctaagcagccgcagaagcgctcccgagctgccttctcccacactcaggtgatcgagttggagaggaagttcagccatcagaagtacctgtcagcccctgaacgggcccacctggccaagaacctcaagctcacggagacccaagtgaagatatggttccagaacagacgctataagactaagcgaaagcagctctcctcggagctgggagacttggagaagcactcctctttgccggccctgaaagaggaggccttctcccgggcctccctggtctccgtgtataacagctatccttactacccatacctgtactgcgtgggcagctggagcccagctttttggtaatgccagctcaggtgacaaccattatgatcaaaaactgccttccccagggtgtctcatatgaaaagcacaaggggccaaggtcagggagcaagaggtgtgcacaccaaaactattggagaattgcgtggaaatcttcagattcttcactggtgagacaatgaaacaacagagacagtgaaagttttaatacctaagtcattcccccagtgcatactgtagcgtcaagtttttgcttctggctacctgtttgaaggggagagagggaaaatcaagtggtattttccagcactttgtatgattttggatgagctgtacacccaaggattctgttctgcaactccatcctcctgtgtcactgaatatcaactctgaaagagcaaacctaacaggagaaaggacaaccaggatgaggatgtcaccaactgaattaaacttaagtccagaagcctcctgttggccttggaatatggccaaggctctctctgtccctgtaaaagagaggggcaaatagtctccaaagagaacgccctcatgctcagcacatatttgcatggaagggggagatgggtgggaggagatgaaaatatcagcttttcttattcctttttattccttttaaaatggtatgccaacttaagtatttacagggtggcccaaatagaacaagatgcactcgctgtgattttaagacaagctgtataaacagaactccactgcaagagggagggccgggccaggagaatctccgcttgtccaagacaggggcctaaggagggtctccacactgctgctaggggctgttgcatttttttattagtagaaagtggaaaggcctcttctcaacttttttcccttgggctggagaatttagaatcagaagtttcctggagttttcaggctatcatatatactgtatcctgaaaggcaacataattcttccttccctccttttaaaattttgtgttcctttttgcagcaattactcactaaagggcttcattttagtccagatttttagtctggctgcacctaacttatgcctcgcttatttagcccgagatccggtctttttttttttttttttttccgtctccccaaagctttatctgtcttgactttttaaaaaagtttgggggcagattctgaattggctaaaagacatgcatttttaaaactagcaactcttatttctttcctttaaaaatacatagcattaaatcccaaatcctatttaaagacctgacagcttgagaagggtcactactgcatttataggaccttctggtggttctgctgttacgtttgaagtctgacaatccttgagaatctttgcatgcagaggaggtaagaggtattggattttcacagagggaagaacacagcgcagaatgaaggcgcaggcttactgagctgtccagtggagggctcatgggtgggacatggaaaagaaggcagcctaggccctggggagcccagtccactgagcaagcaagggactgagtgagccttttgcaggaaaaggctaagaaaaaggaaaaccattctaaaacacaacaagaaactgtccaaatgctttgggaactgtgtttattgcctataatggggtccccaaaatgggtaacctagacttcagagagaatgagcagagagcaaaggagaaatctgggctgtccttccattttcattctgttatctcaggtgagctggtagaggggagacattagaaaaaaatgaaacaacaaaacaattactaatgaggtacgctgaggcctgggagtctcttgagctccacgacttcaaaattaaaatgagccatgagtcaaaccactgcaatccagcctgggcaacgagcaagacccagtctctactgttggtggcaaaattgccaacataagttaatagaaagttggccaatttcaccccattttctgtggtttgggctccacattgcaatgttcaatgccacgtgctgctgacaccgaccggagtactagccagcacaaaaggcagggtagcctgaattgctttctgctctttacatttcttttaaaataagcatttagtgctcagtccctactgagtactctttctctcccctcctctgaatttaattctttcaacttgcaatttgcaagggttacacatttcactgtgatgtatattgtgttgcaaaaaaaaaaaagtgtctttgtttaaaattacttggtttgtgaatccatcttgctttccccattggaactagtcattaacccatctctgaactggtagaaaaacatctgaagagctagtctatcagcatctgacaggtgaattggatggttctcagaaccatttcacccagacagcctgtttctatcctgtttaataaattagtttgggttctctacatgcataacaaaccctgctccaatctgtcacataaaagtctgtgacttgaagtttagtcagcacccccaccaaactttatttttctatgtgttttttgcaacatatgagtgttttgaaaataaagt

SEQ ID NO: 23411 - DNA, 1939 bp, Homo Sapiens
cgcctttatctgcatccgggtccgtgggattcgcgctccactggtcagctggggtcgctctcgggtggttgggtgttgcttgttcccgctgttccagcgtcgaagaaccattgggtctgccggtttgaacttgttctggaagctgtgcgtcaccgtaatgaggcttgtaattcttgataactatgacttggctagtgaatgggcagccaaatacatctgtaatcgcatcattcagttcaaacctggacaggacagatattttacactgggtttaccaacagggagtacacctttaggatgctataaaaaactaatagaatatcataagaatggacacctttcttttaaatatgtgaagacctttaatatggatgaatatgtaggacttccaagaaatcatcctgaaagctaccattcttatatgtggaataatttttttaagcatatcgatatagatcctaataatgcacatatccttgacgggaatgctgcagatttacaagcagaatgtgatgcttttgaaaacaaaataaaagaagctggaggaatagatctttttgttggaggaattggtccagatggtcatatcgctttcaatgagcctggatccagtttagtgtcaaggacaagattaaagactctagcaatggataccatcttggcaaatgccaaatattttgatggagatttatcaaaagtgccaactatggctctaactgttggtgtggggacagtgatggatgctagagaagtaatgatccttataacaggggcacacaaggcatttgccctgtacaaagcaatagaagaaggagtcaatcacatgtggactgtttccgctttccagcagcatccccggactatttttgtatgcgatgaagatgctactttagaattaagagttaaaactgtgaaatactttaaaggtctaatgcatgtgcacaataaacttgtggatccactattcagtatgaaagatggaaactgaaggagactggagcaaaattcagcttgaatgaacagagcactttttactaagtagtagatgaattttcagctatgcaatatgacaaaacatggggaattttgaagattgtcattttttcattcgagtctctatgttaaacattccatattttgaatatttatatcttgtacttgggtttaagagaagtagctggctctcaagattgactggctatttattataaagtactgaagtcacatagccacctataaaacagcatagaaatgtctgcctgtttaaaaagtcattttaaaggtagagtgtccacatcaggcaccatttgtgatatgactccagtggcatatatttcattttttaatgacaagacactccaaacctttcagataacaaactatcattgcagaccttcacttttggaatgcaatctttatattttctgtgcatcacacacatgcttttctgcacgtggttgccttagtcatcttcctacagcaccatctagacatcaaaaattgtgctatatatcattggtaaaggaaatttgaagagatgacagtgcctaaaagtacagtttacatccttttggaaagtatgtgtaagtgcatgttttttgtgcaccttcttctatagcacttttttacaaatatcttatttttatttaacgacttgggttcatgtccctaatataagtatcttgacaattatgagctttatacctagcaagccacttcaggaaattcttttggagaatattttctgattattgttaaacttaatatacaattagctttattccttataaaatgtctaaaagaataatacgaagtatatataaaaggaattactgtaaactacattgccatagcaatttacataaaagtatattgttttctatctttaactcaaataaagcgtgtaataaataagttaaaaaaaaaaaaaaaaaaaaaa

SEQ ID NO: 23412 - DNA, 4396 bp, Homo Sapiens
ggagggggtccttgccaggcctggggcggccgggggcggtcctgggctcccctccgtcccgcctccaggcctcggggcctggctggccgacgtggcgttggcggcgctgcgcgcgggagggcagggcaggagggacagaggcgggggcgggccggaaagtttgtccggcggcagcggcgttggggactccggcgggggatgcgcgcccggcccctcagcgcccccagcacgccgccgagtcccgctcgccatgggccactccccacctgtcctgcctttgtgtgcctctgtgtctttgctgggtggcctgacctttggttatgaactggcagtcatatcaggtgccctgctgccactgcagcttgactttgggctaagctgcttggagcaggagttcctggtgggcagcctgctcctgggggctctcctcgcctccctggttggtggcttcctcattgactgctatggcaggaagcaagccatcctcgggagcaacttggtgctgctggcaggcagcctgaccctgggcctggctggttccctggcctggctggtcctgggccgcgctgtggttggcttcgccatttccctctcctccatggcttgctgtatctacgtgtcagagctggtggggccacggcagcggggagtgctggtgtccctctatgaggcaggcatcaccgtgggcatcctgctctcctatgccctcaactatgcactggctggtaccccctggggatggaggcacatgttcggctgggccactgcacctgctgtcctgcaatccctcagcctcctcttcctccctgctggtacagatgagactgcaacacacaaggacctcatcccactccagggaggtgaggcccccaagctgggcccggggaggccacggtactcctttctggacctcttcagggcacgcgataacatgcgaggccggaccacagtgggcctggggctggtgctcttccagcaactaacagggcagcccaacgtgctgtgctatgcctccaccatcttcagctccgttggtttccatgggggatcctcagccgtgctggcctctgtggggcttggcgcagtgaaggtggcagctaccctgaccgccatggggctggtggaccgtgcaggccgcagggctctgttgctagctggctgtgccctcatggccctgtccgtcagtggcataggcctcgtcagctttgccgtgcccatggactcaggcccaagctgtctggctgtgcccaatgccaccgggcagacaggcctccctggagactctggcctgctgcaggactcctctctacctcccattccaaggaccaatgaggaccaaagggagccaatcttgtccactgctaagaaaaccaagccccatcccagatctggagacccctcagcccctcctcggctggccctgagctctgccctccctgggccccctctgcccgctcgggggcatgcactgctgcgctggaccgcactgctgtgcctgatggtctttgtcagtgccttctcctttgggtttgggccagtgacctggcttgtcctcagcgagatctaccctgtggagatacgaggaagagccttcgccttctgcaacagcttcaactgggcggccaacctcttcatcagcctctccttcctcgatctcattggcaccatcggcttgtcctggaccttcctgctctacggactgaccgctgtcctcggcctgggcttcatctatttatttgttcctgaaacaaaaggccagtcgttggcagagatagaccagcagttccagaagagacggttcaccctgagctttggccacaggcagaactccactggcatcccgtacagccgcatcgagatctctgcggcctcctgaggaatccgtctgcctggaattctggaactgtggctttggcagaccatctccagcatcctgcttcctaggccccagagcacaagttccagctggtcttttgggagtggcccctgcccccaaaggtggtttgcttttgctggggtaaaaaggatgaaagtttgagaatgcccaattcttcattttgggtttcaggccctgaaggttcttgaggatctagtttcatgcctcggtttccccattgacttggacatttttgcagtttttataagaagaatattctatgaagtctttgttgccccatggatttttttcaaagaatctcaggggtaccaatccgggcaggaggtttttcccgatatcacccctaaatccaaatgaggatatcatcttttctaatctcttttttcaactggctgggacattttcggaagggggaagtctctttttttactcttatcattttttttttttgaggtggagtctcattctgttgcccaggctggcctgatcttggctcactgcaacctccacttcctgggttcaagcgattctcctgcctcagcctcctaagtagctgggattacaggcgcgtgccaccacacccagctaatttatttttagcagagatggggtttcactgtgttggccaggctggtcgtgaactcctgagctcaagtgatccacccacctcagcctcccagagtgctaggattacaggccttttgactcttttatctgagttttattgacccctctaattctcttacccagaatatttatccttcaccagcaactctgactctttgacgggaggcctcagttctagtccttggtctgctggtgtcattgctgtaggaatgaccacgggcctcagtttccccatttgtataatgggaagcctgtaccaggtcattcttaagatttctcctgactccagtgagctggaattctaaatgctggtctaggagctgtctccaggatggtgcaggatggctttgcggaaaggagatgggtttggaggccaacaaacctgcttgtcaatattgcctttgcctcttggcagcccttgaacttgagtaaataacaactccctgaacctcagtttcctcatctgcagaatggggataattatgtcccaggggtatatttagaccctgtttcctttcaggagggtccccagctggtccagggcctgggaaatttctacttatcctcattacccaggtccctcctttggaccctgtaaagggtcagggtgaatcagatgggggactgagcaagtagctatgactgcagatcatgtaaggaagggactgacaagaagctcccagatgctggggagaatgaagagctaaaatagatcctaggtgctggatgctttgtcatccatgcgtgcacatatgggtgctggcagagcccccaaggactctggcctctcgagttctcctatcttctccattctagatgcttcccttgtatccagtgatgtgctggagctggctttgccaagcttgtgagagctggttgctacattttcaggatttttacaagttggtaaacacagccattataaaaaattaaatgatttaaatttataattaagtaaattacattaaaacaaaaaaattatactcaaaattcattacttaattttactacctgttactattatctgtgcttttgaggctatttctacatagtaactcttatggagacctaggggagacaccgcgcatctcttcctgattccccactcaatgacatcatgttagtctttggttgcttaactggctgtggggagtgtttttgtatcacaaagattagagaggactacacatcagggcttgatttattgtttgttgattttctagacttcagaacatgctggataaaatgtcagtaatgcaaattaaactttaaagtatgtcttgtttgtagccaatacatggtgtatagcaccaaaaaatggagggattattcttccagtagttgaacactgtcatccgtttcagctgacagctgctcaaatcatttaagaaggagttctgacattcattttcattgttttacttttgtcttcctcactagtgtaaacaaaaatttcaaccagcattcatgccgaacctatacccattcttcagtgcctagctgtacagttatcagggatttttattcgtagtctaattttgtcaaatcatggccaaatcgcagtgatagttgactttggatacaaggtttggcaaaaaaaaaaatattaacaaaatattctgtaagaatcaattggctatatggaatttaggataaagaatatttacaataaagaatatttacaataaagagtttattattatttgtaagttgtgtgcaacaaacataccctttatctctgtaaaatttatacacacaaaaattaacaaaagattctgtaagaattaattggctatatggaatttaggatagaatatttacaataaagagtatttacaataaagagtttgttattatttgtaaaaaaaaaaa

SEQ ID NO: 23413 - DNA, 5828 bp, Homo Sapiens
cgccagatggctgagagctatcaaggaaaactcaggaccatgatggctcagtttcccacagctatgaatggagggccaaacatgtgggctattacctctgaagaacgtactaagcatgacaggcagtttgataacctcaaaccttcaggaggttacataacaggtgatcaagcacgtaattttttcctacaatcaggtctgccggcccctgttttagctgaaatatgggctttatcagacctaaacaaggatgggaagatggatcagcaagagttctccatagctatgaaactcatcaaactgaagcttcaaggccaacagttgcctgtggttctccctcctattatgaagcaaccccctatgttttctccattaatttctgctcgttttggaatgggaagcatgcccaatctgtccattcctcagccattgcctccagctgcacctataacatcattgtcttctgcgacttcagggaccaaccttcctcccttaatgatgcccactcccctagtgccttctgttagcacatcatcattaccaaatggaaccgccagtctcattcagcctttacccattccttattcttcttcaacattgcctcatgggtcatcttatagtctgatgatgggaggatttggaggtgctagtatacagaaagcgcagtctctgattgatttaggatctagtagctcaacttcctcgactgcttcactctcagggaactcacccaagactgggacctcagagtgggcagttcctcagcctacaagattaaaatatcggcaaaaatttaatactcttgacaaaagtatgagtggatatctctcaggttttcaagctagaaatgcccttcttcagtcaaatctttctcaaactcagctggctactatttggactctggctgacgttgatggtgatggacagctaaaagcagaagagtttattcttgcaatgcaccttactgacatggccaaagctggacagccattaccactgactttacctcctgagcttgttcctccatctttcagaggaggaaagcaaattgattccattaatggaactctgccttcatatcagaaaatgcaagaagaggagcctcagaagaaattaccagttacttttgaggacaaacggaaagccaactatgagcgagggaacatggagctggaaaagcgacgccaagccttgatggagcagcaacaaagggaggcagaacgtaaagcccagaaagaaaaggaagagtgggaacgaaaacagagagaattacaagaacaagaatggaagaaacaacttgaattagaaaaacgcttagagaagcaacgggaattggagagacaacgagaggaagaaaggagaaaagacatagaaagacgagaggcagcaaaacaggaacttgaacgacaacgtcgcttagaatgggagagaattcggcgacaggagcttctcaatcaaaagaatagagaacaagaagaaattgtcaggttaaactctaaaaagaagaatcttcatcttgagttggaagcactgaatggcaaacatcagcagatctcaggcagacttcaggatgtccgactcaaaaagcaaactcaaaagactgagctggaagttctggataagcagtgtgacttggaaattatggaaatcaagcaacttcaacaggaacttcaggaatatcagaataagcttatctatctggtacctgagaagcaattattaaatgaaagaattaaaaacatgcagttcagtaacacacctgattcaggggtcagtttacttcataaaaaatcattagaaaaggaagaattatgccaaagacttaaagaacagttagatgctcttgaaaaagaaactgcatctaagctgtcagaaatggattcttttaacaatcaactaaaggaactgagagaaacctacaacacacagcagttagcccttgaacagctttataagatcaaacgtgacaagttgaaggaaattgaaaggaaaagattagaactaatgcagaaaaagaaactagaagatgaggctgcaaggaaagcaaagcaaggaaaagaaaacttatggaaagaaaatcttagaaaggaggaagaagaaaaacaaaagcgactccaggaagaaaaaacacaagaaaaaattcaagaagaggaacggaaagctgaggagaaacaacgtaaggataaggatactttgaaagctgaggagaaaaaacgtgagacagctagtgttttggtgaattatagagcattatacccctttgaagcaaggaaccatgatgagatgagttttaattctggagatataattcaggttgatgaaaaaaccgtaggagaacctggttggctttatggtagttttcaaggaaattttggctggtttccatgcaattatgtagaaaaaatgccatcaagtgaaaatgaaaaagctgtatctccaaagaaggccttacttcctcctacagtttctttatctgctacctcaacttcctctgaaccactttcttcaaatcaaccagcatcagtgactgattatcaaaatgtatctttttcaaacctaactgtaaatacatcatggcagaaaaaatcagccttcactcgaactgtgtcccctggatctgtatcacctattcatggacagggacaagtggtagaaaacttaaaagcacaggccctttgttcctggactgcaaagaaagataaccacttgaacttctcaaaacatgacattattactgtcttggagcagcaagaaaattggtggtttggggaggtgcatggaggaagaggatggtttcccaaatcttatgtcaagatcattcctgggagtgaagtaaaacgggaagaaccagaagctttgtatgcagctgtaaataagaaacctacctcggcagcctattcagttggagaagaatatattgcactttatccatattcaagtgtggaacctggagatttgactttcacagaaggtgaagaaatattggtgacccagaaagatggagagtggtggacaggaagtattggagatagaagtggaatttttccatcaaactatgtcaaaccaaaggatcaagagagttttgggagtgctagcaagtctggagcatcaaataaaaaacctgagattgctcaggtaacttcagcatatgttgcttctggttctgaacaacttagccttgcaccaggacagttaatattaattctaaagaaaaatacaagtgggtggtggcaaggagagttacaggccagaggaaaaaagcgacagaaaggatggtttcctgccagtcatgttaaacttttgggtccaagtagtgaaagagccacacctgcctttcatcctgtatgtcaggtgattgctatgtatgactatgcagcaaataatgaagatgagctcagtttctccaagggacaactcattaatgttatgaacaaagatgatcctgattggtggcaaggagagatcaacggggtgactggtctctttccttcaaactacgttaagatgacgacagactcagatccaagtcaacagtggtgtgctgatctgcaaaccctggacacaatgcagccaattgagaggaaaagacagggctatattcatgagctgattcagaccgaagagcggtacatggctgaccttcagctcgtcgtcgaggtttttcagaaacgcatggcagagtcaggctttctcactgaaggggagatggccctgatttttgttaactggaaggagctcatcatgtccaacacaaagctgctgaaggctttgcgggtgcggaagaagaccgggggcgagaagatgccggtgcagatgattggggacatcctggccgctgagctgtcccacatgcaggcttacatcaggttctgcagctgccagcttaatggagcagctctgttacagcagaagacagatgaagacacagatttcaaagaatttttaaagaagctggcatctgacccgcggtgtaaaggaatgcccctctccagcttcctgctgaaacccatgcagaggatcacccgctacccactgctcatcagaagtattctggagaacaccccggagagccatgcagaccattcctccctaaagctggccctcgagcgggcagaggagctgtgctctcaagtgaatgagggagttcgggagaaggaaaactcggaccgactggagtggatccaggcgcacgtgcagtgtgaaggcctcgcggagcaacttattttcaactctctcaccaactgcctggggccccggaagctcttacacagtgggaaattatacaagaccaagagcaacaaggaactgcacggattcctcttcaatgacttcctgcttcttacctacatggtcaagcagtttgctgtttcctctggctctgagaaacttttcagctcgaagtccaatgctcaattcaaaatgtataaaacgcccattttcctgaatgaagtcttggtgaaactgcccacagacccttccagcgatgagcctgtcttccacatttcccacattgatcgggtctacaccctccgaacagacaacattaatgagaggaccgcctgggtgcagaagatcaaggcggcgtctgagcagtacatcgacaccgagaagaagcagcgtgagaaagcttaccaagcccgctcccaaaagacttcaggcattgggcgcctgatggtgcatgtcattgaagctacagaattaaaagcctgcaaaccaaatggaaagagcaacccatactgtgaaatcagcatgggctcccagagctacaccaccaggaccatccaggacacactcaatcccaagtggaattttaactgccagttctttattaaggatctctaccaagacgtgctgtgtctcaccctgtttgacagagaccagttttcaccagatgatttcctgggtcgtactgaaattccagtggcaaaaattcgaacagaacaggaaagcaaaggccctatgacccgccgactgctgctgcatgaggtccccaccggggaggtctgggtccgttttgacctgcagctttttgagcaaaaaactctcctgtaggggttctaaaggacagcaccagcgggacagcccacaaggctggggctggagaatgagagactgcgctctcttggggctgagggagcaccatgcagcttcacccctcacaaagccatgcacgctgggggctctgttttcctgcacactaaatagctagcaatctatgcaaacacctttcccataaagaaaccaaaccccatagtacagtgccttgtcctagtgttcacatgttcagctctgtttgtttagatgccaaggtttccattttcagggctataaaaagtattacttggaaatgaggcatcagaccaccagatgttaccgctcggttgaatgtgtccaccgtggagtggtttggtgacgctgtaaccattccacgccagtgacctctgctgggtcacagccactcaggaggggaagggtcaggatgagaggctgcagcctcgacacttggcgcggcctgatactgaaatagcgtctactcgtgcactgaataaaaacagaaacttgatcattttattcctgattagattttatcactctctgctaagacaatatagtctggagtataagtgggaaagcttgatttaaatactgtgaactctaataatgtggaaaatatttttcaactttaattttctgaagtataaattatttatgtaaattcattgtttttgcatatttcttaggacatgcatctttaagctttatcattgcccatatgtacagaaagagaataaagacatatgtttatggatgaaaaaaaaaaaaaaaaa

SEQ ID NO: 23414 - DNA, 2615 bp, Homo Sapiens
agtcccgtctcaaagaaaatgaacggcaccctggaccacccagaccaaccagatcttgatgctatcaagatgtttgtgggccaggttccaaggacctggtctgaaaaggacttgcgggaactcttcgaacagtatggtgctgtgtatgaaatcaacgtcctaagggataggagccaaaacccgcctcagagcaaagggtgctgttttgttacattttacacccgtaaagctgcattagaagctcagaatgctcttcacaacatgaaagtcctcccagggatgcatcaccctatacagatgaaacctgctgacagtgagaagaacaatgcagtggaagacaggaagctgtttattggtatgatttccaagaagtgcactgaaaatgacatccgagtcatgttctcttcgtttggacagattgaagaatgccggatattgcggggacctgatggcctgagccgaggttgtgcatttgtgacttttacaacaagagccatggcacagacggctatcaaggcaatgcaccaagcacagaccatggagggttgctcatcacccatggtggtaaaatttgctgatacacagaaggacaaagaacagaagagaatggcccagcagctccagcagcagatgcagcaaatcagcgcagcatctgtgtggggaaaccttgctggtctaaatactcttggaccccagtatttagcactttatttgcagctccttcagcagactgcctcctctgggaacctcaacaccctgagcagcctccacccaatgggagggttgaatgcaatgcagttacagaatttggctgcactagctgctgcagctagtgcagctcagaacacaccaagtggtaccaatgctctcactacatccagcagtcccctcagcgtgctcactagttcagggtcctcacctagctctagcagcagtaattctgtcaaccccatagcctcacttggagccctgcagacattagctggagcaacggctggcctcaatgttggctctttggcaggaatggctgctttaaatggtggcctgggcagcagtggcctttccaatggcaccgggagcaccatggaggccctcactcaggcctactcgggtatccagcaatatgctgctgctgcgctccccactctgtacaaccagaatcttctgacacagcagagtattggtgctgctggaagccagaaggaaggtccagagggagccaacctgttcatctaccacctgccccaggagtttggtgatcaggacctgctgcagatgtttatgccctttgggaatgtcgtgtctgccaaggttttcatagacaagcagacaaacctgagcaagtgttttggttttgtaagttacgacaatcctgtttcggcccaagctgccatccagtccatgaacggctttcagattggcatgaagcggcttaaagtgcagctcaaacgttcgaagaatgacagcaagccctactgagcgtgctcccctctgagactggagtgagagggtcttctggtaagtgggggaggagcacccttaatgattcgaagccctgaggctgtgtgttgacagccctggaccctgatccctgccactctcgcaggcacagcttgccctgaagactcggctactgccttctgtgggagtttcgcttcgtacagaggacaagtttgtgctttggtttccagtgttttactttggagtttaggtgccatatcctgaggttttttttgtttttgtttttgtttctcctttatttaaagtttgctgtgtttgtaaccagtgtgtgttgagaaggaccaacaccaaaccaccctggggaagggggacagggaaacatttaacacagacgatgatcaggatttgccccaaaccaccccaagagagaggactgagtggaacaaaaaagtgacccccagaacctctcttagtgtgagggtgggtagaatgagaactgacacctgggagctgtggggagcagagcggctttggggaagagtggagtgactagacacctaatgccctggcagctggagactcaaactcctgtacagctaccttctgggaaatagtttttgacacctatttttcagattcttgtccggaatttctgctggctcttttcaaaaaagggcattaacaattctctggaaataaagcacctgttagcctgacatatgcaaaaagcagggcggcatcacccattacgagctcccccagccagcagtcagtattggattggccttgcctggctggtggcagtttgggagaaacagccaaagaggttagtttatttcaacaccaaattagaccatggcccatttccaacgggtctctttaaaggcctctatggaatacattgcctggtttccttctttgcagttcaccacagcaaggaatgtcacctccatcccaagccaccattttctcatgaaggcaaatccaagaagggcttgcagttcttgctgaagggggtaccatttgtgggcagagtgatcaataccatctagttgggggaggaggagcttatttcttggtgtacttgaatcagaaggtccctgcaagccagtatcgcttttcttacctaatcacagagtttgtgtagtgaattt

SEQ ID NO: 23415 - DNA, 3561 bp, Homo Sapiens
ccggctgtcggtctccgtgtcgccgccgccgcccggcatcgtggagctggggcccccttttgcctgggagttttgtagtcgcctagggtcagcggtgacatcccaaagggcaggcccggcagccgccatggtggccaaggattaccccttctacctcacggtcaagagagcgaactgcagcctggagctacctccggccagcggtccggccaaggacgctgaggagcctagtaataaacgggtcaaacccctttcccgagtcacgtcgctagcaaacctcatcccgcccgtgaaggccacgccattaaagcgcttcagtcaaaccctgcagcgctccattagcttccgcagtgagagccgccctgacatcctcgccccccgaccctggtccagaaatgccgccccctcgagcacgaaacggagagatagcaagctgtggagtgagaccttcgatgtgtgcgtcaatcagatgcttacatccaaggaaatcaaacgtcaggaggcgatctttgagctttcccaaggagaagaagacttgatagaagacttgaaattagcaaaaaaggcctatcatgaccccatgctgaaactctccataatgacagaacaagagttgaatcaaatttttggaacactggactctctaattcctctacatgaagagctccttagtcagcttcgagatgttaggaagcctgatggctcgactgaacatgttggtcccatcctcgtgggctggctcccttgcctcagctcctatgatagctactgcagcaatcaagtagccgccaaagctctgctggaccacaaaaagcaagatcaccgagtccaggatttcctacagcgatgtttagaatccccctttagccgcaaactagatctctggaatttcctcgatattccaagaagccgcctggtaaaataccctctgcttctccgagaaatcttgaggcacacaccaaatgataatccagatcagcagcacttggaagaagctataaatatcattcagggaattgtggcagaaatcaacaccaagactggtgaatctgaatgccgctattataaagagcggcttctttacttggaagaaggccagaaagactccctgatcgacagctctcgagtcttgtgttgtcatggtgaactgaagaacaatcggggcgtgaaactgcatgttttcctgttccaagaagtgcttgtgatcactcgagccgtcacccacaatgagcagctttgctaccagctgtaccgtcagccaatccccgtgaaagacctcctgctggaagacctccaggatggagaagtgaggctgggtggctccctgcgaggggcattcagcaacaatgagagaattaaaaacttcttcagagtcagtttcaaaaatggatcccaaagtcagacccactcgctacaagccaatgacactttcaacaaacagcagtggcttaactgtattcgtcaagccaaagaaacagttttgtgtgctgccgggcaagctggggtgcttgactccgagggatcgttcctaaatcccaccaccgggagcagagagctacagggagaaacaaaacttgagcagatggaccaatcggacagtgagtcagactgtagtatggacacgagtgaggtcagcctcgactgtgagcgcatggaacagacagactcttcctgtggaaacagcaggcacggtgaaagtaacgtctgacagaagcatgtgcacttcgggaagcaggcctgcatcttacctgtacagtatttgcattccacagatggaacggtttggagaagcactttttcatacttttgtgaaagtatacatgttggcccagtctctcgtatctgtacctttgtccctagtactgtaactgccaatctgtctgtgtaagctggaatctgtggcaactattaccctgtgttgtatttcccaagtgtctggatggatggagaggtactcaaacaagttactttcagttgtcctgctggattttaaaaaaatagaaaaagaatctcaaaactactgttttacatagattgtttgaagagtccttcctcttgtgcttctgtaccactttcccagctcttagatgtggtagctaaaggcacggaatttagacggccttgtaaatagggcatgaggaactcatctgtgtattgggatggtattagagagagaatcaggaaagaccaactcatgaagtgaacttggtttgatcttactcaactagaaagcttgaaaacatccctggggattctgaaggcttaattttgcaaaggaggatgcattgtctgaactttgcaacttcatccagtgcaagtttgatgcaagaatgtattaggacataaaatagaggctgaccttaaaagggccaggacagaagcggctgccagctctgaatctttaactgaaatgcacatggcaccaggaggtgtctctcatagttggttgctagcctaaaacatcagaatagaacccaaagggcttaggaaggcctgccaggataacaagaaggccctgtattcattgtgtttcatctgcctaggcctactcattattttagagaatgaatgaagcaacaaggaagagagaacatgactctatcgatgacactgtttatagaaacacaggagaggaagaatttggaatgaaaagcacttcgtcagaaccttctgtgggagccattgagagaaaagcatggtccagtgccttctgagaaaggccagagctttgggctttcctgctctgcttttgggtcgtcaatttgccatctctggttctgtgctataatcagaattgtaattatgttctccagaggccaatttcattaactctgattaattagaatcagctagccagattagtaacctctttgtccagccttgatttacagtgcagggtaaagtgcagaccttaaaaacagctaagtacctagaagagctccctgcaagtgtaaatattaaggatgacctgtgcaaaattatacccacaccagcactagtggtaattattctaaattattgccaaaaagttttttttaatctgtctttcaagtttacagaaaagaaagcagtaaatgcattgatgtcattttattatgtacatatatcatgtgcattcaagctgtgtgacaagatatatcaatataaaaacaaggtatatactttattattttttgaaaacaaggatattgtgatcaattttaccctgtaaaacatatttctgtatttataggtcttaaacatgatgaattttttctattacaagtttatttaaaactgctttctcaagtcgttattgatacagcaagtgaacctgctgcagacagaagcagaggaaagccaagaacagcctttattggtgaagaaaagaatgaatgattctttgtaggcgccatcagccacttttagaagccatcagccagtgtgttgggaaaagaggtttgtcaagtgttggcctatgggaaggtggtcaatgaatgttttgatgaaatgaatgtttttgtataatggccttaaacttttctggaagtatttcaaataaattacattattaagtcatca

SEQ ID NO: 23416 - DNA, 6463 bp, Homo Sapiens
ccggtctataggtgcataccaccacaccaggctaattttttttttttgagacggagtctcactctgtcacccaggctggagtgcaatggcgcgatctttgctcactgcaacctctgccacccgggttcaagcaattctcctgcctcagctcctgagtagctgggattacaggcgcccgccaccacgcccggctaatttttgtatttttagtagagacgaggtttcaccatcttggccaggctggtcttgaactcctgaccttgtgatctacctgccagggccttccaaagtgctgggattacggacgtgagccaccacgcctggcccaggctaattttttgaaattttaatagaggcagggtcttgctgtattgcccaggctgctctcacattcctagccttaagccatcctcctatctcggcctcacaaagtgctgggattacaggtgtaagccactgtgcctggttttgggcaagtttcttgtcctgactgtgtcttgggttctcacctgttgattggggatacccttgttgcctacctccaagtaattttatgaggatgaaactcatagcttgtcagtgggaagtgcttaggtaatgagctactagtggtggcagtggctgtgatggtggtattaataccactcctactggatggtctctaatactatctccttccttccctaccagcaacatgtcatggtttagtggcctcctggtccctaaagtggatgaacggaaaacagcctggggcgaacgcaatgggcagaagcgttcgcggcgccgtggcactcgggcaggtggcttctgcacgccccgctatatgagctgcctccgggatgcagagccacccagccccacccctgccggcccccctcggtgcccctggcaggatgacgccttcatccggaggggcggcccaggcaagggcaaggagctggggctgcgggcagtggccctgggcttcgaggataccgaggtgacaacgacagcgggcgggacggctgaggtggcgcccgacgcggtgcccaggagtgggcgatcctgctggcgccgtctggtgcaggtgttccagtcgaagcagttccgttcggccaagctggagcgcctgtaccagcggtacttcttccagatgaaccagagcagcctgacgctgctgatggcggtgctggtgctgctcacagcggtgctgctggctttccacgccgcacccgcccgccctcagcctgcctatgtggcactgttggcctgtgccgccgccctgttcgtggggctcatggtggtgtgtaaccggcatagcttccgccaggactccatgtgggtggtgagctacgtggtgctgggcatcctggcggcagtgcaggtcgggggcgctctcgcagcagacccgcgcagcccctctgcgggcctctggtgccctgtgttctttgtctacatcgcctacacgctcctccccatccgcatgcgggctgccgtcctcagcggcctgggcctctccaccttgcatttgatcttggcctggcaacttaaccgtggtgatgccttcctctggaagcagctcggtgccaatgtgctgctgttcctctgcaccaacgtcattggcatctgcacacactatccagcagaggtgtctcagcgccaggcctttcaggagacccgcggttacatccaggcccggctccacctgcagcatgagaatcggcagcaggagcggctgctgctgtcggtattgccccagcacgttgccatggagatgaaagaagacatcaacacaaaaaaagaagacatgatgttccacaagatctacatacagaagcatgacaatgtcagcatcctgtttgcagacattgagggcttcaccagcctggcatcccagtgcactgcgcaggagctggtcatgaccctgaatgagctctttgcccggtttgacaagctggctgcggagaatcactgcctgaggatcaagatcttgggggactgttactactgtgtgtcagggctgccggaggcccgggccgaccatgcccactgctgtgtggagatgggggtagacatgattgaggccatctcgctggtacgtgaggtgacaggtgtgaatgtgaacatgcgcgtgggcatccacagcgggcgcgtgcactgcggcgtccttggcttgcggaaatggcagttcgatgtgtggtccaatgatgtgaccctggccaaccacatggaggcaggaggccgggctggccgcatccacatcactcgggcaacactgcagtacctgaacggggactacgaggtggagccaggccgtggtggcgagcgcaacgcgtacctcaaggagcagcacattgagactttcctcatcctgggcgccagccagaaacggaaagaggagaaggccatgctggccaagctgcagcggactcgggccaactccatggaagggctgatgccgcgctgggttcctgatcgtgccttctcccggaccaaggactccaaggccttccgccagatgggcattgatgattccagcaaagacaaccggggcacccaagatgccctgaaccctgaggatgaggtggatgagttcctgagccgtgccatcgatgcccgcagcattgatcagctgcggaaggaccatgtgcgccggtttctgctcaccttccagagagaggatcttgagaagaagtactcccggaaggtggatccccgcttcggagcctacgttgcctgtgccctgttggtcttctgcttcatctgcttcatccagcttctcatcttcccacactccaccctgatgcttgggatctatgccagcatcttcctgctgctgctaatcaccgtgctgatctgtgctgtgtactcctgtggttctctgttccctaaggccctgcaacgtctgtcccgcagcattgtccgctcacgggcacatagcaccgcagttggcatcttttccgtcctgcttgtgtttacttctgccattgccaacatgttcacctgtaaccacacccccatacggagctgtgcagcccggatgctgaatttaacacctgctgacatcactgcctgccacctgcagcagctcaattactctctgggcctggatgctcccctgtgtgagggcaccatgcccacctgcagctttcctgagtacttcatcgggaacatgctgctgagtctcttggccagctctgtcttcctgcacatcagcagcatcgggaagttggccatgatctttgtcttggggctcatctatttggtgctgcttctgctgggtcccccagccaccatctttgacaactatgacctactgcttggcgtccatggcttggcttcttccaatgagacctttgatgggctggactgtccagctgcagggagggtggccctcaaatatatgacccctgtgattctgctggtgtttgcgctggcgctgtatctgcatgctcagcaggtggagtcgactgcccgcctagacttcctctggaaactacaggcaacaggggagaaggaggagatggaggagctacaggcatacaaccggaggctgctgcataacattctgcccaaggacgtggcggcccacttcctggcccgggagcgccgcaatgatgaactctactatcagtcgtgtgagtgtgtggctgttatgtttgcctccattgccaacttctctgagttctatgtggagctggaggcaaacaatgagggtgtcgagtgcctgcggctgctcaacgagatcatcgctgactttgatgagattatcagcgaggagcggttccggcagctggaaaagatcaagacgattggtagcacctacatggctgcctcagggctgaacgccagcacctacgatcaggtgggccgctcccacatcactgccctggctgactacgccatgcggctcatggagcagatgaagcacatcaatgagcactccttcaacaatttccagatgaagattgggctgaacatgggcccagtcgtggcaggtgtcatcggggctcggaagccacagtatgacatctgggggaacacagtgaatgtctctagtcgtatggacagcacgggggtccccgaccgaatccaggtgaccacggacctgtaccaggttctagctgccaagggctaccagctggagtgtcgaggggtggtcaaggtgaagggcaagggggagatgaccacctacttcctcaatgggggccccagcagttaacagggcccagccacaaattcagctgaagggaccaaggtgggcattgagtggactctgtgctcactgggtggagctgtggcagggggcactgagcctccagaccctgctaaccacaaaagggaacatcccagcaggctgtgcttggatcatgctcgtctgccctcaagctggaaaacaaggggctacctaccgagaggattatgcaagtgactttctttcttacttggggtagggctgttccctctccaatcttccagcctttgggagcaggggaggggtcagtagcagaagcagagggaggcctcttgcctgagggattaaaatggcagcttgccatgcctacccttccctgtctgtctgggcagcaggttcagggctgagcccttcttttccctcttttttcctgggaatattttgtacaatattttgtacaaagacaggcatgaggagtgcctattccatgcttgcctttgcaatacctgcatccccagcactggtcctgggcacttccccaccccagccaggtgtccctcctatgcacagagcagaggagggagaagctctggggagccagctttggccatatttcaggagaatgtttccatgtgccaaatcttagtcccatgatctgtccccaaaggggaacaaagggacctctgacagcttagatttagccccagttcctgcacgctccagggaacggggtgtctggcctcactggtactgtgaaaaatgctcagagagcaagcctgtgtgtggggatgtcaggtcaggagctggaagttcacctgcaggtgccaaagagcaggccggccagggctggggcagtgccagactctgatctgaggaccccgtcggggtccagatcaggtcactctgccccagtgctctcttgctgtctgctgacaagggggcatggagcatctcttcctcttctgttgccaaatagaaaagggtcagggcatggagaaaggtgaccctgatcccaaacctgccctcccaagtctctggtgttggggagggcccgtgtgtttgtgtaactgtgtgtgcatgttggtctttgtgtgcatatctgttttccaggtctatgtgagtccttgtgctcctgctcctcagctctccaccccaggttgcctctctcctgtgggcctctgtcttctgggaataaagcagggtttcctacttcaggggatgtagagagatgcccaggttgcacaggagtgggatggggtgtggtagcaaaaggagggagaggagtcctttttgtgccaaatccctaagtgccgttcgggggccatgtgtgcagcatgactctccctgtctgtggcagggacccaagcgcttgcttaagccccagtgctccatgccagcacttgaactgtctggggtttgatggacagaggctgaggaatttcctggcttccccagatagtgtcctgggacatggtatgctttggggctggggtagcatggaatccctctgaggacctggatactggtactacggggtggggaagaggaaccttaaacttggctttccccagccttcagcctgagtctagcatgtttctagctccccagtcccttgtgaagccttgagggctggcagaagggttaggaggttgaactctagattcccttcctgtctttgccttccttttacccctttccctgcaacctccttgactctggcctgaatttgttggtgcctcagtttctctgtctgtacctatttaagccaaaggcactagcctgaattttgcttgaagatcactttgtcttggaaatgactagagaggcagaggagaagggtttccagagttgctaggtttgggagtggaaggggcaggcagtgcacttgcccctcctcatgccccttctgacaccagctccctgtggaggcctggtttctgggtaatgcctcccttgggcatcttcatgcatcaaccaaatgggccatcaggtacttcattagtcatggcagaaggaggggaaaagacttgttttccagacagaaaatctactcccctgtccccagccatatccctggataggaagggataggaagagactacttggtgccatggggtaggggtgagggtataagtagatcagagtgggaagacctcagccttgggtggcttgtctctgcttcttgccaggtgggagggcctgtccacaccctggatccccgtaccacagtgccagccatgcccttcccctgggctaccattgtccctttcctcacccagttggtagagg

SEQ ID NO: 23417 - DNA, 2142 bp, Homo Sapiens
atggcgaagtccccggagaactctaccctggaggagattctggggcagtatcaacggagtctccgggaacatgccagcagaagcattcaccaactgacatgtgccctgaaagaaggcgatgtcactattggagaagatgcaccaaatctttcttttagcaccagtgtgggaaatgaggacgccaggacagcctggcccgaattacaacagagccatgctgttaatcagctcaaagatttgttgcgccaacaagcagataaggaaagtgaagtatctccgtcaagaagaagaaaaatgtcccccttgaggtcattagaacatgaggaaaccaatatgcctactatgcacgaccttgttcatactattaatgaccagtctcaatatattcatcatttagaggcagaagttaagttctgcaaggaggaactctctggaatgaaaaataaaatacaagtagttgtgcttgaaaacgaagggctccagcaacagctaaaatctcaaagacaagaggagacactgagggaacaaacacttctggatgcatccggaaacatgcacaattcttggattacaacaggtgaagattctggggtgggcgaaacctccaaaagaccattttcccatgacaatgcagattttggcaaagctgcatctgctggtgagcagctagaactggagaagctaaaacttacttatgaggaaaagtgtgaaattgaggaatcccaattgaagtttttgaggaacgacttagctgaatatcagagaacttgtgaagatcttaaagagcaactaaagcataaagaatttcttctggctgctaatacttgtaaccgtgttggtggtctttgtttgaaatgtgctcagcatgaagctgttctttcccaaacccatactaatgttcatatgcagaccatcgaaagactggttaaagaaagagatgacttgatgtctgcactagtttccgtaaggagcagcttggcagatacgcagcaaagagaagcaagtgcttatgaacaggtgaaacaagttttgcaaatatctgaggaagccaattttgaaaaaaccaaggctttaatccagtgtgaccagttgaggaaggagctggagaggcaggcggagcgacttgaaaaagaacttgcatctcagcaagagaaaagggccattgagaaagacatgatgaaaaaggaaataacgaaagaaagggagtacatgggatcaaagatgttgatcttgtctcagaatattgcccaactggaggcccaggtggaaaaggttacaaaggaaaagatttcagctattaatcaactggaggaaattcaaagccagctggcttctcgggaaatggatgtcacaaaggtgtgtggagaaatgcgctatcagctgaataaaaccaacatggagaaggatgaggcagaaaaggagcacagagagttcagagcaaaaactaacagggatcttgaaattaaagatcaggaaatagagaaattgagaatagaactggatgaaagcaaacaacacttggaacaggagcagcagaaggcagccctggccagagaggagtgcctgagactaacagaactgctgggcgaatctgagcaccaactgcacctcaccagacaggaaaaagatagcattcagcagagctttagcaaggaagcaaaggcccaagcccttcaggcccagcaaagagagcaggagctgacacagaagatacagcaaatggaagcccagcatgacaaaactgaaaatgaacagtatttgttgctgacctcccagaatacatttttgacaaagttaaaggaagaatgctgtacattagccaagaaactggaacaaatctctcaaaaaaccagatctgaaatagctcaactcagtcaagaaaaaaggtatacatatgataaattgggaaagttacagagaagaaatgaagaattggaggaacagtgtgtccagcatgggagagtacatgagacgatgaagcaaaggctaaggcagctggataagcacagccaggccacagcccagcagctggtgcagctcctcagcaagcagaaccagcttctcctggagaggcagagcctgtcggaagaggtggaccggctgcggacccagttacccagcatgccacaatctgattgctga

SEQ ID NO: 23418 - DNA, 4713 bp, Homo Sapiens
cggccgcggcgcgagccggagtccgccgagccggagcgcgacgaggccccgggcgcgccctccccgctgccgccaccgccgtgccgccgccatccgcccgccgccgccgccgctgtccggcccccgagcacgccggccccgcgcgcgcctcgaggccgagtcaaggtgtgagatgcacaatgcgaaacctaggccccagcttttacaccatgatgcgcagggttgtactttttgtactgaactgataggtggcctagtggttatgccctgtactaccattttgaggatctggactccgtttcctgccttgctctttggaccacattgtcaattcacaccgaaactatgttccaacttcctgtcaacaatcttggcagtttaagaaaagcccggaaaactgtgaaaaaaatacttagtgacattgggttggaatactgtaaagaacatatagaagattttaaacaatttgaacctaatgacttttatttgaaaaacactacatgggaggatgtaggactgtgggacccatcacttacgaaaaaccaggactatcggacaaaacctttctgctgcagcgcttgtccattttcctcaaaattcttctctgcctacaaaagtcatttccgcaatgtccatagtgaagactttgaaaataggattctccttaattgcccctactgtaccttcaatgcagacaaaaagactttggaaacacacattaaaatatttcatgctccgaacgccagcgcaccaagtagcagcctcagcactttcaaagataaaaacaaaaatgatggccttaaacctaagcaggctgacagtgtagagcaagctgtttattactgtaagaagtgcacttaccgagatcctctttatgaaatagttaggaagcacatttacagggaacattttcagcatgtggcagcaccttacatagcaaaggcaggagaaaaatcactcaatggggcagtccccttaggctcgaatgcccgagaagagagtagtattcactgcaagcgatgccttttcatgccaaagtcctatgaagctttggtacagcatgtcatcgaagaccatgaacgtataggctatcaggtcactgccatgattgggcacacaaatgtagtggttccccgatccaaacccttgatgctaattgctcccaaacctcaagacaagaagagcatgggactcccaccaaggatcggttcccttgcttctggaaatgtccggtctttaccatcacagcagatggtgaatcgactctcaataccaaagcctaacttaaattctacaggagtcaacatgatgtccagtgttcatctgcagcagaacaactatggagtcaaatctgtaggccagggttacagtgttggtcagtcaatgagactgggtctaggtggcaacgcaccagtttccattcctcaacaatctcagtctgtaaagcagttacttccaagtggaaacggaaggtcttatgggcttgggtcagagcagaggtcccaggcaccagcaagatactccctgcagtctgctaatgcctcttctctctcatcgggccagttaaagtctccttccctctctcagtcacaggcatccagagtgttaggtcagtccagttccaaacctgctgcagctgccacaggccctcccccaggtaacacttcctcaactcaaaagtggaaaatatgtacaatctgtaatgagctttttcctgaaaatgtctatagtgtgcacttcgaaaaagaacataaagctgagaaagtcccagcagtagccaactacattatgaaaatacacaattttactagcaaatgcctctactgtaatcgctatttacccacagatactctgctcaaccatatgttaattcatggtctgtcttgtccatattgccgttcaactttcaatgatgtggaaaagatggccgcacacatgcggatggttcacattgatgaagagatgggacctaaaacagattctactttgagttttgatttgacattgcagcagggtagtcacactaacatccatctcctggtaactacatacaatctgagggatgccccagctgaatctgttgcttaccatgcccaaaataatcctccagttcctccaaagccacagccaaaggttcaggaaaaggcagatatccctgtaaaaagttcacctcaagctgcagtgccctataaaaaagatgttgggaaaaccctttgtcctctttgcttttcaatcctaaaaggacccatatctgatgcacttgcacatcacttacgagagaggcaccaagttattcagacggttcatccagttgagaaaaagctcacctacaaatgtatccattgccttggtgtgtataccagcaacatgaccgcctcaactatcactctgcatctagttcactgcaggggcgttggaaagacccaaaatggccaggataagacaaatgcaccctctcggcttaatcagtctccaagtctggcacctgtgaagcgcacttacgagcaaatggaatttcccttactgaaaaaacgaaagttagatgatgatagtgattcacccagcttctttgaagagaagcctgaagagcctgttgttttagctttagaccccaagggtcatgaagatgattcctatgaagccaggaaaagctttctaacaaagtatttcaacaaacagccctatcccaccaggagagaaattgagaagctagcagccagtttatggttatggaagagtgacatcgcttcccattttagtaacaaaaggaagaagtgtgtccgtgattgtgaaaagtacaagcctggcgtgttgctggggtttaacatgaaagaattaaataaagtcaagcatgagatggattttgatgctgagtggctatttgaaaatcatgatgagaaggattccagagtcaatgctagtaagactgctgacaaaaagctcaaccttgggaaggaagatgacagttcctcagacagttttgaaaatttggaagaagaatccaatgaaagtggtagcccttttgaccctgtttttgaagttgaacctaaaatctctaacgataacccagaggaacatgtactgaaggtaattcctgaggatgcttcagaatctgaggagaagctagaccaaaaagaggatggttcaaaatacgaaactattcatttgactgaggaaccaaccaaactaatgcacaatgcatctgatagtgaggttgaccaagacgatgttgttgagtggaaagacggtgcttctccatctgagagtgggcctggatcccaacaagtgtcagactttgaggacaatacctgcgaaatgaaaccaggaacctggtctgacgagtcttcccaaagcgaagatgcaaggagcagtaagccagctgccaaaaaaaaggctaccatgcaaggtgacagagagcagttgaaatggaagaatagttcctatggaaaagttgaagggttttggtctaaggaccagtcacagtggaagaatgcatctgagaatgatgagcgcttatctaacccccagattgagtggcagaatagcacaattgacagtgaggatggggaacagtttgacaacatgactgatggagtagctgagcccatgcatggcagcttagccggagttaaactgagcagccaacaggcctaagtgccaggttccctggcattggtgacatgctgcagcctggaactctgatctccagtgtgactgcaaagctgtcttctcactggtactgccttgtgagtactggttggactgtggggcatgtggccgctgcagttccagtggttatttctaagtctatgacaggacaggctgttcttgcttcagaaccttctctgacagacacggtaactaaatgtgaaaaaccaataagctggtgactcatgaatacacacgaggaaaagcagaggtttattttatctgccttttcaacatttctttccctctgtgaaatgattggtcagatgtctttgagaagtgttaaactaattcacatggtagtgtagggccaacatacaagctaccagtctaatgtgtatagtagactttgggaaaagcgattttttttcatgtattcattctgaatagttgaaatgtatatttgtacagtcttttagacctattcaagtgatgctcatgatcctgttactgtgtgcccatcatagatttctttttttagtgttgcccttgctgtgtaataaacgctctatctagtttacctagcaaaagctcaaaactgcgctagtatggactttttggacagacttagtttttgcacataaccttgtacaatcttgcaacagaggccagccacgtaagatatatatctggactctcttgtattataggatttttcttgttctgaatatccttgacattacagctgtcaaaaacaaaaactggtatttcagatctgttttctgaaatcttttaagctaaaatcacatgcaagaattgactttgcagctactaattttgacaccttttagatctgtataaaagtgtgttgtgttgaagcagcaaaccaatgagtgctgcattttggatatttagttttatctttagttcaacaccatcatggtggattcatttataccatctaatatatgacacactgttgtagtatgtataattttgtgatctttattttccctttgtattcattttaagcatctaaataaattgctgtattgtgcttaatgt

SEQ ID NO: 23419 - DNA, 5470 bp, Homo Sapiens
ccgcctctgtcgccactctctccccctgttccgcgtctgcgtcgccaccaccgccgggggtatccggggggtcgcttaccgggctggccccgcgccacagccgtagctttaacctccccgtcagcggccgccccaggaagaggcttctcggccgcggagccacttggggcctcagttctcgccctcttgccgtcgccgcgggtcctggagaagcggccgcggccagggaacggggcatcgcggttccaacgattaactgctgaagtactgatcgagttctgcatttcttcaatgaggaactacaggctgatcttctgccataatctcaaacagccataaatgacaaaagaatgcttgctcagtgagggtagctggtgcagaagccattttttaaacttaggtatttaagtactgaaagaaaagacagctttgatttctggctgcaaaaaagatatgaggaagagctcctccccttccttgagtaactgcaactccgttcttgctaacaaaatatttggaattccacttgatgagctgcagcagggaggacatccagacattgaggttccattcatagtccgccacgttgtggactatattgaggaacatggaggtctggagcaacaaggactttttcaagtcaatggaaatgctgagacagtggagtggcttcggcagagatacgacagcggagaagaggtggatttggttaaggaagcagatgttccctcagctattagccttcttagattttttcttcaagaacttcctgaacctgttatccctggcagtttacatattcacttgatgcagctttctcaagattataataatgaagatgaatttggaagaaagttgaggttcctcttgcaacagcttccacctgttaattatagtttgttaaagtttctgtgtagatttttagccaatgtagcatcacatcatgaagaaatttggtctgcaaattctttggctgctgtctttggtccagatgtcttccacatttacacagatgtggaagacatgaaagagcaagaaatagtgagcaggataatggctggacttctggaaaactactatgagttttttgagaatgaagaggaagatttttcatctaatgatttgagttcaattactgaacaggttaatgaactttctgaggaagaagaggaagatgaaaagctggaacatattgaagaacttccagaagagggtgcagaaaaatcaaatgacatgccagaggtggtacaattaaggatgactgaaaacatcctggaatcaaatagtgttacggcaacaagcacccatatatctcccatcagcatcctaccagcctctacagatattttagaaagaacaattagagcagctgtggaacagcacctttttgatcttcagagcagcatagatcatgatcttaagaatttacaacagcaaagtgtggtgtgtaataatgaagcagaaagtattcattgtgatggggaaggatctaataaccagattgatattgctgatgatattattaatgccagtgaaagtaacagagactgttcaaaacctgtggctagcactaatttagacaatgaagctatgcagcaagattgtgtatttgagaatgaagaaaatacccagtctgtaggtatattgttagagccatgcagtgaccgtggtgatagtgaagatggctgtcttgagagggaagaatatttgttatttgacagtgataaattgtcacacttgattctggattctagtagcaagatatgtgatttgaatgccaacactgaatcagaagtaccaggaggtcagagtgttggtgttcaaggggaagcagcgtgtgtcagtattccacatttagatctgaagaatgtttctgatggtgataaatgggaagagccatttcctgcttttaagtcttggcaggaggactctgagtctggagaagctcagctgtctccacaagctggaagaatgaatcatcaccccttggaagaggactgtcctccagtattatcacaccgcagtttagattttggtcaaagccagcgtttcctacatgatccagaaaagttggattcctcatctaaagcactgtcttttactagaattcgaagatcatcctttagttcaaaagatgaaaagagagaggacagaacaccttatcagctggtcaagaaacttcagaagaaaatcagacaatttgaggaacagtttgaaagggaaagaaatagcaagccctcctacagtgatattgctgccaatccaaaggtattaaaatggatgacagagcttacaaaactgcggaagcaaattaaagatgcaaaacacaaaaattctgatggagaatttgtacctcagacacgtccacgtagtaacacacttccaaaaagctttggctcttctctagaccatgaagatgaagagaatgaagatgaacccaaggtcattcagaaggagaaaaaaccatctaaagaagcaacccttgaacttattcttaaaagactgaaagaaaaacgtattgagaggtgtcttccagaagatatcaagaaaatgaccaaagatcatttggtagaagagaaagcttctcttcagaaaagtcttctttactatgaaagtcaacatggaaggccggtgaccaaggaagaaaggcacattgttaaacctctctatgatagatacaggcttgtaaaacaaatgctgacaagagctagcatcactcctgtccttggatctccatccaccaagcgaaggggtcagatgttacagccaatcatagaaggagaaactgcacatttttttgaagaaatcaaggaggaagaagaagatggtgttaatctgtcctctgagttaggtgatatgttgaaaactgcagtacaggtacagtcttcattagaaaactctgaatctgatgttgaagaaaatcaagaaaaactggctctggatctccgattgtcaagttctcgagcagcttctatgcctgaattattggaacaactttggaaagccagagctgaaaaaaagaaactacgcaaaacgttgcgggaatttgaagaagcattttatcaacaaaatggaaggaatgcccagaaagaggatcgtgttccagtgcttgaggagtacagagagtacaagaaaattaaagccaagcttaggcttcttgaagttcttataagcaaacaagattcttcaaaatccatataagatacgttccttgaaaattcatatcataaagtcagttgtattccttgaagctatcatcgtgtgtacttggctggtacttaaattcgttttgtcaggcactcagagaatctcattttgtacttggttgtggtgccactaaacaaaacaaatgatgggagagtaagtaggccctctcaagggagcgtaagtgatgttccatattaaccacagactgtcctctccacctttagcaaacatatggtttacttcattgttttgtactacagatacatccttttagcaaaagactggaattttatcctttcaacttcaagaactttggaaatgcaagctttttgttattaccaactttttgtttctcattactgaagaaaattggaggaaaatcttcatactgaattcttctgttgcctttttcttacagaatgactgaaaatttgaaagaaaagcctataaaagtgcacatacgcaactgtgttctctgttttcctagaaaaccaaaatcaaactgagatttcaagtcgtactatggaacacctttctgtttaattcccaaagtgacatcttctcacaggtagtatgttagtaaaattttgcaattcgctggtcacacagctcccggatgaagataacagttggtagaccaaaaggtgacctcgcttagtatattgaaaacacacaccacacatcacacacagaactgaatcataccacatgctgcctatgggacttcagttactgtttcctgagttactgtttatccgctggcaatggtgtgatttgtctggatcagatccgcgctattccccaacccacctccagataatgtgagaaaatagccatgtcagtatgtaggaactctgatggtgctcagatttgtgtgttcaatcaatgggcttaaatcagcaaaatattatgcctaaagtaaatctgttcttaacaagggctctaccactgcattttcacatgtaccttcagggggttatctttttttttttcccctcctattttaatcagcaaaatccataccaaaacaacgacaacaacgccctcttaagggaccaccctttggtcaatcataacatgctgtttaaagcagctgtttacaggatgtgtagtggtatgccccttgtcatatactcttagcatatctttttttcctttggctttgcatggcttttcttcaggtactgtctcggtatcattctgctaatcattgttacagaatggtgacttcatttgtgctaacagtacaacagcagatttgggtcaggcttaatctaagtgttaacttttttttctggtgcttttttggattgatgactgtctcactttgactatacccatgttttgcatgcaatgactcatgcatggttttcttaactagctaatattaacaatttattccatataaaaatggaattttgcaacatcctttaataaggtgagggaagcatgaacctcagacttctggcactattacatagtaagcacatgaagtagtttgataataaatagcagttctagtacttcacatttcacccgtgtgtgcaatgcctttttctggggggtggggggtgagggaaaacctggtagtgaatgtgtagttggggaataaagaaaagcactaaatcctgccctttttgtgtggtttccttttgatacaactaggttattcataatgtatacctagaaaagtgaaattgaaaataccaaaagatgtatcatttttatttgaatccatcatgcagtgtacatttcagataatttccttcagtctccagataggagtgtatccaaacatctaattttatgtgcactgtgtatcttatatgaatgttttattttttataccacatgcaaaaatgtccatatgcactatttaaatgttttaaataatatattccttctttataatgctaaatctatatgagtaccatatttttataagtcagtggtctgactggtttcattttagaattaacagctgcttcaatatgttattcaatgttaatgtttggctgtgagtagaatatgtaaaagtggcatggcagcacttatgctctgtgacagtattgtgtgtcatagttgagcagtagctggtagaattaggcagttggtgatagttttactttggtacaaataaaaactgtatatctatatacaaataatatatagatatatatgtccaccagtataatggcattgctgtgtctggcacttcattgtacagacttttataataaaagaacttgaaagttctaaaaaa

SEQ ID NO: 23420 - DNA, 2048 bp, Homo Sapiens
gggagtaggaggtgtgaccggagggcgaaattggggcttcctctgctctggtgacccagaaccgtcaactgaaatgaccctgtctgtgtagtactccggcaggatgggcctcggagcgtaaaggcggcaaaaacaaaaatattaaaaaaaaggagagagggacaaaaaaaagaaaacccgaaagtttcagctgcattgctgcggaacgttttttagccagaaggcgaaagaagaaatcggaagtgacgtcgcggccaaaacaagcccgggcttggaggcctgtactgaagctggcctcagatgggaaggcccgactcgctgtctgctgtcgtcggtggtcgcgagaccttgcactctcaccgggtcggcctccagcccctgtgcccgggatccgctcgccgcggatgagcgagagtttcttcctgggacttttcgggcacagctggccggtggcgacagaacggactttctttcctgcaagagtctcccctccagcgggagacagcgggctcctgtctcgggacgctgggacacctgtcgcctatttttaaatatccagattccaagaacacactggatactgctcttacaaaaccaagaggaaatcatgaagaaatgttttagttattgaaactacagttgaaatcatggatacatcaacaaatctggatattggagcccagcttatcgtggaagagtgtcccagcacttatagcctaactggcatgccagacattaaaatagaacatccactggacccaaattcagaagaagggtcagctcagggtgttgccatgggaatgaaattcatattgcctaaccgatttgatatgaatgtgtgttctcgatttgtgaagtccttaaatgaagaagatagtaaaaatattcaagatcaggttaactctgacctggaggtggcatctgtcctatttaaagctgaatgcaatatccatacatctccttctccgggaattcaagtaaggcatgtctacaccccctctacaacaaagcatttctcacccataaaacagtcaaccactttaaccaacaaacacagaggaaatgaggtctctaccacacctctgttagcaaattctttgtctgttcaccagttggctgctcagggagagatgctctatctggctactcgtatcgaacaagaaaatgttatcaatcacacggatgaagaaggatttactcctctgatgtgggctgcagcacacgggcaaatagctgtggtagagttcctacttcagaatggtgctgatccccaacttttaggaaaaggtcgagaaagtgcactgtcgttggcctgtagtaaaggctacacagatattgtcaaaatgctgcttgattgtggagttgatgtaaatgaatatgattggaatggaggaacacctctgctttatgctgtacatggaaatcatgtgaaatgtgtaaagatgctcttagaaagtggggctgatccaacaattgaaactgactctggatataattctatggatctagctgtagccctaggctatagaagtgttcaacaggttattgagtcacatttgttgaagctgcttcaaaatatcaaggagtagacacagtcatcagaaaatgtctgcccttttgtttacttcttggtccttataaatgatagttttgtttacttataaatttttacctcagttgcaatatttactggtttttagtaggttttaataaatatttctctgagtaattcactggtttataataaatgtaatactctttttataactatgttttactgtatatttaaaattataaattaatgttttcgtggcatgtaaatttttatggtacagatagttatcatcagtctttgtatcaagtgctgtaatttgacattttcagaaattattctaccctagtcatcttcactcgtgtattaagtcattcactttatatagggtttgctataaatccctagaaaaaaattgttcttattgttgaattaaaaagtgcacagtgtgattgtttacaaaatgatattataaataaataaaatacttcttctg

SEQ ID NO: 23421 - DNA, 2588 bp, Homo Sapiens
ggctgctgcactgacggcgggtgcccgcgcctcagagttactgatttattcttgagattcctctactctcgttatctgacctcatggatgaacttcaggatgttcagctcacagagatcaaaccacttctaaatgataaggaacatgatatagaaacaactcatggtgtggtccacgtcactataagaggcttacccaaaggaaacagaccagttatactaacatatcatgacattggcctcaaccataaatcctgtttcaatgcattctttaactttgaggatatgcaagagatcacccagcactttgctgtctgtcatgtggatgccccaggccagcaggaaggtgcaccctctttcccaacagggtatcagtaccccacaatggatgagctggctgaaatgctgccttctgttcttacccacctaagcctgaaaagcatcattggaattggagttggagctggagcttacatcctcagcagatttgcactcaaccatccagagcttgtggaaggccttgtgctcattaatgttgacccttgcgctaaaggctggattgactgggcagcttccaaactctctggcctgacaaccaatgttgtggacattattttggctcatcactttgggcaggaagagttacaggccaacctggacctgatccaaacctacagaatgcatattgcccaagacatcaaccaagacaacctgcagctcttcttgaattcctacaatggacgcagagacctggagatcgaaagacccatactgggccaaaatgataacaaatcaaaaacattaaagtgttctactttactggtggtaggggacaattcgcctgcagttgaggctgtggtcgaatgcaattcccgcctgaaccctataaatacaactttgctaaagatggcggactgtgggggactgccccaggtagttcagcctgggaagctcaccgaggccttcaagtactttttgcagggaatgggctacataccatctgccagcatgactcggctcgcccgatcacgaacccactcaacctcgagtagcctcggctctggagaaagtcccttcagccggtctgtcaccagcaatcagtcagatggaactcaagaatcctgtgagtcccctgatgtcctggacagacaccagaccatggaggtgtcctgctaagcagacgctcctcccctggaccattgcaagtccatccttcaaatgaccactccataatataacatttcatccagtaaactggcctctactatctttaactcatgcatggccactgaacctctctctagtagcctggatttatcattctctctgcctgcccacccccttttttgtatagcccaagaaccacttccatgccatactgtaacattccaacatctttagctgatcagatctctccatatcctctcttgccagctttttcccgtgctcccccaactatgtatcagataagattctttgatcccgactctgtgtgtgcgagcacgcgtgtctgtgtttgtgtgtgcatagttctgtggttttagacacgctttcttgtagtgcttctgcaaaaaacaaaaaagggacttattttgcattctcaatggtgtttttaagggaattaggcagaacagatttctaggttgggtaggccactgcattctcttttgtttgcaaattggtcaacaaaatttgcaaagtgatttcaggagagagcagctttgaggaatgtggaaaatcataattgccgtctggaccattgattgattgtgaccagtagcagaagggtgcctgttacatagagaggctccttctgtccaaatgaatttctgtatactcttctataaataaaagggaggaatatattctgctggaagcccatgaaccatcgctgaggttctgatacaacatagagttttttccaaggagtgaatgtggtttaattactggactctcttagcacaggaaggtggaaacaaaatgccaggcctctgctctgaagagcaaaactgctgtcgctgcagtatctgataccagacatccacatatccacaagaagtgcctcttaggtctgtgacagagagtgtgtctccattcctcagttcccagaaaggggagaggtttggcctaaaaagcatgtagatgggggagaaatgggtggggggagaggaacagccattaacacagtatcatgtttaacaagtatagccttgatttcagtagatgtaatggaagccaaattaaattgatacagaacccatttctcagagtcttttttttttttgagacagagtctcgctgttacccaggctggagtgcaatggcgcaaacttggctcactgcaacctctgccccctgggttcaagcgattctcctgcctcagcctcccgagtagctgagactacaggcacctgccaccatacccagcaccttgggaggctgaggtgggaggatcatttgaggccaggagtttgagacctgcctgggcaacataatgaaacttcctttccagggagaaaaaaaaaaaaaaaaaaaaagctctgagagcatcttattttgtttaaaggcaagaaataaaatttccttttg

SEQ ID NO: 23422 - DNA, 2981 bp, Homo Sapiens
ccccaaatctgcagatgtgaatcccaagtaccagtgtgatctggtgtctaaaaacgggaatgatgtatatcgctatcccagtccacttcatgctgtggctgtgcagagcccaatgtttctcctttgtctgacgggcaaccctctgagggaagaggacaggcttggaaaccatgccagtgacatttgcggtggatctgagctagatgccgtcaaaacagacagttccttaccgtccccaagcagtctgtggtctgcttcccatccttcatccagcaagaaaatggatggctacattctgagcctggtccagaaaaaaacacaccctgtaaggaccaacaaaccaagaaccagcgtgaacgctgaccccacgaaagggcttctgaggaacgggagcgtttgtgtcagagccccgggcggtgtctcacagggcaacagtgtgaaccttaagaattcgaaacaggcgtgtctgccctctggcgggataccttctctgaacaatgggacattctccccaccgaagcagtggtcgaaagaatcaaaggccgaacaagccgaaagcaagagggtgcccctgccagagggctgcccctcaggcgctgcctccgaccttcagagtaagcacctgccaaaaacggccaagccagcctcgcaagaacatgttcggtgttccgccattgggacaggggagtcccctaaggaaagcgctcagctctcaggggcctctccaaaagagagtcctagcagaggccctgccccgccgcaggagaacaaagttgtacagcccctgaaaaagatgtcacagaaaaacagcctgcagggcgtccccccggccactcctcccctgctgtctacagctttccccgtggaagagaggcctgccttggatttcaagagcgagggctcttcccaaagcctggaggaagcgcacctggtcaaggcccagtttatcccggggcagcagcccagtgtcaggctccaccggggccacaggaacatgggcgtcgtgaagaactccagcctgaagcaccgcggcccagccctccaggggctggagaacggcttgcccaccgtcagggagaaaacgcgggccgggagcaagaagtgtcgcttcccagatgacttggatacaaataagaaactcaagaaagcctcctccaaggggaggaagagtgggggcgggcccgaggctggtgttcccggcaggcccgcgggcgggggccacagggcggggagcagggcgcatggccacggacgggaggcggtggtggccaaacctaagcacaagcgaactgactaccggcggtggaagtcctcggccgagatttcctacgaagaggccctgaggagggcccggcgcggtcgccgggagaatgtggggctgtaccccgcgcctgtgcctctgccctacgccagcccctacgcctacgtggctagcgactccgagtactcggccgagtgcgagtccctgttccactccaccgtggtggacaccagtgaggacgagcagagcaattacaccaccaactgcttcggggacagcgagtcgagtgtgagcgagggcgagttcgtgggggagagcacaaccaccagcgactctgaagaaagcgggggcttaatttggtcccagtttgtccagactctgcccattcaaacggtaacggccccagaccttcacaaccaccccgcaaaaacctttgtcaaaattaaggcctcacataacctcaagaagaagatcctccgctttcggtctggctctttgaaactgatgacgacggtttgagtgacatcattggtgtagaaagtttgtgtgtttttttttcttctccctagttgccaaaattaaaaaggtggtgttttcatttttgtataatactttaatggaatgctttttaaaaaaatataaaaccaaggtaaattattgtttcatcttcacgtatggatgctagtgcctttaatggaaggtaaagaatgttttgctagttagaagtacatattgaggttttaatggtggtgatagtgagttttgtggcaccagctgttttttattttaaactttctgagcatccggcaaggtacaggttttgatgttcaagttttattgggataagatcttttgatcccaaggtcaggtggatggaatttttggatttatatttgttccttgagtcttcagggcagtgtctccatgagggttttcctgttgaggggcaccacatacaatagtgtgaagtaggtatgaggggcagtcattgtattctatagtttttttatgtagtctacatttctcagatgtatccccattcggttttattctcagaactgttactagactcatgacttggaggccaaaccttaaatccagagatagcagcctcgatagggaccttaaaaggattcacaaaaacttttgccacacttggtgcctaggccctgttcctaataaccccttctagggccgtttatccaacatttagatgccttcttttccctccctaatttgtagccagtccaacctttcattccttggaggatttagttttgggataaaattttggtccttgggcacagagacattcactattaatgaagtaacccttgggcatgactccaatcccagaattgctcactgagcgctatgccaccgaagcgttgacctgaacatattagtgcaatccagtccagattggacctttgatcctatgtggaagggctgttttttaagaaaaaatttttggtaaacagtattgtgtaaaattgctttttgtataccaatatatgcatgttttgtgcatgagtagtacttgtgttgatactcctgttgatgttaaattactatataatataaacagtatgtgtttttatatatcattgtgtaaatttaatataacatatgcagtaataaaccatttgttttactgctgttaagtttgttatttgggtataaaaccagatgtttacacctgtaaaaaaaaaaaaaaaaa

SEQ ID NO: 23423 - DNA, 676 bp, Homo Sapiens
cttcctggcctctcctttccctgcctccctcccaccccctctacaccccaggagcacacgctgatgctgtcccctccatctcttttcctcacccagaattcccctacaccccgtctcctcccgaacatgggcggcgcgccgggccggtgcccacggccatcattgggggcgtggcggggagcatcctgctggtgttgattgtggtcggcgggatcgtggtcgccctgcgtcggcgccggcacaccttcaagggtgactacagcaccaagaagcacgtgtatggcaacggctacagcaaggcaggcatcccccagcaccacccaccaatggcacagaacctgcagtaccccgacgactcagacgacgagaagaaggccggcccactgggtggaagcagctatgaggaggaggaggaggaggaggagggcggtggagggggcgagcgcaaggtgggcggcccccaccccaaatatgacgaggacgccaagcggccctacttcaccgtggatgaggccgaggcccgtcaggacggctacggggaccggactctgggctaccagtacgaccctgagcagctggacttggctgagaacatggtttctcagaacgacgggtctttcatttccaagaaggagtggtacgtgtagcccccttccagagcctctgtctgtgacca

SEQ ID NO: 23424 - DNA, 6361 bp, Homo Sapiens
  misc_feature (949)..(949): n is a, c, g, or t
gaattccgccgccgccggggcccccggcagcatggaccccctgcagaactcccacgaagggtaccccaacagccagtgcaaccattatccgggctacagccggcccggcgcgggcggcggcggcggcggcggcggcggaggaggaggaggcagcggaggaggaggaggaggaggaggagcaggagcaggaggagcaggagcgggagctgtggcggcggcggccgcggcggcggcggcagcagcaggaggcggcggcggcggcggctatgggggctcgtccgcggggtacggggtgctgagctccccccggcagcagggcggcggcatgatgatgggccccgggggcggcggggccgcgagcctcagcaaggcggccgccggctcggcggcggggggcttccagcgcttcgccggccagaaccagcacccgtcgggggccaccccgaccctcaatcagctgctcacctcgcccagccccatgatgcggagctacggcggcagctaccccgagtacagcagccccagcgcggcgccgccgccgccgtcgcagccccagtcccaggcggcggcggcgggggcggcggcgggcggccagcaggcggccgcgggcatgggcttgggcaaggacatgggcgcccagtacgccgctgccagcccggcctgggcggccgcgcaacaaaggagtcacccggcgatgagccccggcacccccggaccgaccatgggcagatcccagggcagcccaatggatccaatggtgatgaagagacctcagttgtatggcatgggcagtaaccctcattctcagcctcagcagagcagtccgtacccaggaggttcctatggccctccaggcccacagcggtatccaattggcatccagggtcggactcccggggccatggccggaatgcagtaccctcagcagcagatgccacctcagtatggncagcaaggtgtgagtggttactgccagcagggccaacagccatattacagccagcagccgcagcccccgcacctcccaccccaggcgcagtatctgccgtcccagtcccagcagaggtaccagccgcagcaggacatgtctcaggaaggctatggaactagatctcaacctcctctggcccccggaaaacctaaccatgaagacttgaacttaatacagcaagaaagaccatcaagtttaccagatctgtctggctccattgatgacctccccacgggaacggaagcaactttgagctcagcagtcagtgcatccgggtccacgagcagccaaggggatcagagcaacccggcgcagtcgcctttctccccacatgcgtcccctcatctctccagcatcccggggggcccatctccctctcctgttgggtctcctgtaggaagcaaccagtctcgatctggcccaatctctcctgcaagtatcccaggtagtcagatgcctccgcagccacccgggagccagtcagaatccagttcccatcccgccttgagccagtcaccaatgccacaggaaagaggttttatggcaggcacacaaagaaaccctcagatggctcagtatggacctcaacagacaggaccatccatgtcgcctcatccttctcctgggggccagatgcatgctggaatcagtagctttcagcagagtaactcaagtgggacttacggtccacagatgagccagtatggaccacaaggtaactactccagacccccagcgtatagtggggtgcccagtgcaagctacagcggccagggcccggtatgggtatcaagtgccaacaaccagatgcatggacaagggccaagccagccatgtggtgctgtgcccctgggacgaatgccatcagctgggatgcagaacagaccatttcctggaaatatgagcagcatgacccccagttctcctggcatgtctcagcagggagggccaggaatggggccgccaatgccaactgtgaaccgtaaggcacaggaggcagccgcagcagtgatgcaggctgctgcgaactcagcacaaagcaggcaaggcagtttccccggcatgaaccagagtggacttatggcttccagctctccctacagccagcccatgaacaacagctctagcctgatgaacacgcaggcgccgccctacagcatggcgcccgccatggtgaacagctcggcagcatctgtgggtcttgcagatatgatgtctcctggtgaatccaaactgcccctgcctctcaaagcagacggcaaagaagaaggcactccacagcccgagagcaagtcaaagaagtccagctcctccaccactactggggagaagatcacgaaggtgtacgagctggggaatgagccagagagaaagctctgggtcgaccgatacctcaccttcatggaagagagaggctctcctgtctcaagtctgcctgccgtgggcaagaagcccctggacctgttccgactctacgtctgcgtcaaagagatcgggggtttggcccaggttaataaaaacaagaagtggcgtgagctggcaaccaacctaaacgttggcacctcaagcagtgcagcgagctccctgaaaaagcagtatattcagtacctgtttgcctttgagtgcaagatcgaacgtggggaggagcccccgccggaagtcttcagcaccggggacaccaaaaagcagcccaagctccagccgccatctcctgctaactcgggatccttgcaaggcccacagaccccccagtcaactggcagcaattccatggcagaggttccaggtgacctgaagccacctaccccagcctccacccctcacggccagatgactccaatgcaaggtggaagaagcagtacaatcagtgtgcacgacccattctcagatgtgagtgattcatccttcccgaaacggaactccatgactccaaacgccccctaccagcagggcatgagcatgcccgatgtgatgggcaggatgccctatgagcccaacaaggacccctttgggggaatgagaaaagtgcctggaagcagcgagccctttatgacgcaaggacagatgcccaacagcagcatgcaggacatgtacaaccaaagtccctccggagcaatgtctaacctgggcatggggcagcgccagcagtttccctatggagccagttacgaccgaaggcatgaaccttatgggcagcagtatccaggccaaggcccttcctcgggacagccgccgtatggagggcaccagcccggcctgtacccacagcagccgaattacaaacgccatatggacggcatgtacgggcccccagccaagcgccacgagggcgacatgtacaacatgcagtacagcagccagcagcaggagatgtacaaccagtatggaggctcctactcgggcccggaccgcaggcccatccagggccagtacccgtatccctacagcagggagaggatgcagggcccggggcagatccagacacacggaatcccgcctcagatgatgggcggcccgctgcagtcgtcctccagtgaggggcctcagcagaatatgtgggcagcacgcaatgatatgccttatccctaccagaacaggcagggccctggcggccctacacaggcgcccccttacccaggcatgaaccgcacagacgatatgatggtacccgatcagaggataaatcatgagagccagtggccttctcacgtcagccagcgtcagccttatatgtcgtcctcagcctccatgcagcccatcacacgcccaccacagccgtcctaccagacgccaccgtcactgtcaaatcacatctccagggcgcccagcccagcgtccttccagcgctccctggagaaccgcatgtctccaagcaagtctccttttctgccgtctatgaagatgcagaaggtcatgcccacggtccccacatcccaggtcaccgggccaccaccccaaccacccccaatcagaagggagatcacctttcctcctggctcagtagaagcatcacaaccagtcttgaaacaaaggcgaaagattacctccaaagatatcgttactcctgaggcgtggcgtgtgatgatgtcccttaaatcaggtcttttggctgagagtacgtgggctttggacactattaatattcttctgtatgatgacagcactgttgctactttcaatctctcccagttgtctggatttctcgaacttttagtcgagtactttagaaaatgcctgattgacatttttggaattcttatggaatatgaagtgggagaccccagccaaaaagcacttgatcacaacgcagcaaggaaggatgacagccagtccttggcagacgattctgggaaagaggaggaagatgctgaatgtattgatgacgacgaggaagacgaggaggatgaggaggaagacagcgagaagacagaaagcgatgaaaagagcagcatcgctctgactgccccggacgccgctgcagacccaaaggagaagcccaagcaagccagtaagttcgacaagctgccaataaagatagtcaaaaagaacaacctgtttgttgttgaccgatctgacaagttggggcgtgtgcaggagttcaatagtggccttctgcactggcagctcggcgggggtgacaccaccgagcacattcagactcactttgagagcaagatggaaattcctcctcgcaggcgcccacctccccccttaagctccgcaggtagaaagaaagagcaagaaggcaaaggcgactctgaagagcagcaagagaaaagcatcatagcaaccatcgatgacgtcctctctgctcggccaggggcattgcctgaagacgcaaaccctgggccccagaccgaaagcagtaagtttccctttggtatccagcaagccaaaagtcaccggaacatcaagctgctggaggacgagcccaggagccgagacgagactcctctgtgtaccatcgcgcactggcaggactcgctggctaagcgatgcatctgtgtgtccaatattgtccgtagcttgtcattcgtgcctggcaatgatgccgaaatgtccaaacatccaggcctggtgctgatcctggggaagctgattcttcttcaccacgagcatccagagagaaagcgagcaccgcagacctatgagaaagaggaggatgaggacaagggggtggcctgcagcaaagatgagtggtggtgggactgcctcgaggtcttgagggataacacgttggtcacgttggccaacatttccgggcagctagacttgtctgcttacacggaaagcatctgcttgccaattttggatggcttgctgcactggatggtgtgcccgtctgcagaggcacaagatccctttccaactgtgggacccaactcggtcctgtcgcctcagagacttgtgctggagaccctctgtaaactcagtatccaggacaataatgtggacctgatcttggccactcctccatttagtcgtcaggagaaattctatgctacattagttaggtacgttggggatcgcaaaaacccagtctgtcgagaaatgtccatggcgcttttatcgaaccttgcccaaggggacgcactagcagcaagggccatagctgtgcagaaaggaagcattggaaacttgataagcttcctagaggatggggtcacgatggcccagtaccagcagagccagcacaacctcatgcacatgcagcccccgcccctggaaccacctagcgtagacatgatgtgcagggcggccaaggctttgctagccatggccagagtggacgaaaaccgctcggaattccttttgcacgagggccggttgctggatatctcgatatcagctgtcctgaactctctggttgcatctgtcatctgtgatgtactgtttcagattgggcagttatgacataagtgagaaggcaagcatgtgtgagtgaagattagagggtcacatataactggctgttttctgttcttgtttatccagcgtaggaagaaggaaaagaaaatctttgctcctctgccccattcactatttaccaattgggaattaaagaaataattaatttgaacagttatgaaattaatatttgctgtctgtgtgtataagtacatcctttggggtttttttttttctcttttttttaaccaaagttgctgtctagtgcattcaaaggtcactttttgttcttcacagatctttttaatgttctttcccatgttgtattgcatttttggggggaaggcaaattgactttaaaaggaaaaaagttgtgggcaaaaggatggctaaggtggcgaaaattttcaccacactgagttcaaaaaggtggaaaattatcccttttcccatggcgtttta

SEQ ID NO: 23425 - DNA, 2232 bp, Homo Sapiens
ccgcacaactgtaaccgctgccccggccgccgcccgctccttctcgggccggcgggcacagagcgcagcgcggcggggccggcggcatggctgtgtcctggaggagctggctcgccaacgaaggggttaaacacctctgcctgttcatctggctctccatgaatgtcctgcttttctggaaaaccttcttgctgtataaccaagggccagagtatcactacctccaccagatgttggggctaggattgtgtctaagcagagcctcagcatctgttcttaacctcaactgcagccttatccttttacccatgtgccgaacactcttggcttacctccgaggatcacagaaggttccaagcaggagaaccaggagattgttggataaaagcagaacattccatattacctgtggtgttactatctgtattttctcaggcgtgcatgtggctgcccatctggtgaatgccctcaacttctcagtgaattacagtgaagactttgttgaactgaatgcagcaagataccgagatgaggatcctagaaaacttctcttcacaactgttcctggcctgacaggggtctgcatggtggtggtgctattcctcatgatcacagcctctacatatgcaataagagtttctaactatgatatcttctggtatactcataacctcttctttgtcttctacatgctgctgacgttgcatgtttcaggagggctgctgaagtatcaaactaatttagatacccaccctcccggctgcatcagtcttaaccgaaccagctctcagaatatttccttaccagagtatttctcagaacattttcatgaacctttccctgaaggattttcaaaaccggcagagtttacccagcacaaatttgtgaagatttgtatggaagagcccagattccaagctaattttccacagacttggctttggatttctggacctttgtgcctgtactgtgccgaaagactttacaggtatatccggagcaataagccagtcaccatcatttcggtcataagtcatccctcagatgtcatggaaatccgaatggtcaaagaaaattttaaagcaagacctggtcagtatattactctacattgtcccagtgtatctgcattagaaaatcatccatttaccctcacaatgtgtccaactgaaaccaaagcaacatttggggttcatcttaaaatagtaggagactggacagaacgatttcgagatttactactgcctccatctagtcaagactccgaaattctgcccttcattcaatctagaaattatcccaagctgtatattgatggtccttttggaagtccatttgaggaatcactgaactatgaggtcagcctctgcgtggctggaggcattggagtaactccatttgcatcaatactcaacaccctgttggatgactggaaaccatacaagcttagaagactatactttatttgggtatgcagagatatccagtccttccgttggtttgcagatttactctgtatgttgcataacaagttttggcaagagaacagacctgactatgtcaacatccagctgtacctcagtcaaacagatgggatacagaagataattggagaaaaatatcatgcactgaattcaagactgtttataggacgtcctcggtggaaacttttgtttgatgaaatagcaaaatataacagaggaaaaacagttggtgttttctgttgtggacccaattcactatccaagactcttcataaactgagtaaccagaacaactcatatgggacaagatttgaatacaataaagagtctttcagctgaaaacttttgccatgaagcaggactctaaagaaggaatgagtgcaatttctaagactttgaaactcagcggaatcaatcagctgtgttatgccaaagaatagtaaggttttcttatttatgattatttgaaaatggaaatgtgagaatgtggcaacatgaccgtcacattacatgtttaatctggaaaccaaagagaccctgaagaatatttgatgtgatgattcattttcagttctcaaattaaaagaaaactgttagatgcacactgttgattttcatggtggattcaagaactccctagtgaggagctgaacttgctcaatctaaggctgattgtcgtgttcctctttaaattgtttttggttgaacaaatgcaagattgaacaaaattaaaaattcattgaagctg

SEQ ID NO: 23426 - DNA, 3512 bp, Homo Sapiens
ctccacataggcagtggctgtggtttctaccccgggtggccgggsgcagtgctgagctgggactgttgtttgcccagcctgggctgctagaaagcagcagttaaagttcgtttctggtcactgctccaggaagccaccttactctgagggtcaagaattgccgcttccttttagttactgtaagttcctcctctgcccctggtttgtttcccgcggcacttctggatacccccaggtcccagacccttccagactcaaaccatgaactttcggcagctgctgttgcacttgccacgttatcttggagcctcgggttccccgcgtcgcctgtggtggtccccgtccctcgacaccatctcctcggtgggctcttggcgtggtcggtcctccaagtccccggcccactggaatcaggtartgtcagaggcggagaaratcgtggggtaccccacgtccttcatgagccttcgctgcctgctgagcgacragctcagcaacatcgctatgcaggtgcggaagctggtgggcactcagcaccctctgcttaccacagccagggggcttgtacatgacagctggaatagcctccagttgaggggcttggtggtgctccttatctctaaagcagctgggcccagcagcgtgaacacttcatgtcagaactatgacatggtcagtgggatctactcatgtcaaagaagtttggcagagatcacggagctaattcatattgctctccttgtacatcgtgggatagtaaatttaaatgagttgcaatcatctgatggtccactgaaagacatgcaatttggaaataaaattgctatcctgagtggagactttcttctagcaaatgcctgcaatggactagctctgctacagaacaccaaggttgtggaacttttagcaagtgctcttatggacttggtacaaggagtatatcatgaaaattctacttcaaaggaaagttatatcacagatgatattggaatatcgacttggaaggagcagacttttctctcccatggtgccttactagcaaagagctgccaagctgcaatggaattagcaaagcatgatgctgaggttcagaatatggcatttcagtatgggaagcacatggccatgagtcataagataaattctgatgtccagccttttattaaagaaaagaccagtgactccatgacttttaatctaaactcagctcctgtagtcttacatcaggaatttcttggaagagatttgtggattaaacagatcggagaggctcaagaaaaaggaagattggactatgctaagttgcgagaaagaatcaaagctggcaaaggtgtgacttcagctattgacctgtgtcgttaccatggaaacaaggcactggaggccctggagagctttcctccctcggaggccagatctgctttagaaaacattgtgtttgctgtgaccagattttcatgacatcaaattaaaaagacactattgttagttagctgaaaatcctagggaatgaggttgattgggagcgctttcacgatgcgttaatgacttttaaaacatatgcatttttccttccttttatcacattgctaaatgagttctgctttctttttggaactgctacaaacaaaattagaagaaaaaaaggtcaagcagttttcacttgtcacgccagaagcacacttgaggctgcagtcgcagaaataattaatgagattcgctcctgtgacctcagcaaatggacaggaaataagtccttattgattggaccgagccagggatggcgccagggcggtggcctgtggtttttcctgctagaraggacaaagcaagttggaagctgcaggtgtcaaragaaatgctctcaataccaaccaggraggattgtctaatcaaaaactagtgaccaatttgtcataatggagagtagttcaatggattgagaaaaatatgttttatttgttggcttgtaattatgtctctggattattattattttttttttagatgtagttttgctcttgttgcccaggctggagtgcaatggtgcagttttgactcactgcaacctccgcctcctgggttcaagtgattctcctgcctcagcctcccgagtagctggaattacaggcacctgccaccacgcctggctaattttgtatttttagtagagatggggtttcactatgttggtcaggctagtctcgaactcctgacctcaggtgatccgcctgcctcggcctcccaaagtgctgggattagaggcttgagccactgcacctggcctcatgtctctggatttataatgcagtatgaatatactttgtgctttatggtttttataatgtctttttggagaaattgccgaaaagttgccaaatacttgaagtaggagattaaaatgttatcaaatgttaaattggttatattaggaatagtctgtttttctttcctgaagatcagtttttttattcaaacacatttcaaagaaccaaattttttttttctttaaggaaaaaggagctttttttcaagtgaaatgtattcatttgtaatactttggtttaaggcatactttaatttttacgagtttcagaaacagaatttttgtactagggaattcattggtgagagtgttcttttaacctcagaatgtcaaattttggtcttgaaccacagacatccaattacagaaagaatataagcaatctcacaggcctgcaatcggacactgtctctgtgtggttcataggagatgatttttgaggtttgcactcatgcaatttgagaacaccgttgacaagaaggctgagtttacataaatgatctagattgaaactcagctacctttcttcctcatgtggtgtaattacagccctatctggagacagcgaatacagcaaacagattttattacctagttcgctcaaacactacatgaagttattttagttaaagccctcccccaaaagttataaaaccatttttatcagggcccaacatgtggcatgcaatgaagagaaaatgtaaagctacagaggttaatgtattgtattataaaatattttaagtgtactcaaaatatcataattgtacagtttatgccaccataatttgaggcctatagatttagcttaagagaacactgttctgtttgaaatgctttctgtcactgaaattggcttaattagtaaccatggataagatgctttagatcagactaggttttaatcattaacttccacaaagaagtcatactttgcgttaggtgtgctggttggatgtgcaggaacttcagcaagcagtaggttttactaagcagatggtcgggcactgcagggcaccaggcaggatcctagggcgcctcttattctgcgttagcatctggtttgctgtatgaccttgcacaagtcacttccttctgagcctcaattttctcatctgtacaatgagattcaaaagttgacctgaaagtcaagtgtgaaaaaaaaaaagagattaaacaagataat

SEQ ID NO: 23427 - DNA, 1435 bp, Homo Sapiens
ggagcagataagaagaaagccagatcagtgggcacagtaccacactcagaaagcacctcttgtctcttcaactcttcctgtggcaacacagtcaccaacaccaccttctcctctgttcagtgtagactttcgtgcggatttctcagagagtgtgagtggtacaaaatttgaagaagatcatctttcccattattctccctggtcttgtggcaccataggctcctgtataaatgccattgattcagagcccaaagatgtcattgctaattcaaatgctgtgttaatggacctggacagtggtgatgttaagagaagagtacatttatttgaaacccagagaaggacaaaagaagaagatccaataattccctttagtgatggacccatcatctcaaaatggggtgcgatttccagatcttcccgtacaggttaccataccacagatcctgtccaggccactgcttcccaaggaagtgcgactaagcccatcagtgtatcagattatgtcccttatgtcaatgctgttgattcaaggtggagttcatatggcaacgaggccacatcatcagcacactatgttgaaagggacagattcattgttactgatttatctggtcatagaaagcattccagtactggggaccttttgagccttgaacttcagcaggccaagagcaactcattacttcttcagagagaggccaatgctttggccatgcaacagaagtggaattccctggatgaaggccgtcaccttaccttaaaccttttaagcaaggaaattgaactaagaaatggagagttacagagtgattatacagaagatgcaacagatactaaacctgatagggatatcgagttagagctttcagcacttgatactgatgaacctgatggacaaagtgaaccaattgaagagatcttggacatacagcttggtatcagttctcaaaatgatcagttgctaaatggaatggcagtggaaaatgggcatccagtacagcagcaccaaaaggagccaccaaagcagaagaaacagagtttaggtgaagaccatgtgattctggaggagcaaaaaacaattctgccggtaacttcttgctttagccagccactcccagtgtctattagcaatgcaagttgcctccccatcaccacatctgtcagtgctggcaacctcattctgaaaactcatgttatgtctgaagataaaaacgactttttaaaacctgttgcaaatgggaagatggttaacagctgaaaggaggttcatctttcaaatttgtgaccacaccatggaagcatttacactagctttttatatatataatatatattatataatgtatattttttttaaaaaaaagatattactgggggcatccatttcctgtggactctttgatacttcaagccctcttgcattagcattatg

SEQ ID NO: 23428 - DNA, 3431 bp, Homo Sapiens
gccgccactgtcctcttcggaggcgcgggcccgacggaaaccatgtttgtggctcgcagcatcgcggcggaccacaaggatctcatccacgatgtctctttcgacttccacgggcggcggatggcaacctgctccagcgatcagagcgttaaggtctgggataaaagtgaaagtggtgattggcattgtactgctagctggaagacacatagtggatctgtatggcgtgtgacatgggcccatcctgaatttgggcaggttttggcttcctgttcttttgaccgaacagctgctgtatgggaagaaatagtaggagaatcaaatgataaactgcgaggacagagccactgggttaaaaggacaactctggtggatagcagaacatctgttactgatgtgaagtttgctcccaagcacatgggtcttatgttagcaacctgttccgcagatggtatagtaagaatctatgaggcaccagatgttatgaatctcagccagtggtctttgcagcatgagatctcatgtaagctaagctgtagttgtatttcttggaacccttcaagctctcgtgctcattcccccatgatcgccgtaggaagtgatgacagtagccccaacgcaatggccaaggttcagatttttgaatataatgaaaacaccaggaaatatgcaaaagctgaaactcttatgacagtcactgatcctgttcatgatattgcattcgctccaaatttgggaagatctttccatatcctagcaatagcgaccaaagatgtgagaatttttacattaaagcctgtgaggaaagaactgacttcctctggtgggccaacaaagtttgaaatccatatagtggctcagttcgataatcataattctcaggtctggcgagtgagttggaatataacaggaacggtgctagcatcttcaggagatgatgggtgtgtaagattgtggaaagctaattatatggacaattggaagtgtactggtattttgaaaggtaatgggagcccagtcaatgggagttctcagcagggaacctcaaatccttccctaggttcaactattccaagtcttcagaattcattaaatggatcttctgctggcagaaagcacagctgagtacaagctaactggagtaactttgctgttttgctgcttgttgcatgcacacaggaatggaaagcgagctccttttccccttccccagcgccgtttgacctctcccaagatacaccagcagcctgcttactactaaacgcaatccaaaaggcctttaaaaatacagtgtatattttttgtactagtcagtttattgacactatttgaaacttttgaaatataaacggagaggctttctgttgagacattgtcaccaaaacaattttttgaaatgttcctgaaactaatttgggtttaaagattaaaagggttgttaccattcttatctgagtagttgggaggaggggaataccactttagttcatttggaaaatatagacatatttcttttgctttcttaaaacagcttaaaatgatgaacttttataattttaatttgaagattgaataaatattttttataaagattgttttgagtgctgatttgtttactttttgtagatttgctttatccatgatattcagtacaactctgtcatttctttgtaatatttaaaaaatattagtaaaggagtgaattaataaagtagtaatagtaaaatgaaaggaacttgactgtacagtttgtagccaggttaagcatttggtattgtttcatttacaatttgggactaagatggaaacactttttttataagtttttaattcatagtcactaaagagataaatgtttcttatatacatttgtgtatttttatggtgttatttattccatggcttagcttccttcaaatcaaaatttggacacacactattaagagaagccattaaaattttactaaaattgtgcatgtaaattaattgtcagcattccatgtctcaagattttcttaatttagttcgctgtttaaattaattcatgtcctgtaaagttctgaccttgataacaaagctataaatatttaagtttgctaatatgcgtaagtattatcggtaagttacaagatggaagaagaataacagtagggcacagtcattctgtgaatccttttacttatcaaaatttggtagctattctaaggcttttgcagaaaaataagtgttcaatgtttgtagttcttcaaaagcatgttgcagtagccagccatactatgtgtattcccagtatcatgtacgcactaaaaaaaatgtgtgcttgctgctgctgtgagtgaaccattgcttaagataaaaaacttaactagatctgtaaatgtacagaatagcatcagatgtttctgagagattagaaaatgttttgaatttataaaattaatgtttttctttgtaacatttatatatattttttaacattttaagtttaacagattgtattcctttcaagtttctatacttgcttaagcaatcttgatttgagtaagggtcttgatttgtgctattatgttctgttagttttggcatgaatatactaaagcttttttttttttttctagcatgtgttttctcctctttggttctctttgtatttactacttttctctttttcttgtgttttttttttcctgtttttgttttgtttggtgttttgttcctgtcttcattgtttcaggtatttctttacccctctggattccccacgggctggatcgagatggtccagttatgcccagctccttcctcctcctcctcctcctctggtagagcactcttgcgatgctgacactgccaacctccagtatcctcaccctcgcagacgatatctctctcggcctcttaatcccttacctgagaatgaagggatttaaaacactgatttaacattgaaaggccttattcaagtgcttgtaaatgctttcatttctggctgctttttgtttttcattttctttcagaagatttttctaacttagggtctgtcttgcatgtattacaaccagaatacagtgtttggaacctaaatctgtttgtgcgtctgcatcaaaggaacatttgcttcactgggtgataacctttgatgaaatgagatatgtccaagtaacgttaactgtgaagttacacacagtagctgacttcaaagtgcctgttctgtaaattttattttaaactgttaccatagtcttaagttgtttatgctttatcagactggctaatgtgaaagcataatattatgaagtttattctgccttatgagaccttaaaaaatggatttcattttacaggctaatgttgtaactgactagtatgtaaaataaatcattcctgtgtataaagcagccaaccataaaaaaaaaaaaaaaaaaaaaaaa

SEQ ID NO: 23429 - DNA, 5129 bp, Homo Sapiens
gcggccgcagtggggtggagggggcagggcgtggtgaggtaaggtgagtgccgtagtggggttccctggagccatggcctgctccattgtccagttctgctacttccaggacctccaggccgcccgggacttcctctttcctcacctgcgggaggagatcctcagcggcgccttgcggagggaccccagtaaatcaacagactgggaagatgatggttggggagcatgggaagaaaatgaaccacaagaacctgaagaagaaggaaatacttgcaaaacacaaaaaacttcctggctccaagattgtgttttatccttatctccaaccaatgatcttatggtgatagctcgagagcaaaaagctgtatttctagtgccaaaatggaaatatagtgataaaggaaaggaagaaatgcaatttgctgttggctggagtggttccttaaatgtcgaagaaggggaatgtgtaaccagtgctctatgtatcccactagcaagccaaaagaggagttccactgggcgtcctgactggacctgcattgtggtgggttttacttcaggttatgtacgcttctacactgagaatggtgtgctcttgcttgcacagcttttgaatgaggacccagtacttcaacttaaatgcagaacctatgaaataccacgacatcccggcgtgactgagcagaatgaagagttgagtatcttatatccagctgccattgtgactattgatggatttagcctttttcaatctcttcgtgcttgtcgaaatcaggtagcaaaagctgcagcatcaggcaatgagaacatacaaccaccaccattagcttataagaaatggggtctacaagatattgacactattattgatcatgctagtgttggtattatgactctgtccccctttgatcaaatgaagactgcctccaatataggtggatttaatgcagcaattaaaaatagtccacctgccatgtctcagtatatcactgtagggtccaatccatttactggcttcttctatgctttagagggaagcacacaaccattattatcccatgttgcactagcagttgcaagtaaactcacttctgctttatttaatgctgccagtggttggcttggttggaaaagtaagcacgaagaagaagctgtccaaaagcaaaagccgaaggttgagccagctaccccattagctgtaagatttggacttccagattctagacgccatggtgaaagcatatgtctgtctccatgtaacacactggcagcagtaacagatgatttcggcagagttattttattggatgtagctagaggaattgcaatacgcatgtggaaagggtaccgcgacgcacaaattggatggattcaaactgtagaggacctccatgaaagagtgccagaaaaggcagatttttccccctttggaaattctcagggtccaagtcgagtagctcaattccttgtgatctatgcgccaagaaggggaattttagaagtgtggagcacacagcagggacctagagtaggagctttcaatgtggggaagcactgcaggctgctgtatcctggctataaaataatgggtttaaataatgttaccagtcagagttggcagccacagacttatcagatctgtctggttgatccagtgtctggaagtgtgaaaacagtgaacgttcccttccatttagcactgagtgataagaagagtgaacgagccaaggatatgcacctagtgaagaaactagcagccttactgaaaacaaaatctcccaatcttgatttggttgaaacagaaataaaggaattaattcttgatattaaataccctgcaaccaaaaaacaagctttggaaagcattttggcaagtgaacgtttaccattttcttgccttagaaacatcactcagactttaatggacactttaaaaagtcaagaacttgagtctgttgatgaaggattgctacagttttgtgccaataaactaaaactgctgcaactctatgagtctgtcagtcaattaaattcccttgattttcatttagacacaccattctctgataatgacttggctctgttactaaggcttgatgaaaaagaactgcttaagctccaggcattactagagaaatataagcaagagaacaccaggacaaatgttcgattttctgatgataaagatggtgtgttgcctgtaaaaacattcttggaatatttagaatatgaaaaggatgtgctcaacataaagaaaataagtgaagaggaatatgtggctttaggtagtttctttttttggaagtgtttgcatggagaaagctccactgaggatatgtgtcacactttggagtcggctggtcttagccctcagctgttgttgtctctgctcctgagtgtttggctttcaaaggaaaaggatattttggataaaccacagtcaatctgctgtcttcataccatgctgtccctcctgagcaagatgaaagtggccatcgatgagacctgggattctcagtctgtgtccccatggtggcagcagatgcgcacagcctgtattcagtctgagaacaatggagccgctctgttgtctgcgcatgttgggcattctgttgctgcacagatatcaaacaacatgacagagaaaaaattttcccaaacagttttgggtgctgattcagaggccctcactgattcctgggaggcactttctcttgacactgagtactggaaactccttctgaaacagctggaggattgtctcatacttcagactctgcttcacagcaaagggaacactcagacctccaaagtgtcatcactgcaggctgagccacttccaaggctttctgttaaaaagttattagaaggaggaaaaggtggcattgcagacagtgtagccaagtggatatttaaacaggacttcagccctgaagtattaaaactggctaatgaagaaagagatgcagaaaacccagatgaacccaaagaaggtgttaacagaagtttccttgaggtatcagagatggagatggacttaggagccataccagacttactgcatttagcctatgagcagtttccttgtagccttgagctcgatgtcttgcatgcacattgctgctgggagtacgttgttcagtggaataaagatccagaggaagcacgtttttttgttaggtcaatagaacacttgaagcaaatatttaatgcacatgttcaaaatggcattgcactgatgatgtggaatacgttcttagttaaaagattttctgctgctacatacttaatggataaggttggaaaatcaccaaaagataggttatgccgaagggatgtgggaatgagtgacacagcaatgacatctttcctcggctcctgtttggatcttcttcagatcttaatggaggcagatgttagcagggatgaaatacaggtgcctgtgctggatactgaggatgcgtggctctccgtggaaggaccaatctccatagtggaactggcccttgaacagaagcacatccactacccactggtggagcaccactccatcctgtgctccatcttgtatgcagtcatgaggttttctctgaagaccgtgaagccactttcactttttgacagtaagggaaaaaatgcatttttcaaagacctaacttcaattcagttattacctagtggggaaatggatccaaattttatttctgtacgacaacagttcttattgaaagttgtcagtgcagctgtccaggcccaacattcagccacaaaggtcaaagatcccacagaagaggccacacccactccttttgggaaagaccaagattggccagctctagctgtggatttagcccatcaccttcaagttagtgaagatgttgttagaaggcattatgtgggggaactatacaactatggagttgaccacttaggagaagaggccattctacaggttcatgacaaagaggtccttgcctctcagctgctggtgctcacggggcaaaggctggctcatgcgcttctccacacccagacaaaagaaggaatggagctgcttgccagacttccacccacactgtgtacttggctgaaagcaatggacccccaggaccttcaaaacactgaagtgccaattgcaacaacagctaaactagtaaataaagtaattgagcttttaccagaaaaacatgggcaatatggtctagccttacacctcattgaagctgtggaagccatatctcttccttctttatgacacttacctactggaaatagtctaaaattatgattataacatgaagtagtgcatggttattttacatagtaagacctggaattttatgggaaaagtatgtctttttttttccttttgtaaaataaataaaagtatatacaacttttaaaaagtgcaaccctggctaaattccactcctttggttaatactgaagataaaatataaacaaatgtcaactctgttataattaatacagatgttttactgtttatttctaattcaaacacttaagtagctttattgttaaactttgctatttaaaattggttataatttagattatgttcttataagattctatatttcctatctaaaatgttgttgtaattcaatttaaatgtgttcatgtacagtccccatcagtagcgtatagaacaccccactctcctttagtaaatgttgagaaaatgcctttgttgtcatgctccaaatcccacactgggctgccacctgggagttctggataccgaaaggttcctttcccagaggttctgctgttgccatcagaggaggatgaccgtgcttgaggaggaagaatgggttcaagatcatcatattcatcagaaggggacactaaatagaacccttaacctgttgtacttgccaaaattgagaatcagagatgtgtaaaatgcagcaaattaattataatgtaagttaagatttgctttttgccaagttgcaaagttgtatccacatcaggtcactgtaaaaatgtattatcttgtaaaacttatgtaaaaaaaaaaaaaaaaaaaaggcaaagatactaaaaaaaaaaaaattttagtccgactttatttttcctacaagtgtttaggaaatgcttctggg

SEQ ID NO: 23430 - DNA, 1712 bp, Homo Sapiens
cccacagttttcgacgaaaaatggcggggtctcctgagttggtggtccttgaccctccatgggacaaggagctcgcggctggcacagagagccaggccttggtctccgccactccccgagaagactttcgggtgcgctgcacctcgaagcgggctgtgaccgaaatgctacaactgtgcggccgcttcgtgcaaaagctcggggacgctctgccggaggagattcgggagcccgctctgcgagatgcgcagtggacttttgaatcagctgtgcaagagaatatcagcattaatgggcaagcatggcaggaagcttcagataattgttttatggattctgacatcaaagtacttgaagatcagtttgatgaaatcatagtagatatagccacaaaacgtaagcagtatcccagaaagatcctggaatgtgtcatcaaaaccataaaagcaaaacaagaaattctgaagcagtaccaccctgttgtacatccactggacctaaaatatgaccctgatccagcccctcatatggaaaatttgaaatgcagaggggaaacagtagcaaaggagatcagtgaagccatgaagtccttgcctgcattaattgaacaaggagagggattttcccaagttctcaggatgcagcctgttatccacctccagaggattcaccaagaagtcttttccagttgtcataggaaaccagatgctaaacctgagaactttataacacagatagaaaccacaccaacagagactgcttccaggaaaacctctgacgtggtactgaaaagaaagcaaactaaagactgcccccagagaaaatggtatccattgcggccaaagaaaattaatcttgatacatgagctctttctgtttattttgggagttgaaaataggcaccatcaacatttagattacagcctaattaatacctagataagacttcatttgaaataagaaataactcttttactagtgattcatttatacagatatagtatctctgtgcggggatatgatataatattgtatttccttactgttttatctattgtaaataaaaagcattttaaaaagtattgacacaaagcccatcagtgggcattaaaaatattaaaagtgcagacttttactgtccttaagtgccatcaactctcagctcccttgtagcttttgtgggatttaacaagtaacaaattctgttgtgtttccctggtatacatctttctaggaaaaaaaaaaaaagagagagagctgtataatgatttttcgtttacatgctgaaaagtaattatcagtttctgcacagcagcagatgcagggtttttttttaaagatgtagtttgatttatcaaattaatgtgctgatgataatactggctttgactttgttactccatgttcagctaatttaggtttgtgagattaactttaggattttttgttgtgtaagacaatgataactattatttgtgcaacattactctttgaaataaaaattggcatgtagccaatgtttcctgcccacactcacttttttctatagaccattaacataatttgacttggaactaatggtttctttttagggtttcttatttatttctttacaaatcattccagttcaaaatatatatcagattaatacactgaaaaaaaagtgtcattgtggtttattggaacctattttcaccttggagggtggttta

SEQ ID NO: 23431 - DNA, 6816 bp, Homo Sapiens
cccggccccccgcgcccccgcgcgccgcggctcctgttgacccggtccgcccgtcggtctgcagcgcggctgaggaaacttggctgtaacttcaaaagaagatttgattctttatttctggactgcatatatatatataacaaggccattaaaatgtcgggagcctcagtgaaggtggctgtccgggtaaggcccttcaattctcgagagaccagcaaggaatccaaatgcatcattcagatgcaaggcaactcgaccagtattattaacccaaagaatccaaaggaagctccaaagtccttcagcttcgactattcctactggtctcatacctcacccgaagatccctgttttgcatctcagaaccgtgtgtacaatgacattggcaaggaaatgctcttacacgcctttgagggatataatgtctgtatttttgcctatgggcagactggtgctggaaaatcttatacaatgatgggtaaacaagaagaaagccaggctggcatcattccacagttatgtgaagaactttttgagacaaatcatgacaactgtaatgaagaaatgtcctactctgtagaggtgagctacatggaaatttactgtgaaagagtacgagatttgctgaatccaaaaaacaagggtaatttgcgtgtgcgtgatcacccacttcgtggaccctatgtggaggatctttccaagttggcagttacttcctacacagacattgctgacctcatggatgctgggaacaaagccaggacagtggcagctacaaacatgaatgaaacaagtagccgttcccacgttgtgtatacgattgtcttcacccagaagaaacacgataatgagaccatccttgccactgtgaaggttagtaaaaccagcttggtggatctagcaggaagtgaccgagctgcttcaactggtgccaaagggactcgcttaaaggaaggagcaatcatcaataagtctcttacaactttgggcaaagtcatttcagccttggccgaggtgagtaaaaagaagaagaaaacagattttattccctacagggattctgtacttacttggctccttcgagaaaatttaggtggcaattctcggactgcaatggttgctgctctgagccccgcggatatcaactacgatgagactttgagcactctgagatatgcagatcgtgcaaaacaaattaaatgcaatgctgttatcaatgaggaccccaatgccaaactggttcgtgaattaaaggaggaggtgacacggctgaaggaccttcttcgtgctcagggcctgggagatattattgatacatccatggggtccctcacttcatccccatcttcctgctcactcagtagtcaggtgggcttgacgtctgtgaccagtattcaagagaggatcatgtctacacctggaggagaggaagctattgaacgtttaaaggaatcagagaagatcattgctgagttgaatgaaacttgggaagagaagcttcgtaaaacagaggccatcagaatggagagagaggctttgttggctgagatgggagttgccattcgggaagatggaggaaccctaggggttttctcacctaaaaagaccccacatcttgttaacctcaatgaagacccactaatgtctgagtgcctactttattacatcaaagatggaattacaagggttggccaagcagatgctgagcggcgccaggacatagtgctgagcggggctcacattaaagaagagcattgtatcttccggagtgagagaagcaacagcggggaagttatcgtgaccttagagccctgtgagcgctcagaaacctacgtaaatggcaagagggtgtcccagcctgttcagctgcgctcaggaaaccgtatcatcatgggtaaaaaccatgttttccgctttaaccacccggaacaagcacgagctgagcgagagaagactccttctgctgagaccccctctgagcctgtggactggacatttgcccagagggagcttctggaaaaacaaggaattgatatgaaacaagagatggagaaaaggctacaggaaatggagatcttatacaaaaaggagaaggaagaagcagatcttcttttggagcagcagagactggactatgagagtaaattgcaggccttgcagaagcaggttgaaacccgatctctggctgcagaaacaactgaagaggaggaagaagaggaagaagttccttggacacagcatgaatttgagttggcccaatgggccttccggaaatggaagtctcatcagtttacttcattacgggacttactctggggcaatgccgtgtacctaaaggaggccaatgccatcagtgtggaactgaaaaagaaggtgcagtttcagtttgttctgctgactgacacactgtactcccctttgcctcctgaattacttcccactgagatggaaaaaactcatgaggacaggcctttccctcgcacagtggtagcagtagaagtccaggatttgaagaatggagcaacacactattggtctttggagaaactcaagcagaggctggatttgatgcgagagatgtatgatagggcaggggagatggcctccagtgcccaagacgaaagcgaaaccactgtgactggcagcgatcccttctatgatcggttccactggttcaaacttgtggggagctcccccattttccacggctgtgtgaacgagcgccttgccgaccgcacaccctcccccactttttccacggccgattccgacatcactgagctggctgacgagcagcaagatgagatggaggattttgatgatgaggcattcgtggatgacgccggctctgacgcagggacggaggagggatcagatctcttcagtgacgggcatgacccgttttacgaccgatccccttggttcattttagtgggaagggcatttgtttacctgagcaatctgctgtatcccgtgcccctgatccacagggtggccatcgtcagtgagaaaggtgaagtgcggggatttctgcgtgtggctgtacaggccatcgcagcggatgaagaagctcctgattatggctctggaattcgacagtcaggaacagctaaaatatcttttgataatgaatactttaatcagagtgacttttcgtctgttgcaatgactcgttctggtctgtccttggaggagttgaggattgtggaaggacagggtcagagttctgaggtcatcactcctccagaagaaatcagtcgaattaatgacttggatttgaagtcaagcactttgctggatggtaagatggtaatggaagggttttctgaagagattggcaaccacctgaaactgggcagtgccttcactttccgagtaacagtgttgcaggccagtggaatcctcccagagtatgcagatatcttctgtcagttcaactttttgcatcgccatgatgaagcattctccacggagcccctcaaaaacaatggcagaggaagtcccctggccttttatcatgtgcagaatattgcagtggagatcactgaatcatttgtggattacatcaaaaccaagcctattgtatttgaagtctttgggcattatcagcagcacccacttcatctgcaaggacaggagcttaacagtccgcctcagccgtgccgccgattcttccctccacccatgccactgtccaagccagttccagccaccaagttaaacacgatgagcaaaaccagccttggccagagcatgagcaagtatgacctcctggtttggtttgagatcagtgaactggagcctacaggagagtatatcccagctgtggttgaccacacagcaggcttgccttgccaggggacatttttgcttcatcagggcatccagcgaaggatcacagtgaccattatccatgagaaggggagcgagctccattggaaagatgttcgtgaactggtggtaggtcgtattcggaataagcctgaggtggatgaagctgcagttgatgccatcctctccctaaatattatttctgccaagtacctgaagtcttcccacaactctagcaggaccttctaccgctttgaggctgtgtgggatagctctctgcataactcccttcttctgaaccgagtgacaccctatggagaaaagatctacatgaccttgtcggcctacctagagctggatcattgcatccagccggctgtcatcaccaaggatgtgtgcatggtcttctactcccgagatgccaagatctcaccaccacgctctctgcgtagcctctttggcagcggctactcaaagtcaccagattcgaatcgagtcactggcatttacgaactcagcttatgcaaaatgtcagacacaggtagtccaggtatgcagagaaggagaagaaaaatcttagatacgtcagtggcatatgtgcggggagaagagaacttagcaggctggcggccccgtggagacagcctcatccttgagcaccagtgggagctggagaagctggagctcctacatgaggtggaaaaaacccgccactttttgctgctgcgtgagagacttggtgacagcatccccaaatccctgagcgactcgttatcccccagcctcagcagtgggaccctcagcacctccaccagtatctcctctcagatctcaaccactacctttgaaagcgccatcacacctagcgagagcagtggctatgattcaggagacatcgaaagcctggtggaccgagagaaagagctggctaccaagtgcctgcaacttctcacccacactttcaacagagaattcagccaggtgcacggcagcgtcagtgactgtaagttgtctgatatctctccaattggacgggatccctctgagtccagtttcagcagtgccaccctcactccctcctccacctgtccctctctggtagactctaggagcaactctctggatcagaagaccccagaagccaattcccgggcctctagtccctgcccagaatttgaacagtttcagattgtcccagctgtggaaacaccatatttggcccgagcaggaaaaaacgaatttctcaatcttgttccagatattgaagaaattagaccaagctcagtggtctctaagaaaggataccttcatttcaaggagcctctttacagtaactgggctaaacattttgttgtcgtccgtcggccttatgtcttcatctataacagtgacaaagaccctgtggagcgtggaatcattaacctgtccacagcacaggtggagtacagtgaggaccagcaggccatggtgaagacaccaaacacctttgctgtctgcacaaagcaccgtggggtccttttgcaggccctcaatgacaaagacatgaacgactggttgtatgccttcaacccacttctagctggcacaatacggtcaaagctttcccgcagatgcccgagccagtcgaaatactaagtgactctgccgagtgccctcactcgccttcgagagataaagaaagcgttacctctcatttctctttgtgattcttgacggtgactcttgtatgtaatcctgtggcttaactacttctccctccttgtccagcacttttctagctctcccgttccccatctccattgctctgtactcttttcttttttcttgtgctgagaatctcgttagtagcatgtggcctaacaaaaggaaaaaatgtttttaaacacacacacacacacacacacacacacacacatacacagacaaaaacacaaaaactctgaggggatctggtgaatctccaaattattgtgggtgtactttggcttccttttgtatgataggtccccatcatgaccacctctgatgtctgtgctgctgtcaccaggcacctttgtttttcaagacaacatactttttttttcttttctctgtttgtgatatcactttaatttttcttgggtggcttagagactaagggaggagacatctggcctttttagaacctgagaggaaaaaaagagtctttttttcccctctgtctctttttgccatggctaatccctgcatttccattcagggaaaaggtggtagtgagcatagaactgcaacagttatattctgagtcaaagttggggctttttacggcataattatggaatttttatttactggtagagaggagacgagaggctttttcagtgggcctgggacagtggctgctcttgactttgtgtgaagggaaatgccaaggatgcttctggtggacttcaggggaccccagggtttggccgtgggccgtgatggcagcaggcggtgggatgcttgtagctcctcacagcaggattcctgcccactgttttttctctgttgggagggaagctcttttctaggagtgtctcagttctgcttttggcattagtgatggtggtggtacagttggaattagtgccatgtcatacacaaatgttccacaaggcgggagtgtttcactttctggtgataaacttgatggtcattgttatgattaagataatgccgggcaggccgggcacagtggctcacgcctgtaatccaagcacttggggaggccgaggcgggcagatcacgagatcaggagttcaagaccagcctggccaatgtgatgaaaccccgtctctactaaaaatacaaaattagtcgggtatggtggcacatgcctgtaattccagctgcttgggagcctgaggcaggagaactgcttgaacccaggaggcagaggttgcagtgagccaagatcgcgctattgcactccagcctgggtgacagagcaagactctgcctcag

SEQ ID NO: 23432 - DNA, 9926 bp, Homo Sapiens
cgcctcccctcagtttgccccctttagccttccacctttcccttctcctctctcgcatttccgccagtcagcttacccgctggccgcctcctgacaagcgggagggatccgccgtggacccagggaagcggaggagcctggcggccaccccctcttccccacttccctgcactctcatcgctctcggcctcggcctcggcctccgacacgagaaagatgctggtttcgagttttggagatccttgttttttatggaacacagttctgtaaaattttcataagattccttggcaataacatacgcttgtgatggaccctagaaatactgctatgttaggattgggttctgattccgaaggtttttcaagaaagagtccttctgccatcagtactggcacattggtcagtaagagagaagtagagctagaaaaaaacacaaaggaggaagaggaccttcgcaaacggaatcgagaaagaaacatcgaagctgggaaagatgatggtttgactgatgcacagcaacagttttcagtgaaagaaacaaacttttcagagggaaatttaaaattgaaaattggcctccaggctaagagaactaaaaaacctccaaagaacttggagaactatgtatgtcgacctgccataaaaacaactattaagcacccaaggaaagcacttaaaagtggaaagatgacggatgaaaagaatgaacactgtccttcaaaacgagacccttcaaagttgtacaagaaagcagatgatgttgcagccattgaatgccagtctgaagaagtcatccgtcttcattcacagggagaaaacaatcctttgtctaagaagctgtctccagtacactcagaaatggcagattatattaatgcaacgccatctactcttcttggtagccgggatcctgatttaaaggacagagcattacttaatggaggaactagtgtaacagaaaagttggcacagctgattgctacctgtcctccttccaagtcttccaagacaaaaccgaagaagttaggaactggcactacagcaggattggttagcaaggatttgatcaggaaagcaggtgttggctctgtagctggaataatacataaggacttaataaaaaagccaaccatcagcacagcagttggattggtaactaaagatcctgggaaaaagccagtgtttaatgcagcagtaggattggtcaataaggactctgtgaaaaaactgggaactggcactacagcggtattcattaataaaaacttaggcaaaaagccaggaactatcactacagtaggactgctaagcaaagattcaggaaagaagctaggaattggtattgttccaggtttagtgcataaagagtctggcaagaagttaggacttggcactgtggttggactggttaataaagatttgggaaagaaattgggttctactgttggcctagtggccaaggactgtgcaaagaagattgtagcaagttcagcaatgggattggttaataaggacattggaaagaaactaatgagttgtcctttggcaggtctgatcagtaaagatgccataaaccttaaagccgaagcactgctccccactcaggaaccgcttaaggcttcttgtagtacaaacatcaataatcaggaaagtcaggaactttctgaatccctgaaagatagtgccaccagcaaaacttttgaaaagaatgttgtacggcagaataaagaaagcatattggaaaagttctcagtacgaaaagaaatcattaatttggagaaagaaatgtttaatgaaggaacatgcattcagcaagacagtttctcatccagtgaaaagggatcttatgaaacctcaaagcatgaaaagcagcctcctgtatattgcacttctccggactttaaaatgggaggtgcttctgatgtatctaccgctaaatccccattcagtgcagtaggagaaagcaatctcccttccccatcacctactgtatctgttaatcctttaaccagaagtccccctgaaacttcttcacagttggctcctaatccattacttttaagttctactacagaactaatcgaagaaatttctgaatctgttggaaagaaccagtttacttctgaaagtacccacttgaacgttggtcataggtcagttggtcatagtataagtattgaatgtaaagggattgataaagaggtaaatgattcaaaaactacccatatagatattccaagaataagctcttcccttggaaaaaagccaagtttgacttctgaatccagcattcatactattactccttcagttgttaacttcactagtttatttagtaataagccttttttaaaactgggtgcagtatctgcatcagacaaacactgccaagttgctgaaagcctaagtactagtttgcagtccaaaccattaaaaaaaagaaaaggaagaaaacctcggtggactaaagtggtggcaagaagcacatgccggtctccaaaagggctagaattagaaagatcagagctttttaaaaacgtttcatgtagctcactatcaaatagtaattctgagccagccaagtttatgaaaaacattggacccccttcatttgtagatcatgacttccttaaacgccgattgccaaagttgagcaaatccacagctccatctcttgctctcttagctgatagtgaaaaaccatctcataagtcttttgctactcacaaactatcctccagtatgtgtgtctctagtgaccttttgtctgatatttataagcccaaaagaggaaggcctaaatctaaggagatgcctcaactggaagggccacctaaaaggactttaaaaatccctgcttctaaagtgttttctttacagtctaaggaagaacaagaacccccaattttacagccagaaattgaaatcccttccttcaaacaaggtctgtctgtgtctccttttccaaaaaagagaggcaggcctaagaggcaaatgaggtcaccagtcaagatgaagccacctgtactgtcagtggctccatttgttgccactgaaagtccaagcaagctagaatctgaaagtgacaaccatagaagtagcagtgatttctttgagagcgaggatcaacttcaggatccagatgacctagatgacagtcataggccaagtgtctgtagtatgagtgaccttgagatggaaccagataaaaaaattaccaagagaaacaatggacaattaatgaaaacaattatccgcaaaataaataaaatgaagactttaaagagaaagaaactgttgaatcagattctttcaagttctgtagaatcaagtaataaagggaaagtgcaatccaaactccataatacggtatcaagtcttgctgccacatttggctctaaattgggccaacagataaatgtcagcaagaaaggaaccatttatataggaaagagaagaggtcgcaaaccaaaaactgtcttaaatggtattctttctggtagtcctactagccttgctgttcttgagcaaacagctcaacaggcagctgggtcagcattaggacagattcttcccccattactgccttcatctgctagtagttctgagattcttccatcacctatttgctctcagtcttctgggactagtggaggtcagagccctgtaagtagtgatgcaggttttgttgaacccagttcagtgccatatttgcatttacactccagacagggcagtatgattcagactcttgcaatgaagaaggcctcaaaggggaggaggcggttatctcctcctactttgttgccaaattctccttcgcacttgagtgaactcacatctctaaaagaagctactccttccccaatcagtgagtctcatagtgatgagaccattcccagtgatagtggaattggaacagataataacagcacatcagacagggcagagaaattttgtgggcaaaaaaagaggaggcattcttttgagcatgtttctctgattccccctgaaacctctacagtgctaagcagtcttaaagaaaaacataaacacaaatgtaagcgcaggaatcatgattacctcagctatgacaagatgaaaaggcagaaacgaaaacggaaaaagaaatatccccagcttcgaaatagacaggatccagactttattgcagagctggaggaactaataagtcgcctaagtgaaattcggatcactcatcgaagtcatcattttatcccccgagatcttctgccaactatctttcgaatcaactttaatagtttctatacacatccttctttccccttagaccctttgcactacattcgaaaacctgacttaaaaaagaaaagagggagaccccctaagatgagggaggcaatggctgaaatgccttttatgcacagccttagttttcctctttctagtactggattctatccatcttatggtatgccttactctccttcaccccttacagctgctcccataggattaggttactatggaaggtatcctcccactctttatccacctcctccatctccttctttcaccacgccacttccacctccttcctatatgcatgctggtcatttacttctcaatcctgccaaataccataagaaaaagcataagctacttcgacaggaggcctttcttacaaccagcaggactcccctcctttccatgagtacctaccccagtgttcctcctgagatggcctatggttggatggttgagcacaaacacaggcaccgtcacaaacacagagaacaccgttcttctgaacaaccccaggtttctatggacactggctcttcccgatctgtcctggaatctttgaagcgctatagatttggaaaggatgctgttggagagcgatataagcataaggaaaagcaccgttgtcacatgtcctgccctcatctctctccttcaaaaagcttaataaacagagaggaacagtgggtccaccgagagccttcagaatctagtccattggccttgggattgcagacacctttacagattgactgttcagaaagttctccaagcttatcccttggaggattcactcccaactctgagccagccagcagtgatgaacatacaaaccttttcacaagtgcaataggcagctgcagagtttcaaaccctaactccagtggccggaagaaattaactgacagccctggactcttttctgcacaggacacttcactaaatcggcttcacagaaaggagtcactgccttctaacgaaagggcagtacagactttggcaggctcccagccaacctctgataaaccctcccagcggccatcagagagcacaaattgtagccctacccggaaaaggtcttcatctgagagtacttcttcaacagtaaacggagttccctctcgaagtccaagattagttgcttctggggatgactctgtggatagtctgctgcagcggatggtacaaaatgaggaccaagagcccatggagaaaagtattgatgctgtgattgcaactgcctctgcaccaccttcttccagtccaggccgtagccacagcaaggaccgaaccctgggaaaaccagacagccttttagtgcctgcagtcgcaagtgactcttgcaataatagcatctcactcctatctgaaaagttgacaagcagctgttccccccatcatatcaagagaagtgtagtggaagctatgcaacgccaagctcggaaaatgtgcaattacgacaaaatcttggccacaaagaaaaacctagaccatgtcaataaaatcttaaaagccaaaaaacttcaaaggcaggccaggacagggaataactttgtgaaacgtaggccaggtcgacctcggaaatgtccccttcaggctgtcgtatcaatgcaagcattccaggctgctcagtttgtcaacccagaattgaacagagacgaggaaggagcagcactgcacctcagtcctgacacagttacagatgtaattgaggctgttgttcagagtgtaaatctgaacccagaacataaaaaggggttgaagagaaaaggttggctattggaagaacagaccagaaaaaagcagaagccattaccagaggaagaagagcaagagaataataaaagctttaatgaagcaccagttgagattcccagtccttctgaaaccccagctaaaccttctgaacctgaaagtaccttgcagcctgtgctttctctcatcccaagggaaaagaagcccccacgtcccccaaagaagaagtatcagaaagcagggctgtattctgacgtttacaaaactacagacccaaagagtcgattgatccaattaaagaaagagaagctggagtatactccaggagagcatgaatatggattatttccagcgcccattcatgttgtgttttttgtttcaggaaagtatctaagacaaaagagaattgacttccagcttccttatgatatcctttggcagtggaaacacaatcagctatacaaaaagccagatgtcccactatataagaaaattcgttcaaatgtctacgttgatgtcaaacccctttctggttacgaagctaccacctgtaactgtaagaagccagatgatgacaccaggaagggctgtgttgatgactgcctcaatagaatgatctttgctgagtgttcccccaacacttgcccatgtggcgagcaatgctgtaaccagaggatacagaggcatgaatgggtgcaatgtctagaacgatttcgagctgaggaaaaaggttggggaatcagaaccaaagagcccctaaaagctgggcagttcatcattgaatacctaggggaggtcgtcagtgaacaggagttcaggaacaggatgattgagcagtatcataatcacagtgaccactactgcctgaacctggatagtgggatggtgattgacagttaccgcatgggaaatgaggcccgattcatcaaccatagctgtgacccaaattgtgaaatgcagaaatggtctgttaatggagtataccggattggactctatgctcttaaagacatgccagctgggactgaactcacttatgattataactttcattccttcaatgtggaaaaacagcaactttgtaagtgtggctttgagaaatgtcgaggaatcatcggaggcaagagtcagcgtgtgaatggactcaccagcagcaaaaacagccagcccatggccacacacaaaaaatctggacggtcaaaagagaagagaaagtctaagcacaagctgaagaaaaggagaggccatctctctgaggaacccagtgaaaatatcaacaccccaactagattgaccccccaattacagatgaagccaatgtccaatcgtgaaaggaactttgtgttaaagcatcatgtattcttggtccgaaactgggagaagattcgtcaaaaacaggaggaagtaaagcacaccagtgataatattcactcagcatcattatatacccgttggaatgggatctgccgagatgatgggaatatcaagtctgatgtcttcatgacccagttctctgccctgcagacagctcgatctgttcgaacaagacggttggcagctgcagaggaaaatattgaagtggctcgggcagcccgcctagcccagatcttcaaagaaatttgtgatggtatcatctcttataaagattcttcccggcaagcactggcagctccacttttgaaccttcccccaaagaaaaagaatgctgattattatgagaagatctctgatcccctagatcttatcaccatagagaagcagatcctcactggttactataagacagtggaagcttttgatgctgacatgctcaaagtctttcggaatgctgagaagtactatgggcgtaaatccccagttgggagagatgtttgtcgtctacgaaaggcctattacaatgcccggcatgaggcatcagcccagattgatgagattgtgggagagacagcaagtgaggcagacagcagtgagacctcagtctctgaaaaggagaatgggcatgagaaggacgacgatgttattcgctgtatctgtggcctctacaacgatgaaggtctcatgatccagtgtgacaagtgcatggtatggcagcactgtgattgtatgggagtgaactcagatgtggagcactacctttgtgagcagtgtgacccaaggcctgtggacagggaggttcccatgatccctcggccccactatgcccaacctggctgtgtctacttcatctgtttgctccgagatgacttgctgcttcgtcagggtgactgtgtgtatctgatgagggatagtcggcgcacccctgatggccacccggtccgtcagtcctatcgactgttatctcacattaaccgacataaacttgacatctttcgcattgagaagctttggaagaatgaaaaagaggaacggtttgcctttggtcaccattatttccgtccccacgaaacacaccactctccatcccgtcggttctatcataatgaactatttcgggtgccactctatgagatcattcccttggaggctgtagtggggacctgctgtgtgttggacctttatacgtattgtaaagggagacccaaaggagtaaaggagcaagatgtgtacatctgtgattatcggcttgacaagtcagcacacctgttttacaagatccaccggaaccgctatcctgtctgcaccaaaccctatgcttttgatcacttccccaagaagctcactcccaaaaaagatttctcgcctcattacgtcccagacaactacaagaggaatggaggacgatcatcctggaagtctgagcgctcaaagccacccctaaaagacttgggccaggaggatgatgctctacccttgattgaagaggttctagccagtcaagagcaagcagccaatgagatacccagcctggaggagccagaacgggaaggggccactgctaacgtcagtgagggtgaaaaaaaaacagaggaaagtagtcaagaaccccagtcaacctgtacccctgaggaacgacggcataaccaacgggaacgactcaaccagatcttgctcaatctccttgaaaaaatccctggaaaaaatgccattgatgtgacctacttgctggaggaaggatcaggcaggaaactgcgaaggcgtactttgtttatcccagaaaacagctttcgaaagtgaccctcaaagaatgagaacctcaagcatctgggatccagtggagctaatcagtcctgcctcctgctctctgggtatagacaggggtgggaagggtccatctgggcaaggggaatggggccatgttgttgacattaggtacttaataagccttggagctagtggagagggagaggaaagggttctgtccaagacagttcaggttaattaattttcttctccattgcttcaccttaagggttaataatgtagagaggagggaggaccacattgatgaccagaacctactggtactttatagcatttgccccaccccacagcttaggtttttctgtcatcctcagatcccacaggcattgcgaagaagctgcttcctatacccaggtataactcaaaatccaaagggatagggccaggatccctattcctaccccatctattctctgttggctccaagagctaccccagagaccttaaacagaaacagtagctgaggcttcttcctagatacctgactagggaagtttgtctctcctttcttgcccaaccaggtcaaagtaaaatgtgagttgacagctcaaagcacttgtaactgctgccccctccctacctctactccccaaaatggaatcatgggatagggaaggcccccatggggtcagaagggcacggtagttcttgcaattatttttgttttacccttcataacc

SEQ ID NO: 23433 - DNA, 1949 bp, Homo Sapiens
ggaaggcaaaggtagagcaactggatctctggctctccacatagcttctgatctcagaccttactaaaatgctttctgggcccaaggacaaagctcacatgaacaaatgattttgagtcatgaatgaaaaatcttgctctttccatagtaaagaagaattaagagatggacagggtgaaagattgtctgctggatattctccatcatatgacaaggacaagagtgttctggctttcagaggaatccctatctcagagttgaagaaccatggcattctccaggctctgaccacagaagcttatgaatgggagccacgtgttgtgagtacagaggtggtcagagcccaagaagaatgggaagctgtggacaccatccagccagagacagggagccaagctagctcagagcagcctgggcagctaatctccttcggtgaggccctgcagcacttccagactgtggacctttcccccttcaagaaaagaatccagccaactattcgaaggactgggctcgccgccctccgacactacctcttcgggcctccaaagctccaccagcgccttcgggaagaaagggacttggtcctgaccattgctcagtgagcgaatccagccacagacctgagaggcgcaggcttccttgccctcctgcatctgctctacctggtgatggactcaaagaccttgccgatggcgcaggagattttccgcctgtctcgtcaccacatccagcaattccctttctgtttgatgtccgtgaacatcacccacattgccatccaggccttgagagaggagtgtctctccagagagtgtaatcggcagcagaaggtcatccccgtggtgaacagcttctatgccgccacattcctccacctcgcacatgtctggaggacacagcggaagaccatctcagactcgggctttgtcctcaaagagttggaagtattggccaagaagagcccacggcggctgctcaagaccctggagctgtacttggccagggtgtcaaagggacaggcctccttgttgggagcacagaagtgctatgggccagaagcccctcccttcaaggatctcaccttcacaggtgagagtgacctgcagtctcactcatccgaaggcgtatggctgatctgacctccgagatgaatggaggcttaaaggctgagctgcaggggctttcagggggtcagtggagccatgtcaggagcctggccaggccgcaccccttgctgtctcagcagatgggatataggaagctcctgggcttagctgtgggaagccaagtaccctcaccggcatgggacatgaggggcagctagacttcacccccttcccgcagacctgcctccagagcaaggagaattctgccttaatctgttgggctccagtctccgggttgaattccagtgtatcccactgggagtgaatggatcatgaggtgggatggccccatctggatgttctgcagatccccacatgggaggagattcccaagtagaggcagccagaattctgactccctggcagcagcagggctttcaggcaccagtgtctgtgttgttagaactcagaggaagaggcaggggcagcagccgacagggggcagcatgacccaagcaaggggcctgaggcctcagtgggggtagggcaaggaggtacctcacaggtgggtgtgaggccccctctggagtttctggccattcacttacccactctcttctccccctgacccccgctccattgtttatgatggaaaaacggacatttggctaggtgtctctcacggctgctccatcctagcccccacaagctggggcttcctcctgtagatgctgtgcatgccccatgatgagtttctggcctaattgagggaaggaggaaattcataccagcagttttcaaataaaagaattgttctaattaaaaaaaaaaaaaaaaaaa

SEQ ID NO: 23434 - DNA, 2417 bp, Homo Sapiens
gtttctggcgcgaacttccgccgttccgaagttgcacggtgaattggcgctatgtctggggacagcagcggccgcgggccagagggccggggccggggccgcgacccgcatcgggatcgcacccgctcccgctcccgctcgcggtcccctttgtcgcccaggtcccgccgcggctctgcgcgggagcgcagagaggccccagagcgcccgagcctggaggacacagagccgtcggattccggggacgagatgatggacccggccagcttggaggcggaggccgaccaaggcctgtgccgccagatccgccatcagtaccgggcgctcatcaactccgtccaacgtaaggcggcgcctccgggcggcgcgggcccggacgggccgctgtccccgccctgcgccgggcgcggggggagggcaccggaggcaggtgccgggcggaggcccggcgcggcgttagtagagacgcgccgggtgccagcccctcgccgcaccttaaattgttgacaaagtgctcccactttgtggctggagccgtacgaccttggcgcgggtccccgagtggcgggctggaaaagctggaggccagagccgttcgcggactcgcccgagcccagccagccagtggggagaggcaggacgcggactccgcgtgctttgattgcgcccggcagtcctcggcgtgggctcccggcctcgcagcggcacgctgagctgcagcggcacgcgagagctgtcaaatgcacgttctcggaccccacccggacccgcggaattcgaatctctgggtgggtccgcgcaactgtggagtggccctccaggtgatggtgtgtattgcttgcaaagtttgagaaccactcagttatggagcactcagaggctgcagccggagtccagccctttgggttaaggttagagggagctagggtttccttttaaaattcatgctgcataaagggtagggtggcctttctccttttccgggtcattttggttaaaaagataaagatgttcgaagtaattactcagagcgcaggggccggggcttggctttactgttgcaggtgataaccttgtcaactgcttattagtgaatgctgaacaaatttcccaaagtttgtatttttaaaaatagaaaaccgtgagacatactgaatgccggtgacaaattaacagaggtccttgaagaggctaacactctgtttaatgaagtgtcccgagcaagagaagcagtcctggatgcccactttcttgttttggcttcagatttgggcaaagagaaagcaaagcagctgcgctcagacctgagctcctttgacatgttaagatatgttgaaactctactcacacatatgggtgtaaatccgctagaagctgaagaactcatccgtgatgaagatagtcctgattttgaattcatagtctatgactcctggaagataacaggcagaacagcagaaaacacctttaataaaacccatacattccactttctgttgggttcaatatacggagagtgccctgtgccaaagccacgagttgatcgtccaagaaaagttcctgtgatacaagaggagagggcaatgcctgcccagttaagaagaatggaagaatctcatcaagaagcaacagagaaagaagtagaaagaatcttgggattgttgcagacatattttcgagaagatcgagacagtctcactctttcgcccagactggaatgcagtggcaccatctcaactcactgcaacctccacctcctggattcaagcaattctcctgcctcagcctcctgagtagctgggattacaggcgcacgcgccaccacatctggctaattttttttctgtatttttagtagagacattgtttcgccatgttggccaagctagtcttgaacccctgacctcaggtgatctgccagcatcggcctcccaaagtgctgggattacaggtctgataccccaatgtccttctttgactttgtggttgatcctcattctttcccccgtacagtggaaaacatctttcatgtttccttcattatacgggatggttttgcaagaataagacttgaccaagaccgactgccagtaatagagcctgttagtattaatgaagaaaatgagggatttgaacataacacacaagttagaaatcaaggaattatagctttgagttaccgtgactgggaggagattgtgaagacctttgagatttcagagcctgtgattactccaagtcagaggcagcagaagccaagtgcttgatgctagctgaaggactcaaatggatagtgaagtccaaaacggaaagcggcatgtattgtacatattgtatgattcaacatttttaaaggcagattgtttttagtaaaatgtagcttttgatagttaaaaaaaaaaaaaaaaaaaaaaaaa

SEQ ID NO: 23435 - DNA, 1797 bp, Homo Sapiens
aatcaaaatttataaaacttctattttggtgttcaaagatcgggataaatatgtaagtggagaattcaggtaagttcagatttttccctccagttggtttaatttctatttcctaaaacattaaaataataatggaatgattgaaataataaacatttttcttattcaagatttcgtcatggctattgtaaaggaaaccctaggaaaatggtgaaaacttgggcagaaaaagaaatgaggaacttaatcaggctaaacacagcagagataccatgtccagaaccaataatgctaagaagtcatgttcttgtcatgagtttcatcggtaaagatgacatgcctgcaccactcttgaaaaatgtccagttatcagaatccaaggctcgggagttgtacctgcaggtcattcagtacatgagaagaatgtatcaggatgccagacttgtccatgcagatctcagtgaatttaacatgctgtaccacggtggaggcgtgtatatcattgacgtgtctcagtccgtggagcacgaccacccacatgccttggagttcttgagaaaggattgcgccaacgtcaatgatttctttatgaggcacagtgttgctgtcatgactgtgcgggagctctttgaatttgtcacagatccatccattacacatgagaacatggatgcttatctctcaaaggccatggaaatagcatctcaaaggaccaaggaagaacggtctagccaagatcatgtggatgaagaggtgtttaagcgagcatatattcctagaaccttgaatgaagtgaaaaattatgagagggatatggacataattatgaaattgaaggaagaggacatggccatgaatgcccaacaagataatattctataccagactgttacaggattgaagaaagatttgtcaggagttcagaaggtccctgcactcctagaaaatcaagtggaggaaaggacttgttctgattcagaagatattggaagctctgagtgctctgacacagactctgaagagcagggagaccatgcccgccccaagaaacacaccacggaccctgacattgataaaaaagaaagaaaaaagatggtcaaggaagcccagagagagaaaagaaaaaacaaaattcctaaacatgtgaaaaaaagaaaggagaagacagccaagacgaaaaaaggcaaatagaatgagaaccatattatgtacagtcattttcctcagttccttttctcgcctgaactcttaagctgcatctggaagatggcttattggttttaaccagattgtcatcgtggcactgtctgtgaagacggattcaaatgttttcatgtaactatgtaaaaagctctaagctctagagtctagatccagtcactgactctgtctggtgttgacagaggatttatttaagctattattttaataaagaactttgtacatttttatttttatatttttttctcttacaaatatgtttttggaagcatgataaatgtttaaatgtagtcaacatctgtaactcttacatgagtgtccagaggcactcatgggaaaattggttttgctttctttgtacacaccagagacccatctgaggtcatctgattataaggccatgtttatataaagggaatttcacccacaagttcagctggctgttgattttcactgcaactctgcctttgtgtgtattggcgatcatttgtaatgctcttacacttcgtctttaatgttctttttggagttaggacctctcagttcataaagttttttacaattcaaaaaaaaaaa

SEQ ID NO: 23436 - DNA, 5123 bp, Homo Sapiens
  misc_feature (3811)..(3811): n is a, c, g, or t
gagtcggccttgttggcctactcgcattgagtcggccttgttggcctactggagtcgcctttctccccacatgcatcccctcatctctccagcatcccggggggcccatctccctctcctgttggctctcctgtaggaagcaaccagtctcgatctggcccaatctctcctgcaagtatcccaggtagtcagatgcctccgcagccacccgggagccagtcagaatccagttcccatcccgctttgagccagtcaccaatgccacaggaaagaggttttatggcaggcacacaaagaaaccctcagatggctcagtatggacctcaacagacaggaccatccatgtcgcctcatccttctcctgggggccagatgcatgctggaatcagtagctttcagcagagtaactcaagtgggacttacggtccacagatgagccagtatggaccacaaggtaactactccagacccccagcgtatagtggggtgcccagtgcaagctacagcggcccagggcccggtatgggtatcagtgccaacaaccagatgcatggacaagggccaagccagccatgtggtgctgtgcccctgggacgaatgccatcagctggcatgcagaacagaccatttcctggaaatatgagcagcatgacccccagttctcctggcatgtctcagcagggagggccaggaatggggccgccaatgccaactgtgaaccgtaaggcacaggaggcagccgcagcagtgatgcaggctgctgcgaactcagcacaaagcaggcaaggcagtttccccggcatgaaccagagtggacttatggcttccagctctccctacagccagcccatgaacaacagctctagcctgatgaacacgcaggcgccgccctacagcatggcgcccgccatggtgaacagctcggcagcatctgtgggtcttgcagatatgatgtctcctggtgaatccaaactgcccctgcctctcaaagcagacggcaaagaagaaggcactccacagcccgagagcaagtcaaagaagtccagctcctccaccactactggggagaagatcacgaaggtgtacgagctggggaatgagccagagagaaagctctgggtcgaccgatacctcaccttcatggaagagagaggctctcctgtctcaagtctgcctgccgtgggcaagaagcccctggacctgttccgactctacgtctgcgtcaaagagatcgggggtttggcccaggttaataaaaacaagaagtggcgtgagctggcaaccaacctaaacgttggcacctcaagcagtgcagcgagctccctgaaaaagcagtatattcagtacctgtttgcctttgagtgcaagatcgaacgtggggaggagcccccgccggaagtcttcagcaccggggacaccaaaaagcagcccaagctccagccgccatctcctgctaactcgggatccttgcaaggcccacagaccccccagtcaactggcagcaattccatggcagaggttccaggtgacctgaagccacctatcccagcctccacccctcacggccagatgactccaatgcaaggtggaagaagcagtacaatcagtgtgcacgacccattctcagatgtgagtgattcatccttcccgaaacggaactccatgactccaaacgccccctaccagcagggcatgagcatgcccgatgtgatgggcaggatgccctatgagcccaacaaggacccctttgggggaatgagaaaagtgcctggaagcagcgagccctttatgacgcaaggacagatgcccaacagcagcatgcaggacatgtacaaccaaagtccctccggagcaatgtctaacctgggcatggggcagcgccagcagtttccctatggagccagttacgaccgaaggcatgaaccttatgggcagcagtatccaggccaaggccctccctcgggacagccgccgtatggagggcaccagcccggcctgtacccacagcagccgaattacaaacgccatatggacgggatgtacgggcccccagccaagcgccacgagggcgacatgtacaacatgcagtacagcagccagcagcaggagatgtacaaccagtatggaggctcctactcgggcccggaccgcaggcccatccagggccagtacccgtatccctacagcagggagaggatgcagggcccggggcagatccagacacacggaatcccgcctcagatgatgggcggcccgctgcagtcgtcctccagtgaggggcctcagcagaatatgtgggcagcacgcaatgatatgccttatccctaccagaacaggcagggccctggcggccctacacaggcgcccccttacccaggcatgaaccgcacagacgatatgatggtacccgatcagaggataaatcatgagagccagtggccttctcacgtcagccagcgtcagccttatatgtcgtcctcagcctccatgcagcccatcacacgcccaccacagccgtcctaccagacgccaccgtcactgccaaatcacatctccagggcgcccagcccagcgtccttccagcgctccctggagaaccgcatgtctccaagcaagtctccttttctgccgtctatgaagatgcagaaggtcatgcccacggtccccacatcccaggtcaccgggccaccaccccaaccacccccaatcagaagggagatcacctttcctcctggctcagtagaagcatcacaaccagtcttgaaacaaaggcgaaagattacctccaaagatatcgttactcctgaggcgtggcgtgtgatgatgtcccttaaatcaggtcttttggctgagagtacgtgggctttggacactattaatattcttctgtatgatgacagcactgttgctactttcaatctctcccagttgtctggatttctcgaacttttagtcgagtactttagaaaatgcctgattgacatttttggaattcttatggaatatgaagtgggagaccccagccaaaaagcacttgatcacaacgcagcaaggaaggatgacagccagtccttggcagacgattctgggaaagaggaggaagatgctgaatgtattgatgacgacgaggaagacgaggaggatgaggaggaagacagcgagaagacagaaagcgatgaaaagagcagcatcgctctgactgccccggacgccgctgcagacccaaaggagaagcccaagcaagccagtaagttcgacaagctgccaataaagatagtcaaaaagaacaacctgtttgttgttgaccgatctgacaagttggggcgtgtgcaggagttcaatagtggccttctgcactggcagctcggcgggggtgacaccaccgagcacattcagactcactttgagagcaagatggaaattcctcctcgcaggcgcccacctccccccttaagctccgcaggtagaaagaaagagcaagaaggcaaaggcgactctgaagagcagcaagagaaaagcatcatagcaaccatcgatgacgtcctctctgctcggccaggggcattgcctgaagacgcaaaccctgggccccagaccgaaagcagtaagtttccctttggtatccagcaagccaaaagtcaccggaacatcaagctgctggaggacgagcccaggagccgagacgagactcctctgtgtaccatcgcgcactggcaggactcgctggctaagcgatgcatctgtgtgtccaatattgtccgtagcttgtcattcgtgcctggcaatgatgccgaaatgtccaaacatccangcctggtgctgatcctggggaagctgattcttcttcaccacgagcatccagagagaaagcgagcaccgcagacctatgagaaagaggaggatgaggacaagggggtggcctgcagcaaagatgagtggtggtgggactgcctcgaggtcttgagggataacacgttggtcacgttggccaacatttccgggcagctagacttgtctgcttacacggaaagcatctgcttgccaattttggatggcttgctgcactggatggtgtgcccgtctgcagaggcacaagatccctttccaactgtgggacccaactcggtcctgtcgcctcagagacttgtgctggagaccctctgtaaactcagtatccaggacaataatgtggacctgatcttggccactcctccatttagtcgtcaggagaaattctatgctacattagttaggtacgttggggatcgcaaaaacccagtctgtcgagaaatgtccatggcgcttttatcgaaccttgcccaaggggacgcactagcagcaagggccatagctgtgcagaaaggaagcattggaaacttgataagcttcctagaggatggggtcacgatggcccagtaccagcagagccagcacaacctcatgcacatgcagcccccgcccctggaaccacctagcgtagacatgatgtgcagggcggccaaggctttgctagccatggccagagtgaacgaaaaccgctcggaattccttttgcacgagggccggttgctggatatctcgatatcagctgtcctgaactctctggttgcatctgtcatctgtgatgtactgtttcagattgggcagttatgacataagtgagaaggcaagcatgtgtgagtgaagattagagggtcacatataactggctgttttctgttcttgtttatccagcgtaggaagaaggaaaagaaaatctttgctcctctgccccattcactatttaccaattgggaattaaagaaataattaatttgaacagttatgaaattaatatttgctgtctgtgtgtataagtacatcctttggggttttttttttctcttttttttaaccaaagttgctgtctagtgcattcaaaggtcactttttgttcttcacagatctttttaatgttctttcccatgttgtattgcatttttgggggaagcaaattgactttaaagaaaaaagttgtggcaaaagatgctaagatgcgaaaatttcaccacactgagtcaaaaaggtgaaaaattatccatttcctatgcgttttactcctcagagaatgaaaaaaactgcat

SEQ ID NO: 23437 - DNA, 162354 bp, Homo Sapiens
tttcctagaaccctcagagggagcatggcccttctgataccttgatttcagacttccagcttcctgagccatgagataataaatttctgttattttaagccatccagtttgtagtaatttgttatggcagcccttgtaacttgatacacccactttacattgtttaagttggctgttggttatgtttatcatttagctcatttgaacagaatcatgataaaccacgtatagacctgattgagactaatttgtatcatccagatatcctagatttagagttagatgcaattgttatatttgagctgggaagagttaaatttgtgtttatacatgaaacagatgtattttggcaaagctgggggggtatgaatgaaaaaaaggcatgttggtgtatcaagaacacaaggaatagatgtaactgggaattattattttctgtttagaacagagatgccccattagctttctgggattccttattctgtgaagtttggtgagtacacaagaaaccttgtctatttgctccatctcaatcataagcccctcctgtccccattagtaaccattttccttattttttaaatgccaattacttcctgcatttttaaagaatttcattattcaaactcgtatccctagacactatggtttaattttatcctcgcctatttttaaataattgatatgtctttttaagtctcctaatctataggtactcctttcatccctttcttttccttagaattttatattgaagaaccaagatcatttgatctgtagagtttcctgcagtctggattttgctgatttggtgttcttggagtagttcaatatgttcttctgtccatggcatttcctgccaattggcagctggatacaaagattggaccagattcaggtgttacccctttggtagccctatgggaggtgtttgacacgtaatgtcagattgtgtctcgttttatgatggcagcagtcagcgatactgattttactcattgttttgaaatggtgatattctaattctatcatttttaatgtattagttggaatacttctataaagagacacattctaatatttggttatccagtggtacagttcatattgaaaagatacaataaatccttgattctttctctttacttactaattctttagattgttaaatgcttccctattattctccaaagatggctcgttttaaaaatattattatgaatttatagatatttgatgggttttagtttactgtaattgttattattattgaagctcaagttgaccaatttttggccagcaagagactcttcaagctggcttctaacttcttttgacatgaacccagtagtttttcataccctccttgctctcttctatgacaacatgtttcaggcttaacttacacattttctgctttagagctggaatcagtaatttttccatgaagttctaggttccttttagtgataaattttatttcaagatcacaatctgggttctagagatactctttgctactaagttagtcattgtagcccttctctgtggaaagagctagtaaagagagagaaagtcaaattcaaaactattatagttttaggaatttagattaacttctttcttctacacctcaaatcctggttgtcaagatgacaggggatgataaaattagactatcccctgattactcatttgtcttacttcctattatatgcatagcagcagattactaatgctaatattaccaccaatatgaatattgaaagtctgttaaaatttgtatatgctttcctctcattttatttttattatatctacattgtcagatcatatggttaatatacattacactctctccttgttcctcatttagtttttgttctataagagttgtctatatagttaacactcacctccttattccaatatctctccagtaactttggttgtctgaagctcattctctatagattcctcataaagggctgatgggaccaatatttcttgagttctcgtatgttgataaaagtttgtctgtgtcctttacacttgaaagtcacttcaaataaaatccttggctcacagtatctttcctaaatatcttgtttgtccatttttttctgacctaaagggattactatgtcagatgataatataattttctttctaagttatatacactttaaaaaatctaaatacccaaaggatttttccccccattcttcaaagtccagtaattttactagattatgctttggtgttgatttttctgagttgatagtgtcaggtatgtagagcaatctttcaatatctagttttaaatctttttttaattcaagaaatacttctttaattatagctcttagtatttgtttttttcctttggtttggttttcttcttcagggattcctatcatccttgtgtttcatctttttagtctattttcaatacttgttactttctctagactgtatcttttttaaatattcttcttctgttttgccttgtattggtcttagccattatcagttttttgctcttttattcttttactttagtcttcattttgttaatattgttttcttcatttctaattttttcctaagttctctcaactcacttcttagtttttctaattctgatttgtgtgatcctttacatatattatcttgttaatgccttttagcttgttctaaaataatagcctatagttttgttttgtggacacatttttctgatgctctttcactatctgtagtgatgttatgctgctccttttttctctttttttgttatgacaacttttatggaatttgatcttgataatttgctgttgctcattttcatgtggtattagttttcctgaacttttataataatgcaaggttcagaaaatcttgcccaacttagctccatctttctttgtttttattttatttatttatttatttatttaatttttttgagacggagttttgctcttgttgttcgggctggagtataatggtgtgattttggctcactgcaatctctgcctcctgggttcaaacgattctcctgtctcagccttttgagtagctgggattacaggcatgcaccaccacgcctggctaattttgtattttgagtagagacagggtttcaccgcgttggtcaggctggtcttgaactcctgacctcaggttatcctcccgcctcggcctcccaaagtgttcggattacaggcgtgagccaccacacctggcctccttgtttttataaagtgctaaaaataaaaataaataaaaaatacagcagtacttttgagatttcctgatactgctcccctctctggctgttgaacatttgaagcatggccagtgtgactgagaagccaaattttaaattttaattaattttaactaattaaaacttaaataaaattaattaaaattgaaataaccacgtgcagttagtggctaccaaattggatggtgcccttctagacttatttccattgcctctactgccccatcctgctcaactttgatttctctctaagcaacttctgattgtggaaacttgtcctagaagagagtcctggagggtcagctttgacatagcacaagggctagatggcttcattccctccctttgatcctttttacttttccagctgctattataaaattggcctgaaacgctttacaataaataactggaggagagcattctagttcttccatccatcagacaccattccattattttcttccctcctcaaaacataatcttttatgcatatatgtcttgtggctttcggtggtttgccctcacctcttgtgttctggggtttatgaagggtaccttattaccaagttttattgtaaagtttatccctgggcatttggttttgctaattagtggatctggtttttgtttgtttgtttatttcttaatgtagatttttgtagagattgaaaattacacagacactcctctgtccccctaaaatgcttgaaataatgtatttttaaataaggtttttccatttaaaatagtcatactaatcatggaatatttttaaaaggaggaaagaaatccccatggacccaccaatcaaaggcaaactgcgggtgacattttagtgtatttccctcatgttctttttctattcatggtatttttgtatagctgtgagcatactgtatatacaattccatattatattctgttcttataacattataattgttttccattacaaacattcctaagtatcattgatcagtaactatgctaaatctgtcatgtggctcatccattatttacttagtcaatccccaatttttggtcaattaaaaaagttatgggatattagtttgctctaagctacattggcacctattttctttaaaaaatatccctagagaacaacctgtaatcttatacaacctgctaatgaggaataatagctgtgtcaggctcacaaaggagttcctatgacaggtgttaataaatgattaacatctctaaagaggcctcctgggaccacattaataattgatgagacaggtgtatcattttcatcttgaaatgtttacctcatctagtatagaaaagttttcaataattattttccctggcatatgtagtgtttactccgtatgtgtatttatgtgtgtatatgtatatatgtttatgtatgtgtacttgtgtatgtagcatcatctgtatcttcagccctgatgtttcttttgtccaccagactcatatcctattggccttgccaaatcaatacacacaaaacaaaacccattatctttctcaatcaaattttcttctccacttttgtttcctgccttaaggtgtgtgttatatccaccaaactggtcacccaaaatagattcctaagagatagaaaatagaatcctaatggattccttatcctctctcttttcaagaatcagtcaagtccaatattttctacctgtttaatatcattgataaatccttctaactctccacagtcattgctactgctttactttggccctcatcatatttcttgtgggctatagctagaatctcctgattaatcttccattctttagacttgtcctattcattatctacccccattcctagcaataaaataaacatctacaactttttgcccaagtggggtttctgtaatttaaatagtttttgaaatgttcagaaacattgagtacaccagaacacacagaggggaacaatagacaatggtacctacttgagggtagagggtgggaggagggtgaggttcaaaaaggtaccagttgtgtactatgctcactacctggctgatgaaatcatttgtaaaccaaaccccagcaacatgcaatttaatcatgtaacaaacctgcagatgtactcccaaacctataataaaagtcaagggaaaaagttctccaatatcgacagaaagaaaaatcttctgcttgtacttactaagcctcttcctttgctaatttccttgtaacatctgaaacagagatagatatctttggaggcatttggaaaactcttattactccctctctgtgagatttgtcctacctataagtttgggctttagtctatgtgttgtcctttgtgtctctcaactggcaccagcttcagctaattgaatcagaagtttaagcttatccaagctgggctatttaaagtctttttgttagaggggttgaaatcccaaactgggtattttgcttgaactagggtgatgtcaattaacgagctgagactgcctttattggttgcccatgtgtgcaggaaaacagagtcttcaaagagaaagaactaaagctgatggaggccaagcagcaagatgagagaccacataaccccagtgaaggagtagattccttgttccagatgttggcaagtgcctggtctagtcgcagatgcatctggcccttgagttttgcaacaagcctctgtatccttaaaataaaatgccatctttttaaaagtaaactagctcgagggttactattacttgtgatatggtttgtatatttgtccccacccaaatctcatgttgaattgtaatcgtaatgctggaggtagggcccaatgggaggtgtttggatcatgagtggcttgggccatccctttggcaataaatgagcattctctctgagttcacaggggagctggtcatttaaaattgtgtggcacacctcatcctcccccaccaacacattctgtctctcttgctcctgcttttaccatgtgaagtgctttctcccactttgccttctgccatgattgtaagcttcctgaggcctccccagaagccaatgcagaaggtatgcttcctgtacagcctgtagaactgtgagctaattaaacctcttttctttataaattacccagtctcaggtatttctttatagtagtgcaagaacggcctaatataacttgcaatcaagagttttaactaagacacttattcatcttccaagactaagccaaggttactcttttctaaagattttacaaatcccaataccaccttctccctgactctcacgtgtgcttccctctacctgtaacatttcattactcttacacacctgctactcccatactaatctgtaaactgcttaagaacaaagggaatgtcttatgtatttttacatctctccagtgatgaagggtacataaaagtttaacacatttccctcatcggatattgtaatttgatagcatagaaactgaatttaacctgaataaatattttgtttggcctatacagagaacttcagtctctctctctctctctcctctgtctctgtctctgtctgtctctctctctctgtgtgtgcctgcacacatgtgtaaaatctagtattttcatttacttctctaaagataaagatcttaagaccattccttagtattatccagtatagtatattgatttcctctctacttgattgaaacagcagagttgggcatttatttggctgatgtgtccataagttttgtggaaaagtcaagtccaacattgactaaagcactctggtagaaacaaagggagataaaattataaagtaatatctttccccacaactgcaccaaaaatgcactttccaaagtcaccaatgatctcctttttgttaaatccgaagggcatttgacccttttctacaatttgacattgttaactaatttcttcttcaatttcctttcttgcttttagggatttgactcctaatttttttcttacccttaatctagcccttatctcttttatgtgtttctcttgctcagccttgctcacttggtgtctttgatattcttctcttttattttactgtctccgaggctcatctcacttcttggcctttaattatttatttatgtaggatgtgaactcctaaatcagcattcaagatgtatatttggatactcatttcaatgtctcagtctcaaactcaatatattaaaagttgtatcctttatgtccaccaccagccccaaagaatgcacaactgaacaaaaccctgaccatcatcctatattttctctctttctgagctatccatagaggtgaatcaagatagaaatggtgtgccatcttctattcattccactggcatcaactacatgtactcatcaaaccatgccagttctaccctccttaataactgtagcttaacacctgaataactgaacaaaaaacttacaatttaactctcttaacacttatctacctcaattttatttttataatttatacataatctataattatttttatataatcggcgcagtgataattccagataaaactcactgaatttctatttccatccttgccaatgatacacacacacaatgtaatgctgagagggttgggaaggaagaatgggaagaaaggcagaagttgacagttaaaaaaaaaaagtttcccagatggttttcttagtgtcatctcctgcaacctccatcaaataagggtccaaaatttatgttacaaccatttgtttgatgccttatttaaattgctttactggacattttccatctgttaagctctctgaaagaaacaaaattgccttgtcatagctagacctcatgatcctatacacttacaacgggcagactttgcaggggcccacacctttcaaggtggtttgggaaaatgacacagaaaagttttacatcagctgaaaagaaaaatgcataactcattttggtaatttcagttttaattcttaataggataaaggaaacatgcacattataaatcaatgctctgtgttaacaaataatcaagtaagcagagttgcaagtattggctaaaatgaattttggatatttttagctaccaaatttctcgaggcaaggcagacatacatctggacctgaatatctgcattattagggaatttttgtttgtttgttttatattgttttgttatttttaaaagtaggtgccaaattaggtcacctgctgtctgggcaatgttattttttgccataaccacaaattgaagaaaattgactgctctttttccttagtcaacatgctgtgcttccagccccaaacatctttgagaagttgtttagattcatgagcaatgcctctgtccccaacaggctaagacattaggcaggtccctgcacctctggagtcctcagttccctgcaaagtgaggaagctagactaagtaatcgttaggctcccttccagaccgaccaatctgatggtattagatgcaattgctcctgaattagggcatgaaatgaattcagctttggtgcaccaatgtgatgactctgcttcatcaaagcctgagcacgcgataggcctagcaccatctcacacagagacaaagggcaaccctctgcttccaaaggaatgacacaacctgtttctgaagtgattcacatcatctttacttttgaacaacccaatgctcagaaaacaatctaagaatcttcgctgactttagggatgtaagatacggtttcttgacagtatttgggattgtggaaaaaagcaattgaggaaagggcatctccacaacgcaatattgaatttagtgcccaaggtccatcacaggaatccctaacgatccctacaatctctctctctctcttttttttctctctttaccctgaaaataaactgagaagttagtattgggataactattccccttgacccaaataaaaagtcctgggcaaacacaggtacaaattgccaaatggaaaaagttcttctccatcttcagctagagggaggctggggatcccagctctttagaagccggcccgtggacgcccagagaatcccttcggagaccaggtcagggtcactgagcttgcccagcagggcgccgcctcggacgccgccccgcctctcaccttgccagcgccgcgctcgggccgcgaaggtgcgtgcggcgctcggtgattggcggcggcccggagctgcccggctgccattggctgcccggccccctttgttcccgggtccgggccgcaggcccgctgcggcggactgggcggcggaagttcgacggcgccgggcgagtggctgttgagcggcgccgcgggagttccgcaggtttcccgtgttcgcagcggagccggaggccagctgaacccggccgtgggatcccggataggaggaggaggggacccataggacgcgttaacatggacctggaaaacaaagtgaagaaggtaggggggcgctcgtggcgggcggcggctgcttcacctgcgcgggtcgcgcggcgcgcggcggccggaggtgccgaggtgggtggggctcgcgggccccccggtgtgagcccggctctgggtctgcggtgccccgggcccagggacctggccccctgggtagaggaggtgctcggcggccccgccagctccccacactcgggagcgacagaattggaagcgcgagcgagggcgggcgcgggactcttctctccagtctcacggaatcccagtggttgtaggtgttggaaactttacttaagatgtttcagctctgcctgtgcctcctcaaaaggaaaggacgagcttagggcgagtgcgggcgagaccgtgacacttcctggctcaggaagttgaatttcattaagcctttgtggtttggggctctgctgtgctttgacagctctgatctcctcccttccggctgggctgtctggggcgctctaaaatgagtgttgatttaatgcactgccttcgcacccgtgctggtgataacttctaatgtgatttttttttcggtcattcattacttgtctaccgaccgaggcagtgcctccctcttagggaattatctgtcaaagagcgcattctccttgtttggcaggtagtcccaaagggcggttgtcaccagcgtctcagcgcagggagacattttcagcttggctgctgcctcgcaggcactggaaccgacggccctacctgagccactcccgggttatgcggagcctggtgtcgcctgggagaaaagggtggggaccagactatgactcagaaggaatgctgatgtcacattcgagtgaattgccctgtgcgaaagttctcctcgttccaggggatttgctcatgttttactttgtggtaaatttaagctagctgtcccttatcaaatagagaagttttgcagagagaggaagggaaaaatacagaaaacagtttttgtttttctcatactcatggttcctaatattttatcttctaaacacaaagtttttgacttgagcattaattctattttatgcccagaactggatttttgaaaatggatacaaaatattgtgttaggactgcagagttttcggttaggaagctattgaccaataaaaactcgaaatgagaaaacagtttttttcattccttgcgactaaaattctcaggcactcaaaaaggtatccaagaacagaaaaacataaattgttaatggtagcgtgattgcattctattctcttcccatttggtttctttctttttttcttttaaataactgtaatatttttggttaatcttgcttgtcatgggggaaaagcggggaaagcattttgcccgcttagctttctgttgatgaatactactctcatttagttttcaagtaggtaagagctacttaatttagtacttgtctaaaacttggggggtcttgtccttgcttttaagtatttatttgaagacaactttgcaaaagtaaacatattttgggctgccgaggatgaacaggtgaagcacaggatttttagggtaatgacactattctgtatgatactataaaatggctgatacatgtaattatacattaatcaaaatccatagaatgtagaacaccaagagtaaaccctaatgtaaactatgtatgttggggataatgatgtgtcaatgtgtttcatcacttgtaacaaatgtactgcactgatacgggttgttggtagtccgggaggctgctggagacaggaaggcatgggggaggtacatgggaacttcgaattttctgctcaattttgctgtgaagctaaaaaatgctttaaaaataaagtctgtttaatagggggagaaaaatcaaagacatttttgaaactttttgagacaaggagtaattctgagggaagaagttcaaacttaaaaattgtatatgcttgcaaaggaaaaatccagacgttgtttataaacaatttccttagagtttgaaaatgtggattatgataaataatgcccttgacatatggtgtaattttcctcgtttatcccccactttacttttaaaagttattattttcaaccaagaatcttaactttctctaatcctcctcttctccgcctctaccaccccagaaagaattccataaattaaaggttttagagagaatcccatgatataacaaatccctgtttcactacgttgtcttcactgatgattcttagaatcctcaactggtaaattggaagctattaaaaaaccgcagagatgtcccgtatgactccaatttgtgagtcccttaataggcttgatagtctaacaaaaagtttcccagtacaaaatttggaaatctcaggaatgtatttcacaatcttagccatactctcaaaaagaaatttatgttccttttagcaattgttttctaacacgtccaaagaaggaaatattacaagactatctgatttaccagcagagtcctcaccctattttggtacctagttttcaagtctcctttctttttgactcagttattcaagaaaatttatagtttgaatgtaccttgagaaaaggaagattaaaagttggaacaaagatacaaccatttaaatacaactaatatgacttctgttttaagatgtatgacattttttccttctaaaacttttacattgttgatttcatgaggaatttcttccagacagatgaaaagcatcattgttccacattaacatttcatgtaaaaagaattaaggaggactgtctttattaaacagtgattgagatagatgatactattataaaattcttggtttgtaaaaggaaagctcgtccacatcagttgtacaaattgggattaattaccagttaaaacccaccatcacaaagacaaggggtttttataattagattttgctatattttgttttgtttgaagaaagcgagctgttgctaggatgtgggagctagtttggttatacaaagtttttgttttaataatactttagaacagaattgattctatgtccttgccctgtcttctgagttacacatctagacctctttcttattttttaagtctcatcttaattggctttgtgtcagtatggtccatgtctgcttgggaaaaacagtggactttgagaagcagaaacagtctcattttgcggtgaatggtaaatcatggccaacagccagctgttttcctctttcctttctgtgttactctcccatgagaaatattttttttcaattaagaacataccaacagagaaagagaactacaataatttcccttttactgcctggaattgctgcagggctttttcattttaccgtgttcattttttctctcctctaacccctttattttgattaatcctaatattttgcatacttttcttaagactcttatttctttaattttactttttaaaaatatgatgcattttaaagattacatgttactaaaaatcccctttctctgtatccaaacttgttttcaaaacctttgtcattagccaaaaaagcatagtgaaaccaaatgaatactattggaaaaaggactaaactacaaagattatttccattggaaattagaatgagttatttgccttaggtagcccctggttgaagtggaaaaggcaatatatggtgacctggatgctcaaatctacaattgcattccaggcttgaagccattcttgctgcaagaaccattggcaagactaagggtaaaggtagggcaaggcacatccagggctttgctttagaggtgttctgcctctctgaacaagtgcagaagaaaatgagtggtcctcggccaggcttttataaaactattctaacccatggtgtgattcattacattggtagaatatgaaaagtccctttctcttaattgtcctgaatattggttggagaaaaaaactatagtaggttttctattgattctgttcctttatgctgtcctatgaagtagaaataggaatttatattgctactggctattacctatgtcccatcaactcaccctatgactttgcttgtgcatgcccatactccatctacagttctaaattttttccatccttcaaggaccaacccttcacactgcacactcctctaggaaatctttctccatgctgccacctagatgaaaaatattttctccttttctcctgaattcccaaaacatgttattggtaacacttaggacactaatcactctccacctctggattatacttatctgttgtatgtttcaccttcttaccttgcttacaaacttcttgagagatgaatccatatcctgttacacttacgtggttattttgtttgctgttcaaagcaaccttaggaagtaggccttagccccattttcaggatgaagaaactaaaagtttagatagcgtaatctgaaaccttactatagagaactttactatgaacttgaaccataatttgaagaatccatgctgcttccatcatgccaactaggccgagtcttatattcttcatcttgctcactaaatatatgtggaatgataactgttataaaaagagaaataaaataaggtacatttcaacactttcactcattttttaaaggaattatatttgaggaagtggtttatattccaataaaatcaccatcctgctagttttctatattttgtttctactttgtccatgttgtatgtattccctttagtgtaagttgccattgacattctttgggcagaggcaaagtatacgaaaagtaaaagtattgtgaaaaggagtttctgggaaacttctacagtcaaagaaatagcataaactccaataatattctgtaccttatcttctaagattctcccaacttcctgacttttggtgtgagccaatggtaatgctgtctcctaactatgtaaaatggccctaggtaacagtgaccctgtatttggctctttgttttgttaagtttaaccaatggcatctggaactataaagggatgctcgtggtcttttctcgtgttgagctctgcagttgagagaaagccttacacatagcatgagtaggctaaacctcttttcccttgtagcaaagtgttcagagtgcctctggagtggcagaccagacagctaagaatggagcagctaaaaagaaacaaaaaacaaacaaaaaacctcttaatattgggagaactatttttttgttttaatttcccattcttcatgcaaaaacatttcttatgaagctgagaagctgtgggaaacaccaaaatgatcagatatttcatgaggctctcatggagctccagagtgacatccagcattgttagcatgcgatcaacatcatagaccatcagtgtgcaacacgagttaccaagaggggctttcttagtggaaagagagtgataattggtaccatggaagctacttcctgtgttctttttctgagaactagaagaaggaatacaagttggccccatgctaatgtgtatataccttttttacataccaatcactagtgtgtttagaaattaggaaaggtcagtaagtctccagtatatataaacatctatagtgtatggaaaggtcttccatagtgtatccgttttctcacttccatttatcagtataatatatttaaaattgccctaagctgagagttggtagatccgagtccactattttttgtgatattaaccactttggctatcaatttctatttatataaaaatcagtaggggaaccagatgatttctgaggtttctccaagtcctgtgactctttgatcgtgggaaataatatcagtagtctaccatgtgtaatgttccacagtgctttaaaatcacacaaatgaagaacatatatgtataaatatatacataaaggagatggcatagtttaaatgttagtgaattccatgaagaacctatagattgaaccaaataatttttttccacaaatcttagctattttcaacttgtttgtacttaattttcataatatttgtggaggtatttgaagatattaggttaagtttaattaatttaaatctgtagtataaggctctgaaggctgtaatagtgtgggtcccataagtctaggagtgatgtattacttaccttggtatttaattatgggaaaatgaaaaataatggaacatttattttctttaaaagttatctctctcaaaataaggctgttaaaataattttaaaagattaaaaaaaaactatatgagtgcttttttacgtaccatgcactgttctagactctggggttatagttgtgaacaagaatgacactgaacttaagcttgtatcatagaattatgctattgcaagtgttgatagagcaatgtaaatattgaaagtaagcacaactggaattatacccgtcagtgaactcttgataggttagcagtacgctatgtttctaacacagacagtgagcaattttgatggtgatccctgggcttgattcttggttttgcaaactttgtaattagggattcttatttcatttgtcttaagtaatagcaaatgtaaaagatgggaaaatgagaaagcagcttttatgtattagaatgtgaaaaagattatgaatgcataaagctatacaaatagacttacacctataatatacacaaactataagtcttctccctgcctacaaatgccttacaaaagagtcattcttggatttcctgtttgcagtcatagctaatttttgtttggtaactactgccatggtaaccaaaattatgattttaaaagaattgtttattaaatcattaatatacaggaaattattttactttttacaagggtggtgggtatccagagaaattatattattaattatgaaatcaactttttctaggagaggaagataaggaaacaaaagactaatcaaaaacattgcaaaactgcagattttcaggattttaaagaaaaataatttggtaattgataacttcactactgttctttgagtaaatatccatgtttaaaatttgcctcaagcactattagaggattaaatttagaggttatgcttttcaactgcccaactacaatctttgactctcctacaaaagagctgccatttagcatggttttgtcaattttcagttctaagtgccctgtctacctaacattctagttagataatggggaattagagcgataaggatatgcatgactataattttctaagtatcactgtatttattttggtcaaattcaaaaaagtaaaaaagcatagtttagaattgccaatttctctgttccttagtctgttagaatggtggggagtcggctcagatttgagcatggcttaaagtgggagagcgttattagaagccagcctagtggggattgctgagatctcatctgctgaatgacagcaaagttactactctgtaaatatacttaatctgaaatgctgaattatcctcaaaccatgagtgattcagcttgtgtttatcattgtgacattctggccactgtgaaaagctgtaaacaggagtttcagggtgttcattgcatagcttatctgagcagcgagcccagcagaaaagatgggcattcagcccagcagaaatgccttgataaggagtccattaatgcatctctagccacaatgaacttttcccttgctttgtttgatgataaagtgatatcatgtttcattgaaaaatgaccatgtagatgttaggtggatttttgtttttatatgaccacaacgtgacagtcttaacagaatgagtcacaaagtaaggatcaaggatctgatttttcctttatgagatactggcctacaataaaaataactgggggttaaaaaaattaccctttgtttttcgtagagaatattaaaagtgcagtttagatttaaaactacagactctaaactccatatctatcagtatcacctcttgagcaaaataccgatgtcacctttgatagatttttttttaaaaaaggaaggaagatgagtgagcaaaacagatgtgtaagttaactacagtgctggatagaatgacataagtgctataatacaatttcttatctgggatgaggaacctttttataaacaaaaattaatcattggttgatatttttaaaaacacaataaaaatttattacttaaaagacaaatacagggccaattaaaaaaattattaaatgcaagagacacaaaattactttaagtatatagtagttcctaattgcctactgtcagtttctctgcctatctcatcacagactagtgacttacactttgtgaactgccactttgagtagcacagcaataatagaaatacaaacaactgttatgaagtcttagaagcagaagtaactaactttaattgtgtgggttgcgattattttatcaaggaaacacctcctatagaataaagaagctttcattaggcaaagaaagcattccataaagaggaaatagcatgaaccaaaggtacctggctgtgaaaagtcagtaaaaccacccttgacattttcagttttgtctcttctaaaataaagctaaagtagatgagctgcagtaatttgtaatttttccacagtacaggtttgaattaaagaggtatgtcactgagctagtataagaccctagcccacagctgaagagtttctgatctcccttaactgtgatgattatttaatacattgtgtcatctattgagagagaggaggaaatttcacagtagagtctagctcatttaggctggtctggactctgagctgtggactgggaccacaatgttgccaggttttcatccttcttagatcagtgaagccaacagtaaaggtcatgcccaactgcaggagcaccttttaagcctcttcttatgccaaagcagtcacatgtccagttctgaagtcaaggagagaagtccagtctagcaactatgaggctagggcagggatatgatgttgaatactattacgtgggaatgaaggattgggaccattacttcagtctaccacgtgtgctatagagggacagttgaatgtaggggcttgaggatacttttctgaagatctttcatgtatcaagagtattctgagatgatattctgtatggtatcagactacacgtttcaaagcagagtagtttttggtcattctgaaaaactgtagaggaaagttaactttgcagtatcccttacttgatatttagggtttcctttttttaatctggtcactcttctgttagctttgaaacataggcctctccaaattcattccagccgggtcatgtgacttccgtgttaaacgaagacatgtaaaactcatttctttgggaaatggcaagttgcctaaggttttgaaggggaattacaaaatattaccttttatatactgcaacaaatggaaaatatattctgtgaacattccaataatatgtgttagactctatctttggtaatggaatagaaggttatcccaagataattggcagaatttaaaggtaaaaagaggcaagacagatttcagtggcctaactccacagctcttttaagatgtcccaggtaaaccagtagtgatgttattcattgttactttctcatggaccagataaaattaagccagagggtaggatcatcctgtggaccactgttgcccacttttctctaacagttagggaatttaaaggaagcagcgcagactttgacttttccagacatagatttggatcccacctttgatatttactcagtaatttggcaacagttgctccttggtttcagagatctaatctgcaaaacatggatagtacttctttattggattattgtgaaattaaataaagtagtacatgtaaatgtttagaacagtgcctgacatatagcaagtacctggtcagtgttattaatgttctctgatcagttttgtttagttagttagaccttagtaccaataagtaaacattttgagaaccagaactgcattaaagttgggtatcagctttagaaccctgggttcagtttttggccctggcgtttattagctgtgtgaatttgggaaagctacttagccctgtaaaccttagtatcctcatctgaaaatgggtttcaactgtctacctcacagggttgtaaggataatcgagatgaatatcttaaagcacaaagtatggtgcctacacatagacaataaacaaatgtgtggtaatcctcttcaagaaattcaatctagagggaagaaaatcctgcatagatcttcatgctatttaacagacacctgaatatattgtcaagaattttatgatggcatgctctcagtaaattattgccacttggtactttgttggacacaaatatccatttaaagttcgataactgggggatatattaaattactggatttaatatatccttttgctaatttaaaaatttaatatatttaatgtatccttttgctaatttaaaaattattctgatttatatttttataatgaaattaaaatttataaatatttctggaacttgagtacctaccatgtgccaatcgctatgcaaaggattcaaagctgggtatattaggttccctgagaaagcacttgattgaacactgcaacgtattgtggtcccgtatagggaattggtatgtttccctgattggaatcttcctcagagtttctgaggtaaattacagaaatggttactattctttgcagcacctcccattaaaaagtggagtctgttttccttccctttgaatctggactgctttctgacttacttggatcagtagaatgtggtagaagtggtgtgtgaatcctaagcttggacctcaagagaccttgcttgcttctattgctctgttgctgggatttaagtcttcacagcttcccacagtgaaagctgtggaaggagtcttacagaagactgtccccactctgaattactctcatattcctctgtacatctgaaagaatcaagaatcaatgtactgaaactgctctaatttcattggtggcttaagattgagcccactttctgctctagacgaatctgattttgatttttgtgcttgttgttccattaaagtgaaggaaaattaaattaacatgcaactgcaattttatcttagttgtaaataggtggtatatgcatattttgaaaattgtctgatttccttgaatcactagacaaattttaaatgatgtctgtgcaccttctttagtggtatagtctaaatatagagcaaaaagtatggtaatccaaaccacttctctgatacatcaaaagttaaaacatgggtcaaaaattagttaaggctctttgatttatgcagcacaacatatcaataaacagaattcttttttttccagaataagggatggtgtgaaaagggtatgcaataaataaataagcaagcatgaggacctggcagtagggttcttacatctctcccttcctttcctggtttccaagacccctctccttgctataagactttgtttttgttctaaatgcctgtgaatgctaatttggggcaaaagagaaaaacgagaagactgtctttttgcacccccttttctgttttctttgctgtctctgttgggcattactctctaggtttccttggatcctcctgctcctctgggcagcctccttcagtgaagccctcagccaatgccatgagccttttctttcattctccagtctgtgaaaacacatctgtactgccgtctttttctgcatgtgctccagttagatagttaaagaattagtggcaataaatcacttaattgtacagtcaatctactcatcccctcacccatgtattatgatgggttacccctgaagaaataataccatagcctttaggcatcgcaagaatgatcgcagtattcaagtttggggataaagagccttaattaagacctctcaaagcagctctctgtgggatccaccctttagaagcagctgtggagatagtgacacaagaccaaattaggaatggttgccatgatccagattcttttatggaactcctacagatgcgttttggaatcaggtttttaaagtcccttttatagcaaataaataggaggttttgagggctgtttatgagcgcattccattacagtgtctttcagcggagccagagctcagccaatcctaattaagaagcaatttcagctgcagtcattgcttattataataattgtgacatttttatagccctacattgtctttctcaaagtaacggattcaggaggagtccttttctgagtagagtccacagaagaggtattctattggtaagcatttcaaatgacttccttcatacagtagtataaaaataatttgatagcagtccgtttgaaaaatgtttataaggaaccagcttaaactgatcagatggaatatattttcatcagtcgcttacctgaaataagtacaaaccttttttattttttaaaaggggggcctaaatttcgctcctaataatattgtaaggttacatattaagtttcaaatagataagtagtactgtgagggaaggaactgctaactgtaaatactacctaatttgaatcaagtaattttggctcctgatgtcacatggaggtactgaaatttattttcttttacttaattccatctccaggtggatttatataatggaatttaaaagtttatgtaaatcttttccaatttttattctgtgttctttaaggatgactgtggcataatataaacattgcgaaaattttctcccaagtatatttggtattttaataatctggtttgcagctgtcttctgtaacacaagtgtgtgtgtatgtgtgtgtacccaagtgtgtgtaactatatattgagaaagaaaatgagacttagaggctaaaaatcatattctaccctgtcttctgaaagatcatttcctggttcttactgagtgaacaactaacaaattgaagggaataagtattaatgaggaaggaacaaagttctgctttagatgcccattgggtgaagagaatttaaatatttgaaatgggcaaaataaagagaagtggtagataagtaccccatatacccctgttcccctttataatatgtctgtctcgtcacaaatcacttagtctttggatttaaaatcaaaacagaaaagaggatatagtaggcagcatctaagatggttcccaattactcccacctactagtagtcacacccttacatattgccctgccattgaatgcaggctagcctgatcagttgccaaaaaatgaaatgtggcagaagcaatggcatcacttccgagattagggattacagcttctatcttgtggttctcttgctctctctgggatcacttgccctggggagaaccagctaccatgtcctgaggtacccatgtgggcaggcccatgtgagaaatcttagaagtgggtctctccctagtcgatccttgcagcccagctgaccccgattgcaaacttgtaagagaccgtaaacctgcccatctacctaagccacttccaaattcctgacacacacaaactatgacatgataaatcgtattttcaaaccctaagttttggggtagtttgcagcgaatacagaggtgttccattatgaatctagaaattcagtgatttgaaaaatttgaaaagaatgatattttgcttcattgccctgagtactgcataatgtatgtaatcttacatataatatagcagataatttttagtactagtcgtgtctacatgttttgagtaaacacctttcaattttgaaatataatttgttcatttgtatttcttgctcattcttttaattttttttttctcttgctgtaacattgaaagagacctattttgcgtcaggaccctggagatttttgttgactcacacctcattcttctgaggatccccttgtgtgtgaatttatcacctcggggacttccatgttagtgtagctgatgtgcagacattcagcttcctcataataagtcccaggttttgcctaggatggaggaattcctgcctagcaaacaatgagcagtctttaagatcaaaattgattactctagagaagttacagaagaggaatattaccctttacattactatttacctttttagtttcagtttggagggaaaaaaaaacagtgactttgtagtgagtgcatagagtttgagtgagaaatgccaagatgcaaatctcacttctgccacttgctagttgggtagtcttaggcaagttaatttctccaagtctcaatttcctttttatgaaatagggatgataatacttttccaataggttgttggggattaaatgtgatggttatatgtattttagctggcaggtagtaacattttaacaaacggtggttgaggtgtttttactaacacttccaccatcacaaccctcagtgctcattttttaaagtatagttaaaaacacttcaacatatcctgccaaaactaaaatttattattgtttcctagaatgtagcaggatctatttctgctcttcttcaaatatgttactgtatgtattgaggtatagatgttttgagtaatcagctacaacttgattacatctcaaactcaagtagagaaattgtcttgatgacaatacctttgtcattaacttaatactgttactgccttaagaaatgtagggatagattgagtaggaatcatccactttaatttgttaaagtcccagaaaacttgacgtactacctccagaatatattttattacaaaatatttaggcagaaagaacacttgtttccttttcattcctaacataatagtctatgtgattatttactgctgtctgtgaacaaaaaagatttctgaccatttggcttacagtggattttgtgatagagatgcatacagggcttctggctttatacatctaagctgaaaaggtgagggggatgtgggaaatgaatcctagaatctgcagtaaataggtttattcctgtttccttatgggatgagccatgttgacaactaaagacccttaactgattattctattcttgagctataatattttggtcttcaggtaaaaattccattacattctatttttaaaactgatttaggaaatagggcttctttatcagggcgttccattttatgacctatcttgaggcactatttattggttaggagcagtcacagctctgtcccagtttcttcatgtggataaaaatgtgggtagtaatagtatctcagactctcataagattgttatgaggttaaaatgagataatcccatgtaaaatacttagaaccctgcatggcagtgtaagtgctcaataaaaatcagctgctgcttttattatcaccaccccttccagtgtctttttgtgtgtgtgtaaaaaggcagtggaagttccttgggataaagatatgttatgataaagattgtttgataattaaaacaattaaataaataaaactttctagcactattgtaaatctcagacactggcaggtactaggagttcaaatatgaacaagaagctcacaatctaatgggggtaaattgatgtgcacacaatcataatatagtaaggaaggacttaataacacaatttgtgccaaggggatagttaaagaaaggtatcacagagttactgacattagaattgagtctgtgggcccagtagagacaacgactttggcagatggagaagaagaggagcagaggttcaagcaaagtgaaaagctccgcttaaaacagagagcggctggaggggagtggtgtgaggaaggcaggtggcgccaggctttaaaggatcttctttgcatgctaagaaaagtgaaattcattgaacttattaaaaccatctagcaaggggagtgttatgattatctttaggtttattaaaataattttgagaatagcaatacaacgtcatacaaaatgatcagttaggagagtgtggtctcaggatgatatgatgtgagtttgaacatgaacactcgagtgcagatgagggagcagactgtgtggtttttagaaaagagacactagaatttggagcatcgtaagcatggctagacaaggacaaggaggcctctgggccccaggttgggtgaccaagtgggtggtgacaactttgtcttcagtcttcttctcatgtatttcagccttgagtaagtgagagatgggaagtttttgtttttattagcaaagaaagagaaatgtagcagatttattaagaatgactaattgtagctcttaatcacactagttctttgtattcttacctaagaaagttggcaaactaataaaatgtgcaactatttttatatttaagtttggttttctgtgtaacctacactttttattttatttatttatttatttatttatttatttatttatttatttattggagatggagtctcactctgtcacccaggctggagtgcatggcgtgatctcagctcactgcaacctctgtcccctgagttcaagcgattctcctgcctcagcctcccgagtagctgggattacaggcatctatcaccgcgcccggctattttttgtattttttttttttagtagaaacggggtttcaccatcttggccaggctggtcttgaactcttgacctcatgatccacccgcctcagcctcccaaattgctgggattacaggcatgagccaccgtgtctggccaacctacacttttttggtaatgcaaatcttgttagagatttggaaacaggcaatgaactaaaacgttcaaattttaaatcttgtgtcagatcttaataaaaatatattgattgggtgggggacttcacagatcacactggatttctaagagagccatttgctaagaggaattatttagatatgtagttcctttgtccagaatatttatctggatgaacaaaatctaaaatgcttctttaggagtgtaatatgaatatatgtgtgtgtatatatacatgcatatgtgtgtgtatatatgataggtggataaacatgcatgcacacacacactgagaaagcgggagtgggagagagagatgtatatttcatatgatctaccttcattccaatattattaaagaagtcttagtaatgcttgtttagtaaccacataggattctttactccagagggaaatttggttatgaaaacagcatgaatcagatgatctcaccctgaatactgcataatatcttccagacccaaattgtctccagatcaactcagaccatgtttgaaataccagatgttccatagtcttttttttgtttttttttttttgtttttttttaagtatctgacatgcagtacctttttctgggtcagaagggtcacctgaaatgttgccaacctattcgactgctgaaaattatgaatatggatacattgattccattcccatttcttattctaaaataagcaggggataaaagggtgtttggaggcacagatcatgggaatgtaaattcagtttatggagcctgcagttaaagatacttaagacctatttgtctatgattcgtgtttcacagtaaaattatgtagtcacttttatttttttcttaggaccttgatagatagtcccaaagcctgactgtaatttctcccaatatagtcaatccaaaggacctgttttcttggacgctgaagaagaaaaattattctgtcatatccttttattgatgctggccagaatgtgttactaaaattatatgaagtagacagctttgagacttgtgcgcttatgaaaaacatgtgtttttaggcactaagtgttgagtctgcagggaataccgtatcacatttactgttgaaattatgttaaaataattacgtgcaacaggactgagttttatcattcacagcttaagtcttttgtttcctatgcatactttataaaactactccaccagagttacaagtgattctgacttctgagagtcattaatatattagctttttcaaataattattttctatttagtgattaaactttgagcagatgaccatgctgaataataaccaaactaagacacagttaatctgacacatgatttgcaataaaattaaaaggtatcttggagccaatctagtttaatttcctcattatctagatgaagcctaaagaagaaagatcactttcaaaatccctgaacacgccagtgacactctgtgaccagaacacaggtttcctgactctcctccagggatctttctacattttcaaagttccccgttagctctctagtatctataactatatatatatatatatatatatatatatatatataatcatttccttaatatttggtaattctcacaacatagatatgacatacaggtacacctatcttggttatatttgtccaagggtctagatttcactttctaaacagctagttcgccttagctgaggagctaagcctctctgggctcaccttcctccctgccactctctctcgcaccctgggcatcattaaataacaccttccctatttatatccctcaccaagagttctccagcccagacatctgtagacatcttgtaggcagaaactaacctacaagatttggatgtccaagaatagtcatagccttggctcttcaggaaaggagaagaacactaaggagaaggtggtggtctatgctgagggtaaagagaagagatgagaagaattctgggtcctggacttcagggaatcctgaatacaaagtgaataatggagagaaattagagaagcccttagagtagatgggggttccaaatccttgaactgaaaccaagaggagttgaggaaccctccagttcttgtgacactctgcccaaaataggccctaagaaactgtacttggggcagttctggctgtgaaactcccttttaccacagattagagcccatatgcttcccttcatctgatatgcatttgacttatgaaggggagaatagcagatgattagatgcctcagttggaagaaatttgcctcacactggtagaggtatgtctgctactgtgtaattttataatataaattggatttaacaactgcattctaaattataattcaatctgaaactaggcacatccctaaccaaggaaaatgctagagtgtgaatcacgtatcttctttcttggaaaggcattgtttttgtttcctaacagagggttgataaagaggataaaaatatggaaaaagttctcacccaataatgtggcataagtcagagatcttcagtgctggtatcaatgagatttaagttttgtagctatatacttatagctataaaataaatttcttactgaaatgttctcaggaaaacaagtttattgccagtctgaaactctaatttctctagctgctaaaagtgattttgaaaacttggtgtcatttttgtttgtgtttggtgtgtgtgtttgtttttaattaggactgcttccattgggttatagtaggagaaagtgtatcatattgccgtgacccattccactctctttcacttacttgctctctgtctgtgatgtttaaaagttccctcacacttaggtctgagcatgtggggaaaatgaaagtgtttgtgtttggaaaggtagaggggcactttttccaggcagtcacaaatctaactggaaagagtccataaagagattaagttggccttccaggcaggtcccaagggcaaaagaaccctggaacaatactttctgggttttccagagcggcctacagagccaatttctcaagttactgcttttcccaaggcctggtctcctggtccctgtgagggcttcctgagcttctgctagcagagcttgagaggtgctcttgctcctcaccctcccctgttgccctgtggctttcctctttaccagtctctcctgtctctgaggatgtcatcctctgttaagctggtagcctaagacatggcattgaatgcttcaagaggtttaagtttcttccttgggaaaatgaaaaggaaaacaaaacaaagtactccgcctgctacaaggccagccctgtcactctgaaagtgctttacaattttttggctcttcctttgccctcttctgccacaggccttgtgtatggtgtttcctctgccctgaatgcacttctctgagccaaattagatactgctcagcctttccattgtaattcatgcacctctccttcagcgaagcttccccagccttccttatttatcttgtcttcctttttaaagctctcagaaagtcatctacacttagagatggtgcaagagtgtttctggaaaagaaagttcttttctttggggcagaaattagctagtgactctttggaagacaagagctcccatttgacacgctagtcctctgccccaaaagaacagtagagcaggagccagatgctgagttttaggtctggtttgctattgagtagctgtgcaaccaggagcaaattatccctcctctctggattctattttcctgatctcttacatgagggagatgcctagtcctgtccagaataagaatatgtgggagactttaaaagagcagcagttcatgaaataccaccagctctagtaattctaataaataaaatgatagctattttaagaatatattgatgaaaagtgtcaaactctgtaaaagtatttgaagatcttattctgagccaaatatgagtgatcaatggcctatgacacagccctgaggagactctgagaacatgtgcccaaggtggtcaggctacaacttggttttatacatattacagacatccgtcaatacatgaaagatgtacattgcttcagtctggaaagacaggaccactggaggtggggggcggtccttccaggtcatgggcagattcacagattttctgattggtgattagttgaaagccttattatctaaagacctgaaatccaaaaaaaggaatgtctgggttatgataagggggcttgtaaggaccaaggttttatcatgtagatgaagcctcctggtagcaggtgtcagagagaatagattgtcaatgtttcttatcagagtctgttctgtcagtcttaggtctctgtgtttctgctaatgctggtcagctgtgaagcagcgcccacccacccccagctccccatttcctatcatggcctgaactagtttttcaggctcactttggaatgaccttggccaagaggtggggtccattcagatgcttcatgggtttataattttatttttgatttacaaagataaaaagttggtaggagaaaacaacttgcccctttgcaaagttgactttgtaagtcagtagcgagctactccaaagccttagtgtaaaaactgctgactcatggaggttctagttacatttgctgaactttcaagttggattcagaaatagtgaatgagatggtattgttccaggatgtttgcagtcttttataagcccagtgttgttcagaccaggcaattccaatctgaaggcatgcaagaatttaagtggccatttaatttagaggcagaagcatatttctagatattatctgtccacaaatatcaggattttatacacacatgtaagtttgtatgtgtatgtgcaagttctttgtcatgaggtaaaatttattccatgttgtgaattatataaaagagagtttaaaagcctctgatttaagctaagctatgtgattaagccttaataatgtaatcaaaattttcatttgggattagagtttatttagcaggagatgcatgaacatagtatgaatcatatccatactccaggcacattcagaactaactcttctgtaatggaaaattagaaagggcctgaaaaagaaaacttttttggatttgcttttcattttactatggatattgtaatggagaaaacatgtaactatgcttattacacaagaccagaaaagtttccctctgtcttttgtttaacctacattatttccatactgtgtgaactgtgatcatcagtgacaaggaaacaatttaattgctttaaaaaaaagcttagtgttgacactaaatatacaatttaaagactttcatttcttttgaaaattggtaatatggacatggcaaagatgataaagcttagctaatgctggacagttgtttattctttagagagtatactttatatggtctaacttaaaagtattgtgggttttcctaagcaactgtgtggaccagttgggtttgaatatggccttaattatggaaaaaggatgtggtcattttctttaggacaaaaggaaaggcttcacttaaacttcaggacatgtcagactgatctttcaaggaaccagttacaatgtggttttgattgcatagtgacaaacacagcttggtaaagttacaaaagagggccattgaaaaatacctattacttgtccagcttgaactgctactctaggcactaaccagtaactaattcctcatggtcactgatgtgatatttaaaacacagagtaatctgattactggtggtttgccactgtactgatgtaaggctggctactcttttttttccaatatcagtcgttgggtaaaagagcttaattacaaccttgtgtccttctgccatctgcaccccactccttccacttattaggccatgtctcagcaagttctcaaagactattgtttaatatggtaaagaagaaaagggtttgctatagcaagggtgataatacagctctccactccttgcctccctacaacttcaggcagaagagcacaggccttggagtcagaaagacttgaactcaaatctctaccatttattaacattttgatcttaagcaagtttcatagtctctgagtttcagcaaaaacatttcaaaaatggcaaatcatattgcctactttgtaagcattttatatagttctgtaagattttaatgagatataagtaaagtacttacctctattccttgtgtcttagtctattcctgctgccataacaaaataccttagactgggtaatttataaataatagaaatttatttgtcaagttctggaggctgggaagttcaaaatcaaggcactggcagactcagtgtctagtgtgggcttgctttctgcttccaagatggcaccttgttgctgcatcttcacatggaggaaggttcagaagagatggaagagaggaactcactccctcaggggctaatcccatcaatgagggtggagccctcattgctaactgcctaatcatttcataaaggcccagcttcttaatattggtacattggggattaagttgcaacatgaattttggaggagcacggacattaaagccatagcactggcattcaataagtgtatattgtagctattataataatatttatcataataaaaataatatttcagttgtaattcctaaaatctttaattccttgtttgatgtaaaatatgttattcaggatgagacttgctttttaaggtatagttttctgagtgttgtacctattgtgctatggggctgtactatggggcaagtagtggccaaagacataaattcatgagtttttgttatttgcaatatttgtagttttctatacagttatattctgatgcttttcttttcatgataaaaagcaatcagaatataaaatatgttatgtatgtacttggaactgccatgtacatacctgggtatcatcattgactaaatataagatttgtttgaaagttatctcaacacaagtggtaagtggaattaaaagtgcaatttattgaatttttagatttgtaaagaatctaataacagattcatgatgttttctttttaacagatgggcttaggtcacgagcaaggatttggagccccttgtttaaaatgcaaagaaaaatgtgaaggattcgaactgcacttctggaggtattgttttgaaaactgcaaccacattagtaatttatactttttgcaatacttcctcagacagtggagatatcttcgagttctccagcatggttgctaagttgcagacctgttactgtcttttctgagaaatgaatacaacataaaaagtgttctgtcttactgtcattaagtttgacttagtgaattggaccataataactatttagagttgttggatttgcttgctgtctttaagatttccttcgagcctgaaatactgaatatatcatctttctggtggtaaataagtttgtggtaatcctccaggactgtttaataatttatttgttactttttttttgagacgaagtctcattctgtcacctagactggagtgcagtggtgtgatctcagctcactgcaacctccgcttcctggttcaagcgattctcttgccttagcctcctgaatagctgagattacaggcttgtgccacgacacctggctaatttttcttttttgtattcttagtagagatggggtttcgccatgttggcaaggctggtctcaaactcctgacctcaagtgatcagcccacctcaacctcccaaagtgctgggattacaggcgtgagccaccatgcctggccctgtttaataatttaattattctcttcttaaaaattggtaactttacatctcatgtctacattttccgtaaacaaatatgaatactgaatcaagcatgtatatgttagttatcaggaaatgaagttgaatttagatctctttaaaatttttagctgtaaagttactagtgaaaaaccattgaaacacttgaatttttttaagaaaaaaattaattgtagtgtcttggtttgaatgaagtgcatatatacacaagacaatgttagtgagtcaaaaatgtgaattttctatagatcttatctttaggttgttttgaaagtactactgcatatcatataaatctaaaatcagtatttgaaacctgtgcttatgaatgactgtcaagtccatagtggtaattcacaagtctgctcaaagttagaattagcaggaaaaaaaaataaagataactatacagttttaggatggcagctaccttgttaggatgactctcatttgagaaacacttctgtactacagatttccacaggaaaccgtttagaatactttcatcagctcttggagatgtgtacagtgtaaattaaaggagaatataaacaaataaaattttagacattaatctcttttaaaaactagtttattgaatcagttttcagaaacaaagataattgtttaaaataggaaagtcagtagaaacctgctagaactgatacagttcttcagttttgatacaattcttcagttttagggagctaaagttttccagaatttttttttacaagacttaagcagctctcccttgtgctgtctcttcaagggacatagaagtggcagtatgtctctcatgttttaaaaaggtaaagtgacttaacacaaaatagttttcatgaattagaacatctctgctcttaatgctcacactattttctattgggcctattagttaactttacagaaggctgcactgccctctcctgggcatagtttttaccttacaatcttataatacataaaatccaaaatccaaaatgctccaaaaccaaaacttcttgagtgtcaacacgatgccacaagtggaaaatttcacatacctgaccgtgtgacaggttgcattcaaaaatgcattcaaacctttgtgtcttgtacaaaattatttaaaatatgtataaaattaccatcagcttatgtacataagctgtatatgaaacagaaattaattttatgtttaaacttgggccctatccccaagatatctcattgtttatgcagatattccaaaatttaaaaaaaatttgaaatctgatacacttctgttttattttacttgtgaaacattttgggtaagagatacttaacctgcattctttttagttctgctatgcagttgccaaaaaccgctcgtgagattttaaagctcattcctaagagatatcatcttttctctaaagcaagttagtcatttttgttatgtctatattaatcattttaatcgatattttcagatgaaaatatatccgacaagagcagatctccatggcatgaaaataaccttttacatttcaatttatcacacagactcatttaatcaactgggtgtagtctgaaaatctaagagccataatagtctaggactttgcatatggcctgtcattcagctggggttgataacagtccaccccattggtatttcttagtagttctgacatcttcctggcatgggtccagtcacatttctctcagaattcttgataattccctgactttttcaccatagctaaaagagctgaagcaggtgcctttgacctccctatgtagcctctttcagtacagtctttgaagtaaaatattctagactagttgtcctgagtgtaacaaagattccaggtctagtctagggccacagaacttatgtgggtgaagtagacatgggatcccatgaccctgcccacttagcctcctcctccagcttcatggtgatccttgacttaggaccctgagggctccatcgggcacatttcaaaaatcagagttaaattattctctacctctttattagtctggcctctcacacaatcacaagaatggtcttttgaacatggatactattacatacttcagatgacttaagaaccctcagtagtttcccactggacttcttttaggcaaatttcttggcctttgacattaaaccctaacatctggcctctgcttgcttttccagcctcttccacttcccttccaagcactctatgatccaagtgcttgatacatactattccctgaaattttgtgccttattgcatggtgttctctgcctggaaaaccctacctcccaccactaggaaacaaaaagtctcagctcaagaaatacctctgagaagtcttccctgcccatgtatgtcttttcaggctgccataacaaaatatcacatacctggtagtttaaacagaaatgtactttcttccagttctagaggctggaaagttcgagatcaggtgccaacatggttgagttctggtgaggtctctcttcctggcttacagacggctgccttctcaccacgtgctcacatggcctttccttggtgtgtgtgggtgtgtgtgtgtgtgtctggagaggaagagatctctctcccttttcttataaggtcacctattccaatggattgtgacgttcaccttgtgacatcttttaactttacttcttaaaagcccctgctccaaatacagtcacattaggagtttgagcttcagcatatgactttgaggaaacacagttcagcccacagcacccccttcccctgcttccacatacccccaagttgttaggaatcattttcctttttatcaccttgtatacttacagaaagccaggagataaatacccagacctcattcttcatcactctgattttctgctggcacctcccattgtcccattgccagtgacaagggatcccacaggtgtagtccttaaggatcagccttctgggaaatagcacagagtactgaggcatggagaatgaatctggagaggtgaatggaagatgccggatcaaggtgtatcaccatagttgcaggagactaaaaattaattattaggaatttagagtgaacttgtaacttaactagtctaacctcattttacagatcaaagacctaaaccaaaggaagttaaaatgacttgtttgagcccatgagttattaataatataatttgtgaatgatttctatgtgtcacacaccagtaagcacttgtaataattttctactgctgcataacaaattactacaaactttgcaagttaaagcaacaactgttaactcaacatccatcattattattattattattattattattatttttgagatggggtttcacccttgttgcccaggctggagtgcaatggtgcgatctcggctcactgcaacctctgcctcctaggttcaagtgattctcctgcctgcctcccgagtatctgggattacaggcgcccgccaccacgcccagctaattttttctatttttagtagagacggggtttcaccatgttggccaggctggtctcaaacccctgacctcagcagatccaccagcctcagcctcccaaagtgctgggattacagacatgagccactgtgcccagccaacatccattatttttcaggttagaagtctgggataggggagctggcttagctgtctatgcttagcacctcaaaaagctgaaatgaaggtgttggccaggctaaaagtactcacctttaagtgcgagggaagaatctgctttcaagctcattcttgttggtagaatctattttctgtggttggagaaccaaggtccctgtttccttgttggctgtcagctgggggctggctactctcagcttctagaaaccagtcacattcattgaggtacaatgccttccatcttcaaagccagcaccactgcttagaatccttcctgcacctcacatgcctccaacttcctcttctgctgcgagccagagaaaattcattgctttttaagggctcacatgattagagtaggcacgcctggaaaatctcccatttgccatataaaagtaacataatcatgaaagtaacaccaggggacagaagtcataggggccatgttaacattctgcttaccacagcactgtatgtacctgattgtacctaatcctcctaatatttattttattatgtatgagaaatcaaagacgtaggaaagttaaataacttactaaagttatggcttatagatggcagagctgaatttgaactcagagttttccaaaacctttctccatggcagagtagatattagaatgcacatttttcactctcagggccagtgaactttgaactgcaccaggctgtcgcctctgaagtgtgattgttgtgacacagacatccttgtggacaaaggtgtacttttactgtgagctctctcctttttcagtgtgcccatgattacaacagtagaggaaaataaaaggttcaggaagcctaataatgacccaataagaaacactatctgctgggaatgctttcaagtaatatatagagataaagagtgtttattgaaatgtatgacacagacccaaggtttccaggagtttatagccagttatttcacattgaaggtataattaatataattgcaaccatgtcatttatcatattaagtaacagaattattgttttgctttacctttgttaaagtctcctaataaaacagttgcattttattaaaaatgcgttacttgattataacatacatctgttcagaatttctgattgatttagagctgggtgaaaactaaaaattccctaccataaatggattaatacttgtgttgaattctgtcacagaggcccacacttaaatccatatatgtatatccctgttacaaaagggcagcttccaacccttttaaattatggtttgtagcaatgccatggccgtgcttttaaatcactgtgaatgctggcagcatgtcaaagcactctagtttctactgcttgccttggaaaaatagtaagttttacaaatagtgatacaaaaaaatttcttttgggagaataaaggatagtttcttgatttttttcagcttgaaaatgtaaatatgtttatttgtctgaggcaatacttttggtagttttgttcttgcattcgctctcccaggctcgctctttctctctctctcactccttccctccccctcgctcctccctttcctccatacatattaatgtttgcatatatatgtgttaatggtctaaattctttttgtacaaacaactttttatacaaataaccctcctccatccccacaccttagagcttcccaatctgccaatccacctttgcacctttttaaaagaatcatgaaaaagacttttaaactaacttaattctgaatccccttccctttttttccccatagaacttttcttaacatcctatggagaatctggagagagaactgctcaataggacagtttagaaaatttagaggtttgaaaactgtgttaaatatgggaactgatttatatactctcttaaaactatcaactcagtatagcacaaataaataaacaagctgtttaaatctatatatatcatcagaagttacttatggatcatctgatgaaagataatccacacaccgtgcaaacagccccttgcacatgggtattgtgctcacccatactctgtttgtgtttttgttttaggtttgtataaaaccacgtttttaaagttcttcattttcttaagggtagaatctgggttagtttaggctgaaattgaatatgtgataaacgtcccacttattctcaggccgctcttggataacaagatcacagtggcatccttttcttctccaattccacaacaaggtttttcttttaataaatgtattggattgcttccaaatgactttgaaagtttttataggtatttctaaaagtaaaatgttttagtttaaatgtgggagactcaaatataaaacactgtagattagaactctaagaaaaatatttttaaaacctaaaactaggtaagtggtaatagcacagatttccacaatagatagctcctggcacctggtgctgattttatagtatgttttcttgcagagtagtttgtagctggctcttctccttgtagaaatggagctccagtgtaaggcttctggaagggatgtggtcatcccaactgttttaatgatgacagctctagttgaagagccatcccacccttcttgggtcacattcttaccaaggactctgtcaccacaattcaccacattggaggatgcagatgaggcttttaatatagtcatgatttttaaaattataacaaatcaatcataggttttctctacttaggaaactgaaaattatatggcatagtatgacttcttaggtatttcttttttcttaccactagcgttattggtatgttgttttaacctgattttactcacttattaacaaaggtatgttgggtggttaaaggcattgatagaaaagcagaggcttcctgagattgtgaattcttctaattgtcaagacaaataataatttaaaaaaatacagagctggttcttctataattagtaaatttaactctttatatttaacactttcacagtaaatataacttttttaaccaagccacagctcaccatagtttattcatgcttcagaaatcatcaggctttatttcacttgtatcttttattatttatctttcagattctaaaatctgacccttattttgtggtattcatgttgtactggtgtagaacatagattgtaaaaatttccaaagtccagtgtttattatacggcctcgatcctttaagataccactttgctaattattgggatgcatgctgtagctcacagccatataaggatctatttagctatattaagaactaaattcccactccaccttcttcccccctcaggaaggtataattttaaacttgaaccaaaagcagtgtgatagttttataaataattacattgtttttgttaaccaaagagtaaaagtaaagaacatgctgtagtaggataacttgctgctttccactagatgggagtatgagataaccagatgttagaaagattattttatagctgaactagcatatgcaaattcttcaacaaattcttaccaaataaagatttctgactagtgtgcacaaggaaagcaatttgcctcttcaccacctatctctctctctctctctctctctctctctctgtctctgtctcggaatatacaagtcaaatctaatattttcagtttgcatactgaaaagtattttaagaaaattcagaatacaacaaactaaaatctataattaataatgtattatttggcaatgagatacatttgggtttttagttgttttttctgtttctgatgtagataaattccatgatttatattaattttaaatttagaaaacttagtaaattcttcttaatgctaattaatacattgcatttctctgtggtcatagcatctgtgaatagcaacagtttagtttttttctttctgatgaattcttgtaacttttcacactgctctgattagtaccttcagaaccatatgattagaattggtgatagcaaggttgctttcttgcttcacatcttaaaactaatgcagtaagtatgatctatgctgagtgtctgggtttgttccccccatgcctcatcctctaggaactctttctagaatagtttctatttccttttactagtttctgctattctctttattttccttccttttacttcaggcttattatgcctttttcctaacttcctgagttgaacacttagtactttattttttccttttttctaatttgagtgttttaaactataaattatttagttatctagttacttcaacatgcattcttagcctaattgtatctaatgttaatccatgtttatatagactgaacaatgtaagtatctttagaatgtgttttacaacactcagatcgccactcttattgttatgttgtcgttgccatgtatattgcttccagcttaaatttttaacaccactccctactcctctgtttttctctgtcaccttttccagcttcttttcctctactagactctttcttgagtccttactttttccctctacatttttgccaacaggcacagatgatctctttaactcatattcattatatattgttccctgaccaccaaatttatatttcctaccaggctacagtttttaacatgagagttatagatcctacactctgtgatatctttaccttgtctcacaggcatatcaaatttatcagtggtttcattttggagacttccatcaaccttccccactccatactgcaaaactgttcatcttttgaatatactatcttaataaattatattcattctactaatttactcatcccagaaacttggttttatttttcaagagactgagtgtattagtctgctctcagttagtcaagacatacccaagactgggtaatttataaaggaaagagctttaattgactcacagttcagcatggctgggaagtcctcaggaaacttacaattgtggcaaaagaggaagcaaacacatccttcttcacatggtggcagcaagaagtgcctagcaaaagggagaaaagccccttataaaaccattagctctcatgagaactcactcaccatcacgagaacagcatgagggtaacaggccccatgattcagttacctcccaccatgtccctcccacaacacgtggggattatgggaaatacaattcaagatgagatttgggtggggacacagccaaaccatatcattctgccccagcccctcccaaatctcatgtcctcacatttcaaaacacaattatgcccttccaacagtcccccaaagtcttaactcactccagcattaactcaaaagtccaagtccaaagtctcatctgagaccaggcaagtcccttctgcctgtgagccagtaaaattaaaagcaagttagttacttcctagatacaatgagggtacaggcattgggtaaatacagccattccaaatgggagaaattggccaaaagaaaggggctacaggccctatgggagatcaaaatccaatagggcagtcattaaacgttaaaattccaaaatgtcctttgacttcatgtctcacatccagggtgtgctaatgcaaaaaaggtgggttcccatggccttgggcaactccgcccctgtggctttgcaaggtacagtcccactcccagctgctttcattggctggcattgagtgcctgcagctgtccttggatctcccattctggggtctggaggatggtggccctcttctcacagctccactaggcagtgcccttgtggggactctgtgtgggggcctcccaaccccacatttcccttccacactaccctagcagtggttctccatgagggctctgcccctgcaataaacttctgcttggacattcaggcattttcatacatcctctgaaatctaggcagaggttcccaaacatcagttgttgtcttctgcatacctgcaggaccaacaccgtatggaagctgccaaggcttggggcttgcaccctctgaagcaatgggccaagctataccttggccccttttagccaccactggagctgaagaagctgggatgcagggcagcatgtcccaaggctgcacagagcaagggatccctgggcgtggtccacgacagcatttttccctcctaggcctccaggcctgtgatgggaggggctgctgtgaagctctctgacatgccctggagacattttctccattgtcttggtgattaacatccgggcaccttgttacttatgcaaatttctgcagcgggcttgaatccctccccagaaaataactttttcttttgtatcgcattgtcaggctgcaaatttttcaaacttttatcctccgtcacctcttgaatgctttgctgcttaaaaatttcttccaccagacaacctaaatcatctctctcaagttcaaagttttgcccctgcctacagattctagggcaggggcaaaatgccaccagtctctttgaatagccagagtggcctttacatcagctcccaacaaggttcctcatctctatctgagaccacctcagcctggacttcattgtccatatcactatcagcattttggtaaaactcattcaacaagtctctaggaagttcgaaactttcccacatcttcctgtcttttgagccctccaagtctctaggaatttccaaactttctcacatcaacctgtcttcttagccctccagactgttctaacctctagctattacccagttccaaaatcacttccacattttcaggtatccttatggcagcaccacaccctttaaagtaccagtttactgtatttattagtctattctcatggtgctaataaagacatacctgagactgagtaatttatttataaaggaaagagatttaattgacttacagttcagcatggctgaggaggcctcaggaaacttacaaacatggtggaacgcaaagcaaacatgttctttacattgtggcagcaaggagaagtgccgagcaaaaggggaaaaagtcccttataaaaccatcagctctcaagagaactcaatcactatcatgagaatagcatgagggtaacagccctcatgattcaattacctcctaccacatctctcccacaacacatggggattatgggaactacgattcaagatgaaatttgggtggggtcacagccaaaccatatcactgagccttccctttgccatcactatgtccaaataaaccactaagtttagtcagttttttgttcaaggagacctcaaatttcttcctttcttttcatctccactgttgaatactctaatccaagccatagcatattttacctggaccacaacaataaccctccaagatgtaaattccatttgtgaagtagtggcagcatcctgttatttagaaccatgccattgcaaactggatgcataattaacatgttagcttgtctccctattgccagttatgtttcacccctaatccatttaccacatggcagatattgtgatatttaaaattacagatctgatcattttattccattaccaaaaagcctttgctgcttcctgattgctcttatgatgaagcccaaattccttaatgtgttctatgagcccctgcatgacttcatgcctacctctccagtcttatcaccctcctattgactcatcttcctacagtcataccaacctcccctggttatgacacctaaggggacaatttctttcctaattcaggaccactgaaggtattcctctttatacccaatactagagacttttctttccttttctcctccccagatacacacccacatacacagtttacacctatgtttcatacatcgtccagatctcaacctaaatatcatcttcttatggggtcccttcttcacgagtttgaagtccaaattacaccctctcaagggaccctatactttctttcctatcacaaatgaaattttctctgtgtatgtgtgtgtgtgtgattatttaatgtctatctcccaccagagagtaagttctagaaatcagagactaggccccttttttttttttttttttttaagcactatgtcctagtgtcaagtacattgcttggcacatgggcactcgtgtatgttgcatgaatgaatgaatgtctgtgtgccagaccagagtgaagaagagaacattgtccttgaactataagaaacaccatgatggcagagagcacatggtaggtggcaataagtgtttgaagaaataaaataagggaaggaaagagaaaggaaaaacaaagggaaggaaatggagggcaaaagaaattgagaaaaaaatgagaaaggctgtaaacctaaatctaggattataatctttgatgggaaaagtttccctgtctctcactaaaaaaacaaacaaacaagaaaccttggataatagctataaaatgttaacatgcaataaagtacaaagcctcttgcttaaataaggaaacatataatttttgtggttttatttaattcatttctttttattatttattttattcactattgggtgacagcataaggaatatcagatggggttacactcagacatgtccctttaagtgtgcactttttaatcagtctttttttttaatggtacaattgaagatgtctattattggggccatcaccacttctttcagtgaattcattgaaaaaatcttggttggttttgataaaaatcaaatgaataattgcttctcgttatcatatcagaaatgcagatgcacgtttggttgacaaaacacactgaatttgttaaaatacttacttagaaaattcagttgaaacgttatggtaccatctaaatcacaaaacttaattcagtaatttccaaaaatacattattagtgactgataattctgctgctttcctctttttttcaccttccattttaggttcagaatgtacctgtgcagtgcaggtgttttacatgggtaaattgcatgttactgaggcttgggttataaatgatcccatcacccaggtagtgaccatagtacctgagagttagcttttcaaacgtttctccctctcaccctccccactctaatattccctagtgtctgttagttccatctttgtgtccatgtgtactcaatatttagctcccacttataagtgagaatatgtggtatttggttttcctttcctgtattaattcacttaagataatgacttccagctgcattcattttgcttcaaaggacatgatttcattctttttttatggctgcatagtattctatggtgaatatgttccacattttctttatccagtctaccattgatgggcgtctaggttgattccaccatgtcttttctattgtgaatactactgtgataaacatacgggtgcattgtccttttggtggaacaatgcattttcctttgggattgctgggttgaatgatagttctaagttctttgagaaatctccaaactgctttccacagtggctgaactaatttacattctcaccaacagtgtataagcattcccttttctccgcaacatctgttattttttgactttttagtaatagctattccgactgatggaagatggcatctcatcatcgttttgatttgcattccttaatgattagtgatattgagcatgttttcatatattttttggccatatgtatatcttcttttgagaaatatctgttcatgtcctttgcccattttttaatggggttgtcttttgcttgttgaattgttccttatagattctgaatattagacctttgtcagttgcaggatttgcaaatattttcttccattctataggttgtctgtttgtcctgttgccagtttcttttgctttgtagaagctcttcagtttaattgggtccctctttcaatttttacaacctagcttttaaaagccttatcaagcaaagtcgtgttttgtttccttcttgcttaaatatatggatacttattctccctcctaaaaaaggacttgcctttgcataccatgatatagaataggcctaaaagtattttatgaactataaatgtatgaacataaatatcaattaggtacaattaatcattttctacttattttcaaaattatagaaaaatatgtcgtaactgcaagtgtggccaagaagagcatgatgtcctcttgagcaatgaagaggatcgaaaagtgggaaaactttttgaagacaccaagtataccactctgattgcaaaactaaagtcagatggaattcccatgtataaacgcaatgttatgatattgacgaatccagttgctgccaagaagaatgtctccatcaatacagttacctatgagtgggctcctcctgtccagaatcaagcattggtaaatgatatggaacagagagtttctttattgaagttcctggagtatttatttggggcagtttctttgatgacctaatcaacttcacacatcccagatctgttattcttccggggttctcattactttgacttctgattcctgttctagtcttttgaatgtaagactagatacttcataaaatttttccaactccctagatatgtttacctttttgagggaatggtctaacgttcttaataattagatggaaatcagatgttttatatcaatctagtaactcttctagcttagtcttgagaggatttatcttaagatggtaaagaagagaatttttgtcatagtttagaactgaaaaaaatattcaacattatctttgtgtttttttcatttcctttattaatactatataagaccaaaaagatcacagttttatatcaagctccttccactattataacaaccaaatgaaacatttggaagtcttttaaggttagttaaatcattaaagtgaattttgcgatatcattttttatgtaataaaaatgttcctggtcctacagaccattccaaacatgtctgcctaaaagtttatgttttctttcaattgtacatttgtttatttagcttaagtaaacagtagtaactcagatcttacaaactgaaaaaatatataatttcatggagagaaagtgttactttttacccaactaaatctatttagtgtaccgtttttgagttttaacttcttaatatactgtgagggtgagttgctgctattggatagaacccacttctttcttaagtaacttgcttctgatgtgtgttatgaaacatcacactgcctaatggccaatcccagttaacattggcctccttgtggttcaggccaggcagtacatgcagatgctacccaaggaaaagcagccagtagcaggctcagagggggcacagtaccggaagaagcagctggcaaagcagctccctgcacatgaccaggacccttcaaagtgccatgagttgtctcccagagaggtgaaggagatggagcagtttgtgaagaaatataagagcgaagctctgggagtaggagatgtcaaacttccctgtgagatggatgcccaaggccccaaacaaatgaacattcctggaggggatagaagcaccccagcagcagtgggggccatggaggacaaatctgctgagcacaaaagaactcaatatgtaagtagagtggtcacactgttagcctgatttgtatactttacagaatttttttcccttactttgaacttttttggggactattcctctgagtttccaaaagggaataagtatggggaataaataggatttagattcagtttagacttcccacagagggtcatcgtgtttgaaacttctgtctaaagccaaattttctatgtatttattatcaaggataattgtggatagtgagttttatgtacagacagtagttggtattggcatgctgatcaaagacagcattattattctatagtctgtttctaatcataatgttggtattaattgcttatctctgctgcccataaataggaatatatgcttaggttaattcagttttgcttgtgagaacgtgcctaaaattcaaacttaaatttaatttttgtggatatatagtgaagcttttttttaagtctcttctaaagggagaaattgaagtattttgctaatgacttgatggtaggaggcaattatgacacagatgaacagacataagaactaaacctgctgtaatatattcctcatagctccagttagcacaccaaccaataaggcttagtcctgaaaaaagagcactaataagccctgaggtgatagttttagagaatctacttaaaattgacctgaaaattactattttcctttttccataagtgaccttaattcaggaaataatgcctgttacacacagggtgaatgaagtagatttgaatagccgggagaaagctgagattccatttcacagaattattaatacgttattatctacatcgacaaatttgtaatttcagtagaaattatgtctcttcaaagttgtttctctgaatttctactgaagtcaatgataagaaatggcagtcttagctgggcacagtggctcacgcctgtaatcccagcactttgggaggctgaggcgggtgaatcacgaggtcaggagattgagaccatcctggctaacacggtgaaaccccgtctctactaaaaatacaaaaaaattagccgggcgtggtggcaggcgcctgtagtcccagctactcgggaggctgaggcaggagaacggcgtgaacccaggaggcggagcttgcaatgagccgagatagcaccactggactccagcctgggcgacagagtgagactcagtctcaaaaaaaaaaaaagaaagaaagaaaagaaatggcagtcttctaatgactaggttgttctggatggcttccctttcagtcctgctattgctgcaaactgagtatgaaagaaggtgacccagccatctatgccgaaagggctggctatgataaactgtggcacccagcttgttttgtctgcagcacctgccatgaactcctggttgacatgatttatttttggaagaatgagaagctatactgtggcagacattactgtgacagcgagaaaccccgatgtgctggctgtgacgaggtatgttctatgggaccaccggcatgctggtgccctcttagaccctcatatggtccctttacctagaaggcaacaagacttgaccaaacagcagttgctctgtttacatccaaagaagttttaaaaaataaacttctgatatcattcattctgtctgtgttaattgggttgacaaatgaaagactagaaatataaaagattgatttagactaaactaagtgatagcataagttcaagctttaggttatcattttcaaactttagaccctgagaaagtatgttgttacagatataaatctcttattatataaaaatccatctttatttttatcttcttcctagctgatattcagcaatgagtatacccaggcagaaaaccagaattggcacctgaaacacttctgctgctttgactgtgatagcattctagctggggagatatacgtgatggtcaatgacaagcccgtgtgcaagccctgctatgtgaagaatcacgctgtggtgagaagtgttctaaggatatggttgcctcagcctgctttaggacttgagtttatgcttttcttaaagcctcttacaaatgggaaacagaaagcagtcctcctaagtagaaagcaaattattcctaccacagggtgttaaaatcaaggcaattcaaaaacaatacatgcattgactatgagccacctcaagatttctacttgtgaaatttacaatatcaattataggtactgcttaataataaaatcctcacttaaaaaaattcttaatgggaatgagattgttttattttcatggttagcaatcagattccatttcaataaaggtgtctaggggctattgatattctttagctctatttgaatatgatgctttctgtttgtgttattggaccacccactggaattttgtttttgctacctggagattgtaagatacctatttcttaaaccctcattgaattgatttagcataacaaaacttggcctgcgtatttagatttttgtgtgggccaaacattccaatgtgaaagtatattttttcttgcatttactctgcttacacagagctgctgttgtataatggccaagtgatggtaatgtagataaagggtaaaaagttgaccatagatggtaaagtgtataatccaggagtatccaaatagacatttacttctttatatgcagcaaaacacatatgtgttaatggtcccctgagctatcaagtaaaagggactcctggctaaggaatgaaattacatatggtttatatagttatatatagttataagagtgtggtactgtgaagataaggtaacaagtttttatgtcaatgccaattttcagcgttcacccattgccccagatacagttattcattctctatcaactgtgcctcaccaatatatttcacattcttataattacaaccattctactttagacctttttttttgttgttattttgactattgcagtggcctcaaatttcgttcctccactttcattcatcttgctcaaaagctacccaccataatgatggaaaattatcttcctaaaatgcaaattattaaacttttgatagatctggccccttcttgcctctcctgtcccttctactagttatccaacgcaaatcatacatttccacacgttcaccatcattttctagtttacacactgttgtcttttgcttactcctaatagtttttctaatacaccgtacttttccctgttttacctgactgtacctacacatttattcctttagattcagtttaggtttaactttttttcggaacacctttcctgattcactatgcccaaactccaccatttcctccagactctccatgttcccaatggtgtgtgtgtgggtgggtgtgtgggggtgtgtgtgtgtgtgaatatcattcatctgtctccttcactagactgtaagcagctggagggtagagcttgccttatatcttgctttctatatcttcagtgtcagcacttagaaaatgtttgagtgactgactcgtgttcttaatatttctcgctttggggttaccatggtcattcctttacctagggaacaagacgtcaaatcaccatgtaacctgatacattatttagctaaaaactgcttcaatgaatattgttgcaacagtttttctacagactaaaggtattataatgtatacctttttttttgctgctgtcctgacctttagtctcaaggactagaatgtaaccccatcagggcagggatttttttatctgccttttctattctgttcccaacactaggacaacataggtgctcaataaaaatttattgaaacagatgaaactgcttttttttctttttttagctgttacaagcttctctgtattacattgtttctaatcaatggcagggtataaccacagatatgatttgtttaaataaaagaattttcaaattatttagttttatagcatagcatcattttggccaggcatggtggctcacgcctgtaatcccagcactttgggaggccaaggtgggcgaatcatgaggtcaggagttcgagaccagcctggccaacatggtgaaaccccgtctctattaaaaatacaaaaaaattagctgggcgtggtggcaggtgcctgtaattccagctacttgggaggctgaggcaggagaattgcttgaacctgggaggtggaggttgcaatgagccgagatcctgccactgcaccccaagcccaggtgattgatagtgcgacactccgtctcaaaaaaaatatatatatgtgtgtgtgtgtgtgtgtgtgtgtgtgtgtgtgtgtgtgtagcatcatttcttttatgtttactttctcagtgggatataccattggcctttgcctaatattaaaatgagcatacatatccattgccagaacagattccagctaacagcaaagagagctacccacacagcatgctacattatataaaatttggagaaggttatctagttcagggcattgatctgcttagatcttttcatcttaaagagagaaaatacaaattatttttagacctgaaatcaagtgctcaactccaaacaacatttctgagaaaaaaaaaaaaaagtacctggaaggaaaaaacatggcagatgcacctactttgtctctgtgtagtcactagaactccatagttacccccagaattcacatccgtcagattcataggacactcctgcagagagctcattacaacaggtgtcattagctcttttacatcctgtgtacaaataagaagagggattgaaggaaataagaattctttgaaatattaaaggtttaggaacatgggaagatcaaatggcaggcaggaagtggtgaagcacatcatctccctgaagggttctgcagtccccaggcccttggcgcagcctgggccaattttagatttttgaggaattagggaacagtagattcgacctgtgattacatgtcagattttgaatgaatggtaatcaaattattagtaaaatgaaattttatgaaaccccagactttaattctctataccatttatgtgtactaattatctttttgcttaattttcttaatttcatgtgtaattgaacattagttatctcttttttgtaaattgcaactgaaaatgtgtgttttgggtaattttaaaaaatcacaggtctgagaaaaagaagatagatcatggtctgaaagcaagggaataaaacacacggtgtattttacaagaacacattcaaaatacataaacaagaaatattgaaagactgttcttatcacaaggaaatcataaatgtttaaggagagggatatcctaattaccctgatttgatcactacactatgtatacatgtattgaaacatcacatagtacacccataaatatgtacaattatgtgttgatcataaattttaaaatggaaagattaatatgaaatgcagaaaataagacattctaaatgcataataaagctataaaaatatatacaaaaagcagttgcttgcatggtgcagctgcacattagaaatgtgcttgtaattgaaacgttcatttttatagtattcaggaatagtgtgttgatcaaagaattttcattgtatctcagggaagactgggttgacctaacttatagattacagagctataatctctgtaatcagaagcaatgtaacaaaaatatgcaggtctgaaatggacatatataaccaggcctcacttcactgcctaaaccaattacccagtgagtagcagccacattttgaagtcttttcaagtaaggaggctcaagctgaatgacctccactcacctgttcccaccccttatccctcagtaattcctgacaatcacattacgagaccaagggtgcttaagattagtcactgtgataccagacagtcttgctggcttcttcacttgttatgaaatatttaaaacaaaaactttaagacagccatattcattcagaacatgtataaactataaggcatggactatccagtgtttcagaggtccgaactggttttctgttttctgctataacataggttatttattcattttcctcatgtgcatgtttgaataagaagaaaattttgtggtgtaaatgtatgtatgtttgtgtatgtatatacatgtttgtatgtcatgtatatatacataacacatactgaatggtacagggattgtaagtattaatgttctacaatattagattacacataaattatgactgatcttatgacagaatagaagccaattaactacaagttatatttttagtgcaaattcatttttctcaaacactgtcagtatttttaattgagtccttaattactttgaacatgattttaatttactactgtctagaaattagtggtgttaataatctcatgtgtcataggtaagacaggtaaaattaccacttcaaagctttaatgaacaaggaaaaatcataaacttctgtgtaattacaaatgtgcaatctaataaaatacatcagaactaagcacactgctttggaacttcccatcaagactttctgccttgaatgccatgaagttatcttacatgcatcaaatcacctgtttggccttcactcgttatttctcaggctgctcagaatattgacctccattaacagttggccaaaaaggttagctagaaggccaccctccattgtgtatttctgaggttgtcattatgagttttaatttatcatctaaagaaatatgtcctaagatgaaaatgttaccattacagcttgatctctcaccctcttctcttgtattatttcttaataggtgtgtcaaggatgccacaatgccatcgacccagaagtgcagcgggtgacctataacaatttcagctggcatgcatccacagagtgctttctgtgctcttgctgcagcaaatgcctcattgggcagaagttcatgccagtagaagggatggttttctgttcagtggaatgtaagaagaggatgtcttaggaggagggcacccagaagtatcgagccatagctatccaaagtggtctgcatttctactgtaaaatgcaatttgaaaaaaataaaacgcaaaaaaagaaactgtaaaggaaaccaagagattttgtttaatttttttggccattttttcttcatcaattttttttcggtctcaacttttaaacttggtttaagcatttgatttgtaaaacagtaaataattgtatctttccatagcttttcaaatgtgaaatcatttttggaagcttggatctcattaaacttcatgtctctattccatttgtgccacacacttaaaagttagtgtactgaatggaaagatgagcattcctagttctacacttcttttttccccctcatgtgtaaaatgaaaagaaaactaaatttgccctaataccaaggcgctacgtttattgcctcgtcttattcactgacctttgtaatgatacacagtgaattctttttgacaaagagaaatgcagtgtagtatgcagagctgctgttttaatgcctatgcatttactctttcctgatttaggcagaggtggcattttctttattgcatttctctatttttttaatgtaccctaccttcagtattctctttgtaagttggtgacttgcatctgtggccttgaatattttattatcacatgtggcataacagtatccacactttttagttctttatttttttttttttattttgagcaattctcctgcctcagcctcccaaatagctgggattacaggtgcatgccaccacacccagctaatttttgtatttttagtagagacaggttttcaccatgttagccaggctggtctcaaactcctgacctcagatgatccgcctgccttggcctcccaaagtgctgggattacaggtgtgggagccaccatgcctgacccacacactttttacttgtatagatgatttttggcttggacataaaagccaagccacccatttgcttttaatccaaagaacatgtatagtttttgtacccagagactatgatttatattgattgcacttgcctgccatgatttagataagattttttttgcatggtttttattctttcctaatggatcctgttttataatacttccaagcctgtccatggatatatcaaatgtcttcacttgtatattttcatggctaggtatttctaatgtttattcttccctgtgtacttctacacatagctatgcactatgaaaattaaatggaatgaatgatatgtatattactcaaaataaagtttctttcactttaataatcattgtatctttttattcatatccttttttgagtgaaaaatgcttctgcaactaagcatgtgttacagcagggggcgatgtctccaaggataaaaattacccaaacgaaaataaaagtctgcctctgacaggacagcacagaatctagatgtttcattatggagaaaagataaggtttatgaaactttcaaatcaggacttttaagtttggtcatgcaagagtttttttctttttcaaagaaagggaaagtaattttaattaaaatttgggagagcttattttctattcagttggatctaacaagccttttatacttgggtttcaactctggtttctttatatgtaaaaaatattaaaagaagaattttttcatggaaacttatcgtgagacagaaagcaaatggggaatagtggtagactcatgcttcctaatgttagcaggccataatactttctccctcagtctacaattatttctgtcatagtgggagttgcagttttctctgatacatacccagaataacttgacttttttttttttccagctcctgtttggccaatagtacttctctttacattccacctctccactccccaccaccacacacacatgcacatgtgcataccaagcatacaaatttactccttctgcactatgccttcaaccatgcaaaagtaacttttggagcttggatacgtgtcaccttatctaaagtaatctaattctgcatataattttagaagctaatatcacaagtatcattactgtctataaagatcgctttatggttgctcatatctttatcttaaatggcaacaaatatattttccacagcatattgtccacaaagttgtacaacttaacttttcccagacatggctaagtgagaataaactgaaacagaacccatctgctactaacacggccaatcccttaggaaatctggattgctcttgagacatactagccttcatatttgttgcatggtacctacatatctccctttcctccttcctttttttttttttttttttttttgaggtggggggggcggcaaatgagttagggattattctttcttttcattgactagctgaaacttctattactgaagtcttcaagcatagatttccaaatttgactttgaagtatttcagcccaatttcaccaaaggcaagggattcatcactgattcattctcaaggaatttccaacacatagcgtttaagcttatacaacttcaccgtagttaccaaagagacaccaacacccaagatcagtattcagcctttgtcttgagatgccttggcatatctgaacttgtcttctgggtattcacttaattctttggaaaacttgggtttccgtcaatgtctctataaaaaggcactttgccacaatttctcactcatctgccccttcttgacctctgctgatttaaatgcttgccgacaactttgatgactgtaatgaatgcccacatgtatgcaaaggacccactgtgctggtttatgtgtatgtgctttgaccacacaaaacacattctggctcgattaatagattaataggatcttttttcatatatttagttgatgcttaaatagctttggctaattattttgttctttcacagagaacttgtcattgtagcttttatttgatctgataatacaacttgaagcactcaaaataagatgccattaactttttatacttgttttgaatggcatcttatgatgacatttacgaaggctgctatcaattttttttcagtgatactcctcaccagggtatcttgcccctcagccaataataaaaccaacttgtatcctgttatctttacgagagtcagacattagtgaatacagagactaatattacagttgatttctccataaatattgatggactgtgaagacatcatggtatatagttccagggagagctggatttaggaatctagacaagacactttttgccacatcccattgattctcctcctctcccattacagtaggatggaggacaacattgttggatttgaagagtaagaaataccgggcccaagtgttgaatggatataatgtattgaagtcatcaagaataaccacagggaaaatggtggagagaagagtaagccagagctaaagttataaaagtatgtggagaagtattgtggcatctgatagaagatggaaactcagggtggagatgggtggtaaagtctaaggccatgtgctacacctcaaagagctgtgattgttaggaaacaaacagcctttaatgggaaaaacagtagacggtgaagaagacacctaccccacagggattgtgccagacactacttgaaatactacagaagaaataggctttggggataactaggtgtcagttggagaagatgatgaggagtttgagagtacaaaggagtctgcagttcacagaagttggatgtcagtgggtacagagataagagtataggaggagatagggccagattcgaagtacaaagcagaatgggtatcaggtttccagtaaggctgaaaaatctagaggccaggggtaataaacagggtcgagaggcaggctaaggttagttctggtagtttcctagggaaaagtgggttatcagggatgcttttggctgtaagtaactaaaaaactaagagtggttttaagacaagatagaggctaacccaaatttggctcagaacaagtttatttttatctctctattcttccaccctctatatgttgttgccttctattctcatttgtcccttcattcaagcaacactccctcatatgacatcatccaaaataataaagaagagaaatggcaaaagcgtattttacctctagacaacgaagaagatctttcccaggggcccccagctgattcacctgcctttccacttcattggctacaaatatgtcacctgctcatcctcatcaaaggcaaagggaaacagagttgctatggttgacttatccaagcacaattcataccatgaggtctgggcacatgctgcccagaacaaaattattttgctaatgtatgattgtttagattcagcattgtttagataactaaaaggtatgtttgtaaataagtatgaatctaaagttttgggtttctgttgacttgtgagatgagtcaggaacatcatttggggaatacctttcttaggtaacatttcacttttcatggccagcaatgatgtggagtcagggcaggagacactgacgtccttgtggttctggttactggactatgcttcgcttgctcctcccagcatctcattctgtctgatccattctcaaagccacaggtcactgttatatgtctatcaagcaccacccccacctctctctcagaagcgatgatgacttattccttgatgttcctatcacactgacttatctggccactgaaacacttatctgaatctgtctatgcctgcttctccattactgtaaccaatactttggctgataaacttagcatttctcacaaggtatactgtaagttcctatcagttcccttgttctaattcagtggctctcagactttaacatgcatccaattcacctgcagggctcgttaaatgcagactactggactccactccccagagtgtctgattcaatagatcttatacagggcctgataatttgcattctgaacaaattctcaggcgatgcttacactttaagaaacattgttctaatcctgagaatattgaggaaaaaattaaactcattttctcctattttctcctacttcactctcagcaacacatttcttttttttttctttttctttttttttttttttttgagacagtttcactcttgttgcccaggttggaatgcagtggcgcaatctcagctcactgcaacctctgcctcccaggttcaggccattctcctgcctcagcctcctgagtagctgggattacaggtccccaccaccatgctcagctaattttttgaatttcagtagagatggggtttcaccatgttcgccaggctggtctcaaactcctgacttcaggtgatccacccgcctcggcctcccaaagtgcagggattacagatgtcagccactgcgcctagcccagccttcaccaacacatttctaacaccagacataagggggtgtttccccacacaccaagcaatcggaaaattctgcagcagacacaagccaggtgccctccagtttacttctgatgctatctacctggaggctgtgttagatcccacaggttgagtgctcactttcacaagactgttccccatttccaataccaatctcaagccccaagttgctttacctgtgcttctggtcaactggctatagaaatcaggcttcccacaaccccttattcaggttctattaacttgctagagccactcacaacagaactcagggacacaatttacttatatttcccagtttattataaagaatgttaccaaggatacagatggaaagacacataaggcaaggcatgtgagaaggggcaccatgctgccattcgctctctgaggtaccaccctccaggaaccagaacgtgttcagttatttggaagctccaagaatcctgtcatttggggtttttatggaggcttcattacataagcatgattgatgaaattattggtcattgttgatcaacttagccttcagccactcttctctccctggaaggtgggtggggggagctgaaagtcccaaccccacctcttatcctgccctggtctttctgttgaccaacccctattctgaagctacccaggagctgccagccatcagtcaactcattcacatacaaaaacacattattactaatagattacatctattactttggagagtctatgattttaggagttaatgccaggaaatgggaagaaaggtcaaatatatattttatactatcagatccattctcttttcttctgccagagtgcaatacagagaacatattagtattcccttactgaaaaatctaacaatgattcagcctcttttcccacccttttcatgtatacacatggtcatctagccataactgaatgcttgcagttttttgaagttagtcgcttccttcatatctccatgactttgcaaagatagttacctctaagaagctgatccatgacccttccacaccccctcaagcttgaagcccatctttgttcacatacatcttgacctatgctactagttcactgatatcattgccctatttaagtgcagaaatataattttttcatgtttatttccttagaaccaaatatagcacttaacacatgatatgtgccccaaaaatggtaaataacaaaatgaattaagtggcatctgaataagccataataaatcaggtaagagttttactaattgagatgaaactcatttggacaagtttctaaaggacagagcaaaagaagaaacatagctcagtaaccgtaagtatttttttaattaaaaaatcacttgtgttttaaaaaatgacagtacaaggatccaattacataatcctcagcaacacttcttaaaattccctcttctctgctacctgcctttctcgtgcctccagctgctctctccacaagtcccccaaacctaaatcctccccaatttcttttctctcacactctgccatctccacttctctccattgcttcattcattcattcattcattcattcgcttaatcaaacaatatttattatctgctatgtgtcaggaatggttgcaggcactgggaccaatgatgtgaacaagataaacaagatccctgctcttgtggtgttttacattcaagagagaataggcctgaagtaaagaattctaacagaaaatgaaatgctggccaaatgggcatggggaggggaaggctccagaacagaggatatgttaataacaacagaagtccaaggctattaaaaatatttcagaagggcctgcaataatacctagaatggagattcaaattttcttctcagattcttagcattgctcttcaccttgacatgtgaaaattggatttctcttcaacaatctggaaggattgaggaaaggctatgatctttcacatatgaatcatttttacctgcctaagaaattactattagatcttaatactaacagagcttcactccccaaataaaagtgtatagttcctcctttctgaaattgagagtaatgtcaataactgtatatttttttcttcattttgacttccaggaagctttgagcaaaatctgacccttcactaacgtagcaattatgatttaaatcttttttccagacaatgttgttgtatgaattctcatttcagcctgcttcaaattctttgtggaatttggcagggggtcttcttggttaggattatttatcttttctaagtatcaaaaaacattgatcattataagggtacagccaggagtataggaagtagcctacagatggaacagaagccaaggctgggcagccaccaggtctttttcccctccctccaagttcctccctgaatatctgcttcttttttctttctctgtaggcacagtctctctgttccttatctgcatgatcagttagtaaagatgggtgccctaaaatttctgagttcatagattacaaatgttgtcacactgagagactgatgggctaactcttggttctgattccaaattccccaggaaaaaaaaaaaaaaaacctgattgtcttcagttgttttacagatagacaaaccagtttatgatcaggggacagagtcatgcaacctaagcaaaacagttaaaaatctcaccaaatgaagtttgagaggggaacacagtggaaataagtgggagtgaatcaaggagtttagggggtcactgtgagtggaaagacactcttctagtttattattataattgtaagtagagagttagaaggatagcatggcagacactggctagatgatctctaagcttatttccagtgaaactatatttcccagcatccactgtagttgtgtggatctttctgattgagttttggccaagagatcaaggaaagaagcaatgtagtctccttcaggctttgccatgacaactcagggcaagatggtggagccaagagataaagcaggatttctcctttgcagtgttgtgcatggaaacataacgtgggcaagaaatatgcatttattggttcaagccactgatactgggcttgttggtcataggagttaaccttccctaactagtacagataaataaataatgaagatcacgctttcatcctgaaaatatccctttactaagtcatgagtcatattgggatgctggggaactgagggtgaatagagcaaaaacttctgctgtcaattgttcaaaggctcatggaagagacatgcaggtaacagaaaatgaaaataatgaagacctgtcactgacaggagacaacggaagtgatgccaaagcagctgtttgtgatgtcaaaatatcttctctagtatgagaggttgctctcactgttaccctaggtaagtggatggataaaagggaactttgcaaaaatagaatctatgaggcatggtcacagtgggactgaaggacagggaggagtcaaagacaaccctgccaattggaagaatggtggtgacctcaacagaaatgagaaatccacttagggaagagctgagaagaaaaatgatcagttcacttgggagtatgtggagcttgaggcaagtggaggagtacagcaggcagtttgggacctgaaagtggatgctcaagaaaaaactctggctagagatatagatgaagaagtcaacagacaaaagttaccattcacatctgataatagcttactggggctccagtctccttatcaaatgtgataggacaaagacagttttgaaatgatttttacgttactttatttttctccaggtagcaatgacaagtttagtgtattttctcttttttggtgaaattatatcagcagtttctgtatttccacaatagatactgcaagttccgagacctaaaaaattctgagtattcattgcattgcaaaggttgtcaaggatctgcttatctgacaataaactacagaaaagattgtagtattaactgttttagcaatgccaattccttattttcccttttcccctagggaatttcagatttcctctaaaatctcaggtcccagtttgcacattgattttcttgtactattatgagccactgattgccgtatccattaacttcacctatgcataaaccatgcaacagatgacaatatatcacccattcctctcttatctttctttttcattttattttgcctttctgaatttttctcctaaacttttcttcctctaaattttactttctttcccaaacttactcctgatctattctcttctttctctatttgatgtattattaatttatagttttattcattcattaataaaatccatcaaacaggaattaaatatttaccataatccagatatggataaaaagaaaaaataaatatatttcatgtatattacattgaatcagcctaaatactgcagcccaatgactcattagctacagtttcattctgtattcattagcttcattagctagagtttcattagctactcttacaagttgaaggagattcttcattaactacactgctttcacttgcatcctataaatgatagacatcttatagtcccatcttactgacagagaagaggaccattaacaaaagcagactcacacagagaaaaataattcctagacaaattagctttgtttattttttaaaacccacatctattatgtcttaaagaatcatgaacttctccaaggtagtagttactcctttgaatagcagctttttcctttgtgagaagataaaaggaaatatattgacttgctgcttttcctgaaaaaaattattctattctagtgtctatttaaattgtagctagtaaggttcatatattagataatagcattatataatatttaatttcctgctgtgatcatgcaagagaatgtctttgttttaaagaaattcacattgaagtaagcatttgggggtaaaggagttatcgtatctgcaacctacacataagtgtttaaaaaaagtatagtagagagagaatgagaaagcaaatgtggtacaatgttaacagttgaggaatctgggtaaagggtaaacaaattctttgtaatattgtttgcagtttttctatagcctcaaattatttcaaaatacaaagttttaaaagttatcagtccatagttcaggggaaatttggaaatttttattataattttctcttattaatgttctcagtttaaaatatcatgtttcataagaagtctcataattatattttaccaattgaaagaagaaaatacatctcatcgaaagtcattcatctcttcatataagtggagtgttggtgtgaaggtttggctctccacagttatagtgtagtggcaaaattatattgctaaatcaaaagaattggattgaagtgtgaaccctcaacttaccagctgtggggatgtgaataaccatttaagctgtgcctcgatttctcacctatgaaacaggactatcaatccctatatggcagcttatgttttcacaaatgatcatagcaatatttctggtcacacgttcttgcagaaccttgtcgacaatcatctggagtctatcttccctctccttgaaactgagtggaactttgttactgcctggactaacagactgcagcatgtctgtctggctaggcaaggtcatcagaggtgataggagctctccaggatcactctcaccctctctctatctttctctctctttctgtctctttctctctcccccaccatctaccctgggaatgcttgcttttgaaacccaatcataatactgtggagaaaccccaaagttttcccacccagagagtccatgtggaaagacacatggagacgaactgaggctcccagcccaatgccagcactgactgccagaaacctgggtgaacaaatcttcaaacagttccaatcctgggcctctagtcttccagctgaagcccctgacatcagaagaaaaacctgaacccactgtgtcccattcaaattcctaagccacagactctataagcagaataaatggttgttttatactgctgaatttggggtcattttttatgtggccaagacatctaacacctactgaatagaattattatataataattctgttattatataacagatacataaaagggaatttctataaaacacatacatttgccctgtatgctataaaatgttatttatacaaattcatataatttgttatttacacagatgcatttttttggatattaactttcatcttctcatctacctttcttcttcttttgcttagttattcatgcagttgtgcagccttaaacttaattctattaactctatttaagagtttataaacatcaggaatatttataatattctagactcagaaattctggtgagcactattttcaggacagtacattccagaggttaggatcacagtcatggagcaaacagaaagcctatattttcacagagagtctttggttcttgaatttctatgctgaacaaatggaatcctcaacactccaggtgctaaagtgagaaacacctttggtgctgctaaagattcagtgggaaagaacttagaatacaggaccttgtttgttctccagattctatgaaataaaggacatttatttaaggaagattgggggaagtagggatttattagtcactcatgaactccagagtactatgagtacaaacttttatacaatgtagaccttggcctcaagaagtttacagtgtcgtatctcataaacgagagaggtatttaaacaaactggcaatccattgtgataaatgcaatagtagcgagaaaatctagtgcttagccctgaagtttgtgaatatgtacaattttccaaagaaagatggtatgcaatagtattcgtaattagtgacttacctgatttattacttttttgtcaaatttttaaataaattacttctatttaattgcaactgataaaatttaggtaagatacctttgaataatttatgtgtttgtaagagagaattgtaaggaaggagataagagtactggcagctctgcttgacaaagtcatatagtacattcttttttatcccacacacattttctctcttttcccttggtccaaacaaagttctgaggatgggtgtgaaatgggagcaaggaagagaggagctggaagacagcataggtccgcagcaacatgaggtgctttcattttgaattggttttccatgtcatgctccttttttcaccaaatggcacagcactcagcatttgcctctactgggaaataccatatgctgttttgcaaaatccgtaaggtaatgaactatgaaacactattatgaattatcatcaccactcaatctttattaagcactcccttctgcccattccaatggctggcataagatggcaaacatggcaggtgaagcccctgccttaaagggtggcacctcagagggaagattcagtattctcatcgaaggctgagatgggttcttgattcttaacttataaaatgaaatggaatttctatgacttattcccatccagaagaactttgcaggataattatagaaccttttccaaagtacttatagattttacaaataggagaggaaaaaacattagaatgacctctttatcatctcttgcatgcatgtgtgagcgagtgagttgtgtgtgtgtgatcgagtgtgtgtgcaagtgtgtgtgagcgtgtgtgagcagtgtgcatgtgtgagagcaagcgagtgtgtgtgtgtgttagggcaagtattatcatatgagagtaaatttactggaaaacttttaaagataaagtttattcttactctgttctatttaaaattttcttagcattatttcaaaaagtggctctagtcaatgttatatctactttatacatacaaactcagttaatcctcacaacgacccttcgaggtaggtactttatcattttacagatagaataactgagggcagtagaattattatgattatgtaatttggaaagccaccaagctaagaagtaaaagacctggaattcacaccctgacaatcaaggcctaaagtgtgaatttgtgttcaccatgacatacttaatactgaatgtatatcttcttccctttcatatgaactatgtcaggtcacgatgtcagcaccacatagaaatagttttcttttgcttgcttgccctttcacagagatttcttccatgtgcctttgcagcttccaaaagctgtagcctgttctttgagaaagctcttctctccttaaggagttgctccacatcggattgattctgggccatgcatcatgtcagcttgcaaaagacaaaaccctttctgtttctaaagaaatttctcatattttgaaatgaaagcaagaattgctctgccgaggtgccaagggcaacatacttccattacgaagtgtttctaacaaaatgttttggagattttaaaggggcagctttctaaatatcccaggcatctgcaaacaaccagacatgcaggcccgcttttcagcccaaacattgtttctgggttgtatcatttttttttcctgaaagtcagcacagctgttgcaatgcccctttatcaattgtccaatgatcccaacaattttttttccaagagtgaataatcaaaatggtattacaggtctttgattttgaaatatatgcactgttaatataattttggccttctttagcagaatttcaaaggggaaccaaaggtttatatttataaagtttataatcattccacaaagttcaagacatttggcagtgcttgggaaacttaaaaacagtaataaaaggttactgcgaggaattcaaagctgccttgtatggtaatgctgattcaagccaccacatactgcagcattagaagtttagctgtgatttgggggttggatcagaactatgcagctgtagagatatttaaatggcttacccattaacaacaaagaaagcactttggaaaatttacaattaatatctccgctttgaaaacacattaggagtatgcggggggagaaaatcatgcattcttagcctgatttactaagcatctatcagcctccttgactgttctcaagcaccaaccttgccttgcaattgtaaactgtgcacttttgccaacctggaatgcacactctgtccctgcccagctccagatcattctgcatctgtgcttgctcaaactctggtaacccaagctcttcatttgttggcagctggtaaaaggggtttccttatgagtcacagtgtggagggaggctgagtaatataccctatcctgtgctacaatctgtatggaatgtatttgaaataaaactaaacttagagtttagttcgacatctgatttcaaacacattcttgaaaaattggagtgcaatagggaaaaaatcaccatgtctctcctgctacggaaagcttactcccctacaactgtctccaaagggacagaaactaaattgcactcattcaggctctgaggtctctgatgaggaaagagtccacagcttggcttttttagatgatcctgctttcctgttatggcaatgaagtagctagtcccatggcgaagaaagtgggaaaatgaagttgacaatgcacaagtgtcacaggctaaggcttttgtcaatgttgtttaacaaatgtaagcatctgacagatcacatctttaactgaaagaaggtaaagaatattacaagacaaagtgtgtttacaaaagtcatagatgatgcaagaacactgtttatcaccatatattcacctgtttacagtaagttcaggaaaatgggttttcttactattaaatgcagtaacatgcatttatctagaaaaataaattaagactatcaaggtctaaatataatttcaaaaaaactagacacactgtactaaccaaatattatatttttttctttttaaatatcattagatacccaaatatctgaaatgaaaaaaagattagtgacgacatactgaatgaacggaaaaactggaaaatttgtggctagaaatttagaattatactataagctagatgtatcaaactcacatattcttccaaattagagaattagttatgcttcagaaatataaaatacatatatgccagaaagtttgctctgtttactaagcaataaaataatcatatcttcttaattaatgaatcttataaagtaaatgaaatggaaatatgtctgttacctgctgcttttgactaatattcaaataaaataatcaagttatttccttcttataatttgtaacacacatttctaaatacaggtgagttgcatgagaaaaggggattgaaaaataaaaatttctatttggttacttgtaatttgggcttgatacaaaaattccttcagtaccaacaatctgatatggtcaccaggtatagccgatgttaacaaatccaccagattaaatcagtatgtagaaaatgtcaagtctgtgtttactcagttattcaatagtcaacactcagagcttaccaaataccgtgatatttacaaggcatataagaagctcaccaagtgaggacagaggcagacatgcaaacaagtaactgtcaaacacaaactgaatgtttgtgtcccctcaaaattcgtatgccaaaatcctcacccctaaggtgatggttattaaaaggtgggcctttgggaagtgattaggtcatggtggaggatgggggaaccctcatggatagcattagcgccctcataaaggaagtctgagagaaatcctttgccccttccaccctgtgaggctagagtgagaagatgactatgaggaagtgggccctcaccaggtagtgaatctgccagagccttgatcttggactttccagattctagaactaggagaaataaatttctgttgcctataagccactcagtttatggtattttattacagcagctctaacagactaggaccatcatatgcaatgtgataagccctcaatagagggacacaaaaagggagaagaagagagcagagaagacttgggggaggagggcaacctttgaactgggtcttaataagataataagtgacccaggaggagaagggtgggaattgggatagcaaagggcattccaaacatagtttcaccacagtcttgtagacagaaggcattatgcagtaagaagacatgagcatcagggagaagtaacagttctgaccgatgataagagggttattggcaggaagactaatggactttgggttggtgaagaagggaagtggggtatgagtatcactgtaaggctagctgaagagtatgactatactcagtgacattttcccaaaggtgttttataaaatattaactccatagaccacttatttattggattatttatggggactagcaaacaaatttttctttttcaagaaagtgtgggaaatgctcaattttttttctgtaaaacttctcacagtcttcaatgtgctaatgtatatggttctgcaagatatgttaataaagataaaattccccatacttagttcaccaaatatccctttagctgcacggatattttgaaaagttagtgttccatataagagagtttggaaatgctactataaggaatcgagtaaaacagaaagtcttaattaataaagatgtggaaaattcatggccaaatttgtattttaaaaacctaactttggcaagaatatggaagaagggtttgtacgtgagatatagttgggaaactagtgtctgggcaaagcccatgggaatgaaggagaatatctgaattggtagaatttcataactaaacatccaggtgttcatggcgagtgaagaagtgaatgaggggaaaatgtcaatatattacttaatcaagtgatcaaaggtaacataattcgtaatgagacagacattgtgagccttctgatgtgatgcactgagaagaacactacattacttatgttacatccctgacaacaatgcataagctgaaactagtcttgaaaatcattctataaaatcaatgggctgttctgtaaaaaaaaaaaaaaaaaaaaagttataaaaaacaaagaaaggtcaaagaaccaccccggatcaaggacgactaaagagatttgaaaactaagtgcaactgtgattcttcattgcattgtggacctgtaaaatacatgctataaaagacatcaaagagactattagaataaattgaatagatcttatgaattagataatagtacaatatcaacttttctgattttgaaaattttactgtgatttcataggataatgtttttattcttagaaaataacgcaatatttaaggggaaagaaacatgaactttgtaagttactcctgaatgacacagaataaaatagataaatattatatataaaatgcatatatttatataattggtcggtcttggttggtgtctatgtgtgtgtgtttgtgtgtatatgtacatatatacactatatatttatacacatgtgtatatagagagaatgctaaagcaaagcaaatatgagaaaatgttaaaatttggtaaccaatttgggtgaaggacctatacaaaaacattagtacatttttgccaattttctgtaagtttgaagttatttgaaaataaaaagttaaaaaaataattcagcaaccccatttggaatttatcttaagaagcaaagccaacaggtactaaatatgaatcaatgacaattattcagtttctagcttcagtaatggatgagcatatggagagcacaggctagagaggaacaggatttgaaagaggaagatggtgatttctgtttgaggaatgtttttcaaaatgtcagtatcatctccagggggacattactggtaagacacgcctggagttcttaaaagaaggagcactggagtttgagattttgaagacatctttacaagagatattctctgttcagggattcagtttcttcctggttcaatcttgggaggttgtatatttccaggaatgtatcatttcttttaggttttctagcttgagtgcatagaggtgttcacagcagtttctgagagtttgtatttctgtggagttggtggtaatattccctttgtcatttctgattgtatttatttggaacttctctctttttttattagtctagctagaggtatatcattaattctttcaaagactcaactcctggattcattagtcttttgtatggtttttcacatctcaacttccttcagtttagctctgattttggttatgtcttgtcttctgctagctttggggttggtttgtgatgttaagttcttaatttgagatctttctttttgttgtgggcatttagtgctataaacttccctcttaacactgctttagctatgtcccagagattctggtatattgtagctttgtttgctttggtttcaaagaatttcttgatttctgccctaatttcattgtttacccaaaagtcattcaagagcaggttgtttaatttccatgtaattgtgtggttttgagtgatattcttagtcttgatttctacttttattgccctgtggtccaagggtatggttggtataatttcagtttttttttttgttttatttgctgaggactgttttaagcctattgcatggctgattttagagtatgtgccatgtgcagatgagaagaacgtatattcaatcgtttttgggtagagagttctgtcgatatctgttagatccatctggtcaagcattgagttcaggtcccgaatatctttgttagttttctgcctcaataatctaatattgtcagtggggtgtttgaattctcccactattattgtgcgattatctaagtcatttcataggtctctaagaacttgctttataatctgggtgttcttgtgttggatacatatatatttaggattgttaggtcagcttgttgaattgaggctttcgccattatgtaatgcccttctgtgtcttttttgatctttgttggcttaaagtctgttttgtctgaaattagattagcaactcctccttttttctgttttctgtttgcttggtagatttttctccattcttttactttgagcctatggacatcattgcatataagatgggtcttttgaagacagcatactgttgagtcttgcttctttaaccaactgcctactcagtgttaattgggcatttagcccatttatattcaaggctagtttttacatatgcagatttgatcctgtcatcatgttgttatctagttattatgcagacttgtttgtgtggttgctttatagtgtcactggtccatgtacttaaagtgtgtttttgtagtggctggtaacagtctttcctttctatatttagtactcccttggcaacctcctgtaaggcaggttatatttagcactccttctgggacctcttgtaaggcaggtctggtggcaaatattttaccacaaagatgccaaaagcaactgcaacaaaaacaaaaatgggtaaatgggacctaattaaactaaagaccttctgcaaaacaaaatattggcagagtaaacagagagaatgggagaaaatatttgcaaactatgcatccaacaagagtctaatacccaaaatctataaggatgataaacaaatcaacaagcaaaaaacaaacaaacaaaataagcaattatgtaatgcccttctgtgtcttttttgatctttgttggcttaaagtctgttttgtctgaaattagattagcaactcctccttttttctgtttactgtttgcttggtagatttttctccatccttttactttgagcctatggacgtcattgcatataagatgggtcttctgaagacagcatactgctgcgtcttgctttcttatccaacatgaacgtacacttttcaaagatgatatacaagaaaccaacaatcatatgaaaaaatgctcaacaccattaatcattacagaaatgcaaatcaaaaccacgatgagataccatctcacaccagtcagaatggctattactaaaaagtcaaaaaataataaatgctggcaagattgcagggaaaagggaatgcctatacactgctcgtgggaatataaattagttgagccattatggaaagctgtttgatgatttctcaaataactcaaagcagaattaccattcaacccagtaatcccattattgggtatataccgaaaggaatatagatcattctaccataaagacacatgcatgcactattcacagtaacaaagacatggaatcaacctagatgcccatcaatggtagactaaattttaaaaatgtggtacatatacaccatggaatactatgcacgcataaagaaaatgagattatatcctttgcagcaacatggatggagctggagaccattatcctaagtaaactaacacaggaacagaaaatcaaattgtgcatattctcacttataagtgaaagctaaacactgagtacatatggacacaaagaagggaacaagagataccagggcttatttgagggtagagggagggagaagggtaaggatcaaaaactacctatcagagagtatgcttattacctgggtagtgacataatctgtacaccaaatccccgtgacacacaatttacctatataacctgaacatgtacccctgaacataaaacaaaggttttaaaaaaagatattctccacttgctggtgtttttaattaactgacaatttctctcttcatttaaacaatttttccaaagcaaacctgcaactttggcttgggtcttaatataatacatgaaattttccttttttatgagctagactctcctagaaaaaatagtgacataaacaatttataattaagtttagaagaaaaatttaagggtattatattgaataagtgtcaattgatagtagggatctagcaatagccacaacctggcattgcagacattaatggcaatgaagaaaattttgtatatgttccaaaaattgattgaaaatgatattagttgaggctttaaaattcctcaagaaaatcaagcacatgttttcaaccttcctaaacttcacaatctccagagtttatgttctggggtcaccttggatactagtttggttaagctaaacaacctacctgtgaaaacatttgccttaataaagacttcacttttaaataaagctcgaatttaattagaaaatgaagaaagctgatgctaaaatagattacactaatttaagactaagaaaatgtcaggttttccaaacctcaaggtataaaactgacagactcaaaatgttttgctaaaataaatataattttaatcatgtgtacccaggcaatttcaacttttccaaagcagaacactagacattcttgcctgaccctggtctgttgtaaaattccagagataccctcccatcatactgtgaagtagctcatcttgacatgtaaatatctcatacataatttattccattccttggagcaatgatttgaataaaagcaaagcagtgtttctgctgtctttactgtaaatgctaatctaagaatatcagagtatctagccagactgcatgggtttgagtctgagtctgccacttatgaactgtgatcttgtacaaggtatggaatctctttgtgccttgttttcccatctacaagatggagcaatgacattacttagagctttggtcacattatgtgccaaatcaatttgccaaaggaaaatgaatcctacctgcctagatgaacagagtttcatcttcctccagaatataattcttggccaagaaactacagaggtgcttacttatatccgaagggtcagccttaggacttcttagctacaatgcagatagtatttcttgagatgaaaggactccaccagcattattcataagctggcagttacagaaacaaatgtccccagcgctgctgctatggctgctgtcacttctgccatgaccccaggaagtttctagaagtgagtgtggtcactgctcatgctctgcctgtgtactgtttaatattaccatgctctggcctagaagaagggaacccacctttcttctccctccctctgccccaacaactgtgagctcatcattagagttcaagaaccctaaaagctggtcgatcactaattttaaattatcaaattgtctattttggtattttccttgtaaattttttcaataaattatggccacaggttatcctgggtaaaatgcttgtcccaattccttggaatatcatctgaggctaggaatagccacggttgtgcatggatgtggcatcatgtgcagattgtagaataccactgcaaagcccaatttagactccatgggtgagatcattctaccttatataatacataaaaatgctcagggtatacacactttgcaaaatgctttgaggaaacattgttatgcagcatggtctccactgaacagttttgacagaacagggcacttaagagcagctgttggccaggcgcggtggctcacgcctgtaatcccagcactttgggaggtcaaggcgggtggatcacctgaggtcaggagctcgagaccagcctggccaacatggcaaaaccccatctatactaaagatacaaaaaatagccaggcatggtggcacatgcctataatcccagctactcaggaggctaaggcaggagaactgcttgaacctgggaggaggaggttgcagtgagtcgagattgtaccactgcactccagccagggtgacagagcgacactacatctcaaaaaaagataaaaataaaaaagcacctgttacaggaaaataaataacaataacaatttaaatccatctcttgataactcagatgactgcatgttcatgaaaacaccctcttcgatggtcagtatgatctctctgaagcaaatagaatatttcttcaaatgtcttttacatgtcccattaattgtttcagtatgattataggagacagaaacgatgaggtaatgttcaggaaagcagacacaaagaggcagaggaagtattcactgatcagggccacatatgatgcagaggaaggaagtgcaaagagcaaactgggacctgaagtgggttgaaggaaacttctcacaaattctgttataactcaataaagaatgtgtttgagatttaattaaaatgaagctcaaaaagactaatgcatgaatttagaataattccaaacccaactagagaaagcagtaagggtttctacccatgtaccacctctcaagtgtcttttgcattctgctcaaggaatgcttttaataaaaaaaaagaataaaattagaaatattttctgatgagtgatttttcctagtaccaatttatgatgaacctatatttttcttaccaaaactatggatatttttttacacacaatagtttgccttttcaacacagagttagtaaccctaatgagaagaaatcacaagcagaggatgagcttactgctaatagcaaccctaggtgacacccccaggacagtgtgtccataggggctgagctactgtgctataacatgctgagaccctcagcgctggggcagcaaggccagggatggcagaacttcatctgggctcctcagagggcagcctgaggtatgctatgggccacacaggtagggaaccccaagatggccactcctgccactttgcccaggtgggatgcaacagccacctcccaagtgcctactgcccattgtagacaagggtcctacattagtttcctgtagctatcgtaacaaattcccgaaaactcagtgacttaaaagaagaaaagaattattttcttgcagtgctagagtacagaagtctgaaattaaagtgtcagcaggggttatgttccttatggaagctctaggagagtctttctttgtctcttctagtttctggaggcttttggcattctttgacttgtggccttgtggctgcatcactccaatctctgcctccgaggctatatcacctcttccacttctgccgaatctgctattacagactcaatgtgtgtgctccacattcatacatgttgaaaccctaatcccaatgtaacagtatatggagatagggactttgggatgagtggagcccttatgaatgagattagtgcctttaaaagaagaggccagaaacctaccttgctctttttttagtcatgtgaggaaacagcaaaaagttggcagcctacaacctggaagtgggctcacacaagaatctgaccatggtggcaccccgaccttagacttccaacctccagaactgtgagaaataatttcctattattgacaagccacccagactatgatattctgctataatgccctgaagtgtctaagcagtcttccctgtgcatttcttataaataacttgtcagtggatttagagccacacagataatccaggatgatctcctcatctcaagatccttaatttaattatatctgcaaagttccttttcccacgtaagataatagtcacagattctggtaattaggacatgggcatattttgtgagggccactattcaactcactacagagtccatgagactgccaagagagctggtgtccaagatgttcaatagcttaaggtgagcctggtaggggaagggatggggacagggaaggaagaagcagaaagctcaggtgggtgctgggaaagaggtagctccaagtagtggcccctacattctggcatcacagatattgaatatttctgttttgtcatccaagctggctgcatagtagctcctctaacacacagacctgtccccaaattaaattgtcattatttcaaaatacttggcattaaaaaaaagtattggattcaaagatctattctttttagcaagggaaattctaattttacagttgtttttgaaaaaaaggcacaaggtgctaaatttttcaaatacactttaactgttatgttaacggttttaatttttataacttatgcaaaaaagtgtcttatcaatgaggattgttaagaccttgcaggaatcatcattaataagacttgactaggagactaggaagtgtttaaccatttcaggcatgaaaatatgccaaagaaaaaaaggtcaggaaagcatactgaagtctcattttaaaaactgcaaagatttgactgtttcaatattcaatcttttcattaatatttgtgtttatcacaatgatatagataaagtatacataatatgttttttcaacaggtcccatgcagatgcctgcaaatcccttttagtttactccagtgtgaaaaagttagaactgttatatgaaataagcatgaaaaatgctttttctcttttcctctgatattaaattatatataatatatataatagcagaggaatatataacatatatacaatagcagaggaaaagtgtttgtgtgtgttactacgtatagcatatatataaacacaaacattttatatatacataatttccataatatatattacatattcagtgatcaaaattactctttagttagaaaagtcaaagaggaatatgtgggaattggggaatgggaagaaagaagagagaaaagaaaggaagtaatttgggtttaagtaaggctgagagtgttaaaaatgagaaagtacaagtggttagaaaaaaaaggatatttgcaaagaaagtcatgcagccaaaagggacccattatggaaagtatttggtttatagtttaatgcctattcttcagtctacttatttgttaatttatttactctacttcgctcacaagcttcctctcaaaattgtaccactctcctcaggcaggtggataaagtacggacaaataactaggaaacagtccaagactttatattgcttgtcacagcagtacctcttgtaacaattttttcatgtgtgtataacaaaaatatgtaggccagtggtttcttcagacaaaagtagtcttcacattccagaaactcatggggaggttgttgaaagaacaagttgtgcacacagaaacacacctgaagaatcagccattccctggactggaactttagctctgttttgaaatagctgaggtgatgttgacctccctggaaaagacttagtcaaccccaacaaggtcattcaccttgggagcacaggtcagagtagatttggccaatcagttcatggccatattcgtattcaatgttgttggttcctcaggggatgggacttgggtttcaacacccaaggaaacagcaagtgaagacatcaatttaagaagaagaggaaaaaaatatgactactaggacaaattaaagacttggttgtgcacaaacagaatgccaggggttagcataacatggggtggtgaaagttgaccagaggtggaggccagagccctggacactagtttgcacctactgcaagtcacttttcatgtcagatcctcatttttctcatctgtaaagagaaaatattttatgaaacgatttatgaggtttcctctcatctaattctacaaatgctctgtgaatagcttctgactggctaaaaagtctcactccgtataacttaagagagtgtgactttgttgtggtatgtccttgatcctggagcattcaggaagcttgaaatattttctctatgacccttcactctttcagtgatgaaacttgccacaacttgccacaacacaaacttgccatgtgtatagtatatatacacatgacccgatccctatttttattaccagggatttggctctaactttgcccaactctcaggtgatactaaactctggagatttccctgaccttcacatttgctgtagaggactaaaccctagtgctagatggagtttggatgctcactttcattacctgatccttaaaaatttagagcaaatatttctgatttaagataaaattattaatatgatgtgttaacatttgtttctggggtgttattatagcaattaatgagtcatgtaggagctccaaaatagcaattcagaaatagatattactgagtaagcagtaaaataaatatcaaaattctaatgattgccagctttgagtaaatcatgccagtttaggaaacagaagtgtctatgatactgctgaactaactatatacagccccccaacaattaaagccatattaatttgaaagcagtcagtaaatataagaaacttagttataatatataatatatgaatatataatataatataacttagtatatataagaaacaatagatcagtagatcttcaccatgactgcatgttagacctatcaagagagtttttaaaaattagcttcctctgttcccttccctacccaatcaattaaattgggctctctgtgatgcggccaaggtgttaatatttgtgctgagttccctaggtaccaataatttttcaacagacagggctgagaaacattgcagtctattatttttctggggcattatatggcacttccatagagtaaaattgaaacaaagaggtttgagtgcaaagtatgactcacccaacttctcttagcctcaatttccccagctataaagaaagagacagtatctgctccaccaaattgttgagaaagttaagtaagttatatttgaaagtatttgatacacaatagatgctcaaaaggtattcattgaatgttgaattcattttctataacttttgttagcttaatgttaggtggcgatggacagtgatgatctcagtgttaatatggtgaccatagtaaagaaggtgcctgtaaaatatatgtgaagagtaaatgtagacattgatttttcttcttatatacaaacatatagatgagaaatatgggattttgttaagtttcttttatatactttaataactcatgttattaagttcattatatatatgtctatttatatatagctattaattgatctaggtatagatgaggaatatggcatgttatattcatcttaaaaatgtgtaaaatcgtgaattcaaatataaataggaaataaaacaacaacatgacattaaaggggatctcatcagctagatatgagcccttaagaggcaggagaccaacatgcccctctgctcagcctcaagcctgtcactacccaagccacaccttggagctcagcctagagggtctccatcactcacctgaagttgaatctaaactccctctgtaacagaacgccagtctggggaactctgaattgactacaggttcacagatagagattgcttaattggaagaaaagtaagaagaaaaatcaatgtctacattcattcttcacatattcctcaatagatctatatatctattgattgaggggtcatatttctacatcttgttcatttgtaacttggatattacatagtaaaatctgtttgattgccatccttgccatctcttgtaggacattttggctctaattttgaaagctggatattactttctttccactttctgtaaactgaggctaggaaggagaagaaagggaatactccaatgaagccacatacttcctttctgaaacactgttaaagatactctggcaggcccccctgcacccagctgggagtgtattcactcctttatcatacaggtaggcttctgctatacccatcttggtatgaagccctggaaataagcaaattcttacacagtgggatcatgcagcaagagtctatatactcaaaagtgtttactaaatttttctcttaaccttccaagggtacctcaccattccacctgtctccccatggaagatgcgagtgagaatgccatgactctgtgacctcacaatactaaaagaattttgcttctgcaggatgggaccacagccagaactctatgccacaccagaatttacttattcaacacatatttctgagtgtcaactctgtgccaagtatcattttagttttacagcagtgaacaaaatacacaatgtgcctgaactatgaatattactattgttgacgtgacaacaatgaatgaataacaaaacagatttatataagccaggttgtataagtgttatagacaaaaatgaaataagtgtttagccagggttctctagagggacagaactaataggatagatgtatatatgagggggagtttattaaagattattgactcacacaatcacaaggccccacaataggccgtctgcaggctgaggaacaaggaagccagtccgagtcccaaaacctcaaaagtaaggaagtggacagttcagccttcagtctgtggctgaaggcccgagagactgtggcaaaccactggtgtcggttcaagaggccaagagctggaaaacttggagtctgatgtttgagggcaggaagcatccagcacaggaggaggatgaaggctagaagactcagcaagtctgctccttccaagttcttctgcctgctttattctaaccatgctggcagctgattagatggtgcccactcagattaaaggtgggtctgcctctcccaatccactgactcaaatgttagtctctggtaacaccctcacagacacacccaggaacaatactttgcttccttcagtctaattaagctgacactcaatattaaccatcacagtaagcatatcagagactatagggtctgctgtttgggacagggtgttctgaaaggacctctggtaaggtgacttttgagcatagacctgaagaaaatggaggaatgagccctgtacattgtcagggaagaactgctctggcagaggaaatacagatggaaagggcctgcactggaaaagtgatcggcatgttagaggcacagtgaggaggccaacacaaccggtgaggagtgaatcaggagaataataggggatgaagtcacagtattgggacccaggtcatagagagccctggaaggcattttaaggacttggactttgaggaaaatgagaaaccattggccagtttggggtacatggatgatatttaaccagaagattctttttcctctctatcaagtcatcactttccacattttatggaaagaagttttatcttttcttgttaagctattggtgaatttttaactttggggttttgtttcggataggtattgggagaaggagaggctgtcaacccatgccactatgctatctctaattctgccatccagaccgagtaagttttatttccactgtattctgccgtccatggcttgcaggaaggggttcacccctactcaccctacaggccacttccatgaagagctgtgcccagaggctccctgggcccagcacaacaagcacattcacgtatccccagcctcaaatgagcctcatttacagtccagcagtgtgtgcctgcacggtagttctttatgtttccttttcaataaatatatgactcataccagtattgtcctttgtttagctttcatctttctcagagtttgaagtgtttgtaagaaatagttgtagatttatttttaaagccttgctaccttaaatcaagaatttttttttttttttttttttgagacggagtcttgctctgtcgcccaggctggagggcagtggtgccatctcggctcactgcaagcaccgcctcctgggttcatgccattctcctgcctcagcctctgaggtagctgggaccacaggtgcctgccaccacgcccagctaattttttttttttttatatttttagtagagacggggtttcaccatgttagccaggctggtctcaatctgctgaccttgtgatccacccacctcagcctcccaaagggctgggattacaggcgtgagccaccgcgcctggccaaatcaggaaattttaaaagcataacatgccactgtatttctttttcttatgaaaagcaataatgctaaatttacaggcataatgttgtattggcattaaagatggctatcaatccattaaaataatcaatatgttatttcttgacctcctggcctcatgatccacctgcctcggcctcccaaagtgctgggattacaggcgtgagccaccgtgcccagccaaaataatcaatatgttatttctgatgctgaatgtatacacaaaagttttcaactatctgaaaaagaggatcttctgataaatattcatcatatcctaatttttaaaattagagtacttcaaatttagatgttatgttaaaaaaaaaaaactccaaattctcacacgtgaaacctgatcttggttctgatgtttactttttttgaagtaagtagaaataattgagtacagaagaaacaattagctagatttgttaaaatctggttaaatattgttttaattatcacagaagatgtaaagaacatgtaattttatggattatttatagaatagtgggcaaaaccaattaggtattaagaagtgaaccttgaatttatgcatttttgtaacagaacttctagctgtactaaatacaaactgaatttttggagttaaaaaactctttcattacgcttaagatatattatttatcatattaataagcttctcacatcatacattgtgtattgttattgtggttatttttgtcaacaatttttatcaaatgagttctaatttttggtggagaaattttggcaactacacaaagaatgtaccaaatatcacttctgcaaactacacatatgaacttttcaaaatccataaattactcttctctggtttggctgaagttagagaagcattgttaaataatatttactgaacactttttctaaaaaaaattgtgtgttttcataatgtgttttgatttaaaagaaagttgttattattagtgaaaacattttttgtaatgagccaataaagtcctcaaaattaaaatgaatcatactatggaagacctacatttgatacacttttttttctctgagcaggcaaacgtacttaagacctttgtgtaagatcagaaaatcataagacagcattaaaaagtactatacaggaggagatggaacaagatggccaaatagaagcctccagcaatcatctccccgaaaggaattgaacaactatcaaaacaaaattgaacaactatctaaacaaaaaagtaccttcataaaaaacaaaaatcaggtgagtgatcacagtacctgcttttaacatcattttttaaaatactttaagttctagggtacatgtgcacaacgtgcaggtttgttacttatgcatacatgtgccatgttggtgtgctgcacccattaactcgacttttacattaggtatatctcctaatgcgtattccctcccccctccccccaccccacaacaggccctggtgtgtgatgttccccaccctgcatccaagtgttctcattattcaattcccacctatgagtgagaacatgcggtgtttggttttttgtccttgcgatagtttgctgagaatgatggtttccagcttcatccatgtccctacaaaggacatgaaatcatccttttttatggctgcatagtattccatggcatatatgtgccacattttcttaatccagtctatcattgttggacatttgggttggttccaagtctttgctattgtgaatagtgccgcaataaacatacgtgtgcatgtgtcttcatagtagcatgatttataatcctttgggtatatacccagtaatgggacggctgggtcaaatggtatttctagttctagatccttgaggaatagccacactgtcttcccacaatggttgaactagtttacagtcccaccaacagtgtaaaagtgttcctatttctccacatcatattaaggaaagaggcactgaagaggataggaaaggcagacttgaattgcctacaccactcttcccccatccccagacagcagcccctcatgatgcagagagagaatctgtatgcttgagggtgggacagtgcagtgactgtggaattttgcattggaattcagtgctgctctgtcacagcagaaagcaacaaaggccagaactcagccagtacccatagagggagcatttcaaccaaccctagctagagggaaatagcccatcccagtgacagaacttgagttttggcaagtcttgccaacacaggctaaagtgctctggggttctaaataaacttgaaatgaatggcagtccaggccacaaggactgcaatttctgggcaactcctggtgctgtgctgggcttgaaaccaatgggcttggggtgcacacaacttagtgagacatcagctggggtggcctaaggagttcttgtgtcacccttcccaaactctaggcagtgaagcttgcaacttcaggagagaaccattccttccacttgagaggagaagggagagtaaagagtactttgtcttacaacttggataccaccttagccacagcaggatagagcacagagcagagtcccaggctcccattccaggctctagctcccagatgacatttctatacataccctgggtcagaggagaacccatcaccttgaagggaaggacctagttctggcaagatttatcacctgctgactaaggaacccttggtccctgaacaatcagcagtggtagccaggcagtacttaccatgggtttggggtgagattcagagccacgacccagtacattcccagcttttgtgactatgaggagaaactcttctacttgaagaaaagagagggcagaataaacaagactttgtcttgtagtttgggcaccagctcagccacagtggcgtagagcagcaagcatatccttgtggtccctgattccaggccttggctcttaggtgacatatctgaacctgccattggccagaggggagctgactgccctgaagcaagagtcccaggcctggcagcatttaccataactgactgaagagtgcttggatcttgagtgaacatgagcagtagcaaggcagttctcactgtggacctagggcagtggtagccatgaggagagactcctctgcttgtggaaagagaagagaagagtgggaagaattttgtcttgtggcttgggtgccagctcagccacagtagaatagagcaccaggtatatttctaaggtttccaactccaggccctggctgctagacagaatctctggacttgcacagggccagggggaactcaccaccctgagaaggacacagtctgtctggctttgccacttactgattttagagccctagagccttgagcaaacataggtggtagccaggcagtttcacagctgactctgagtgaaacccaatgctgtgccggcttcaggtctgaagcactgtcctagtggtggtgggtacagggttgtttgtgtcacccctcctctagttccaagaaactcagcacacacagagagagagagagagggagagagagagagagggagagagagagactccatttgtttgggagaaagtaagggaggagaacaagagtctctgtcaggtaatccagagaattattttggattttattctagactatcaaggcaatacctctatgagtctgcaagagccacagcattactgggcttggggtggctcctaatgcagatatggctacagtaaccaaaaacttagattacaacactgaagtttcttcaaatgcctgaaaagcctttccaagaaggacaggtacaaacaagccaagactgcaaaaactgcaataaataccttatcctaactcttcaatgcccagacactgacaaacttcaaggaaaatgacctcaccaaatgaactaaataaggcacaggggtcaatcctggggacacagagatacgtgacctttcagacagagaattcaaaatagctgttttgaagaaatgcaacaaaattcaagttaaaacagagaaagaattcagaatcctatcagataaatctaataaacagattgaaataatttaaaagaatcaagcagaagttctggagttgaaaaatacaagtgacatactgaagaatacatcgaagtctcttaacaaaattgattaagcagaagaaaaaattagtgaacctgaagacaagctatttaaaaatacacaatcaaaggagacaaaagaaacaagaattttaaaaaagaagcatgcacaacacctagaaaatagcctcaaatggcaaacctaagagttattggccttaaagaggaggtggagagagaaagataggggtaaaaatgtttattcaaagggataatagcaaagaacttctcaaacctatataaacgtatcaatattcaagtacaagtttaacccaaataagattatctcaagacatttaacagtcaaactcccaaaggtcaaggataaagaaggggatcctaaaagcagcaagacaaaagaaataaataacaaacaatggagttccaacacatctagcagcatacttttcagtggaaaccctacaggcaagcaggagagttgcaggacatatttaaagtgttgaaggataaagatgataacctttgaataatatacctggtgaaaatatccttcagacatggaggagagataaagacacccagacaaacaaaagcttaggaatttcatcaacaccagacctatcctacaagaaatagtaaagggaattctttaatctgaaagaaaaggacataaatgagtaataaatactctgaaagcaccaaactcactggtaatagtaagcacacagaaaaacacagaatattataatactgtaatcacggtgtgtgaactactcatatcgagtagaaggattaaaagataaacctataaaaaataactataaccatgtttcaagatatagacggtattataagatataaatagaaaaaacaaaaagtttaaaagcagggagatgaagttaaaatatggagtatttattagttttctctttgcttgttgtttgattatgcaatcagtgttaagttgtcattagtctaaaataatgaattacaagatggtatttgcaagcctcatagtaatctcaaataaaaaccatgcaaaagatacacaaaaaataaaaagcaagaaattaaaatgtaccaccagagaaaatctccatcactaaaaggaagacaggaaggaataaaagaaggaagagaagactatgaaacaaccagaaaacaacaaaatcaaaggagtaagtccttaccaataatcacattgaatgtgaatggactaaactctccaatcaaaagatacagaatggctgaatagagtttttaaaaagactcaatgatactataagaaacacacttcacctataaagacaactatagactgaaaatgaagggatggaaaagatattccatgccaatagaaacaaaaaaagaacaacatttactatatttgtatcagacaaaataggttttcctgactgtattagtctgttctcatgctgctaataaagacatacctgaaactgggtaatttataaagaaaagaggtttaattgactcaaagttccaaatggctggcctcacaattatggctgaaggtgagtgaggaacaaagtcatgtcttacatggcggcaggcaagagggcatgttcaggagaactcccctttgtaaaaccatcagatctcatgaaacttattcactatcacaagaatagcacaagaaagacccacccctatgattcaattgcctcccaccaggaccctcccatgacacaagggaatgatggaagctacaattcaagatgagctttgggtgaggacacagccaaacaatatcactgacaaaaaccataaaaagagtaaaagaaggtcattatataatgataaaggggtcaattcatcaagaagatagagcaattatatatgatacagcacttgtaaatatatatgcacctaaaaatatatgcatccagatataaaaagcaaatactatcagagataaagagagagagagaaaatgcaatataataatagctggtgatttaacaccccactttcagcattgacagatcatccagacagaaaattaacagagaaactatggacttaatttgcactatagaacaaatggacctagtggatatctacagaacacttcatccaatggctgcagaatacacattctcctcagcacatagatcattatcagggatagaccacatgttaggtcacaaaacaagtcttaaaacattaaaaaattacaataatatcaagcatcttctctgagcacaatggaataaaactagaaatcaataacaagaggaattttggaaatgatacagatatgtggaaattaaacaatatgctcctgaatgaccagtgcattaatttaataaattaaaaatgaaatttaaaatttcttgaaacaaatggcaatggaaccacaatataacaaaaccttgggatacagcaaaagttgtgctaagaggaaactttatagctatacatgtctacatcaaaaaagtagaaaaaacttcaaataaacagcctaacaatgcatcttaaagaactagaaaagcaagaccaaatcaaacccaagattagtagaagaaaagaaataataaagatcagagcagagataaatgaaaaaaagtacaaaacaccaatgaaatgaaaagttggttgttagaaaagataaaattgacaaatctttagccagactaactaagaaaaatagagagaagacccaaataaataaaatgagaagaaaaaagaagacattacaactgatgtcacagaaattcaaaggatcattagaggctactatgagcaattatatgccaataaattgaaaacctagaagaaaatgataaattcctagacacatacatcttaccaagattgatctatgaagaaattcaaaacctgaattgactaatacaagtaacaagattgaagccacaataatatgcctcccagcaaagaaaagcctgggacctgatggctttactgctgaattttaccaaacatttaaagaagaaataataccaaccctattgaaactattccaataaatagaggaggaggagatacttccaaactctttctacaaggccagtattagtctattttcatactgctataagaaatactgaagattgggtaatttataaagaaaaagaggtttaaagaactcacagttccacatgactggggaggcctcacaatcatggcagaaggcaaaggaggagcaaagtcatgtcttacatggcagcaggcaagagagtgtgtgcagggaacctgccctttataaaaccatcaggtctcatgagatttattcactatgatgagaatagcacagtaaaaacctgcccccatgattcaattacctcccactcagtccttcccacaacaagttgggataatgggagctacaattcaagatgagatttgggtggggacacagccaaactatatcaattgcactcataccaaaactaggtaaagacataccaagacaaacaacaacaaaaaaactacatgccaatatccttgatgaacattgatgtgaaaatcctcagtaaaatactagcataccaaattcaataacacatttaaaaaatcattttttatgaccaagtgggatttatccctgggatgcaagtatggttcaacatacacaaatccatcaatgtgatacatcatctcaacagaatgaaggacaaaaaatcatatgatcattttaactgatgcacaaaaagcatttgataaaattcaacatcccttcatgatttaaaaaaactctcaaaaaagtggttatagaaggaacatatgtcaacccaacaaaagccatatgcacaatatccgcagctagtcttatactgaatggggaaatactgaaagcctttcctctaagatctgcaacacaaagatgcccactttcaccactgttattcagcatagtactggaagtcctagctagaacaattagagaagacaaagaaataaagagtgtttacattgaaaaggaagaagtcaaattatccttatttgcagatgatatgatcttatatttggaaaaagaaatgaaagactccacaagaaaactattggaactgataaacaaattcattaaagttgcaagatacaaaaacaacatacaaaaatcagtaacatttctagatgctaacactgaccaatctgaaaaagaaatcaagaaagcaatcccacttacagtaaccacaaataaaattaaatacctaggaattaaccaaagaactgaaagatttctatattgaaaactataaaacattgatgcaagaaattgaagaggacacaaaaaatgtgaagatgtttcatgttcatggattggaagaatcagtattgccaaaatgtccacactacccaaaacgatctaaagattcagtgcaatctctatcaaaataccaatggcattcttcacagagatagaataaacaatcccaaaatttatataaaaccacaaaagacccagaatagccatagctatcctaagcaaaaagaacaaaattggaggaatcatattacctgatttcaaattatactacagagctacagtaaccaaaacagcatgatactggcataaaaacagacacatagatcaatggaaaagaatagagaacttacagataaatacatgtatgttcagtgaactcattttcaacaaaggtgccaagaacatgaattggagaaaagacagtctgttcaatgtatgtgctgggaaacctggatatccatatgcagaagaatgatactgaaccctaaatctaagatttcaaaatgtgaaattactagaagaaaacattgagaaaactctccagaacattggtctgggtaatgatttcttaagtaatattccacaagcacaggcaatcaaagcaaaaatggacaaatggtatcacatcaaggtaaaaagcttctgcacagcaaaggaaacaatcaacaaagtgaagagagaatccacagaatgggagaaaatatttgcaaactatccctctgacaagggattaataaacagaacagataaggagctcaaacaactctatgggaaaaatagaataatttagttaaaaagtagtcaaaatatctcggtagacatttctcaaaagaagacatacaaatggcaaacaggtatatgaaaatgtgctcaacaccactgattatcagagagatgaaaatcaaaactactgtgagatatcatctcacctcaattataatggttttcattcaaagacaggcaataatggatgctggtgaggatatgcagaaaggggaatgcttgcaccctgttggtgggaatgtaaattagtaaaagcactatggagaacaatttagaggtgcctcagaaactaaaaatagaactgccatatgatccagctgatatggtttggctgtgttcccatccaaatctcatcttgaattgtagctcccataattcccttgtgttgtggaagggaccagtgggagataattgaatcatgggggtggtttcccctacactgttcttgtggcagtaaataagtctcacaagatctgatggttttataaggagaaaccctttttcttggctctcattcgcttctcttgtctgctgccatgtgagactgctttttgccttctgccatgattgtgaggcctccccaaccacgtgaaaccgtgagttcattaaacctctttttcttttgcaagttgcccagtctcgagtatgtctatattagcagtgtgaaaacggactaatagacaagtaatcccatttctaggtatatacccaaaagaaagcaagttagtatatagaagagatatctacaccctcatgttaattgcagcactattcacaatggccaagatttggaagcaacctaagtgtccatcaacagatgaatggataaagaaaaggttgtacttatacatagtggagtactattcagccatcaaaaagaatgagctcctgtcatttgcaacaatatggatggatctggaagacattatgttaagtgaaataagccaggcacggaaagacagccttcacatgttctcccttatttgtggtagctaaaaattaaaaccattgaactcatggagatggagagtagaatgacggttacttgagtctgggaagggtagtgatagggctggagggaagtggggatggttaatgaccataaaaatatagtagataaaatgaataagagctagtatctgatggcacaatggggtgactaccatcagcaataatttgttgtacatttcaaaataaccaaagagtataattgaattgtttataatacaaagaatgataaatgtttgaagtgatgattactgcatttaccctgatgtgattattacacaatgtatgcctgtatcaaaatatctcatgtaccccgtaaatatatgcaccgactttatacctacaatatttttctaatgtaccctattctaaaaaaaatactatgcaaagcaaaaatgtaaaacaaaaatgaaggacagccagtatttctacctgtatcctgtctctattttaaataaaaccacaagaaaaaagatataaccacaggaaatcaatcaatattcacataacttattattagttgaagtctctaccaggaagtattgcaaacatttccatgataaattttgtcatgtttcttcatggctcataaatttccctttctatttaaaaattccaccgtttcatatacatttaagtataaagtaagccaattatagtgaagttataaatctattgtactagctatagatacagaaatatgcactaggttcaccaagtcatgaacgggaaatgtctaataaaataattcaaaatagtgacatatctcctgctagtttcttctaactttcagctcagtcttgtctgaaacagtattcacatataaataggctaatggatgcttcattacactattccctaaagtgcctaagtctcaaatctgattcctagttggaaaacaaagcaaatcctcaagagaggcaaggcctactgactcaatatttattcatgattcctacttttatctgatttccagttattgaatacaaatgtactctcagcttctgtatttcttatatatattattctcctttttatattttaggataatgcttatattgtttttattgtttttgtttaataataaaattttaatgtattcagtatatctttagttacaactttaacaccattccatagacctttataggtagtgattttattaatattcttttctgggtaattgctaatttttatttcctgtttgtccctactgttactgagaataatcattttcagtgtttgagtgattcatcttttctaatatttctttataatgactttgtatgttttctgcattgttgtcagagattgcagcccttacagtgtcttataagtttgacagatgcaatatttgttctctgtccatagggcacaaagtctgatttagttttttaaactaacataatcatcttattcatatcccatatattattacataatatcacttaaagtctcaatttcagttgagtcctaaatacctttcttaaggctaagagcaatggcttaggtgccaagcatcatccttaaatggcaattcgaggggctggatggcctagatgataaatatgaggagaatataaagccagttcttccaacatcagcaggtcactctggattggatttgctgcaaattaatgaagattaatcttcagggcctcttctcttgcacagggccctttctagacaataaataatgttaattaaaagagtatttaatattactgaaccagaaaacttgaaacatcctgagattttataactcaaatatgaaaaaaacttaatagtaatttttgcatgttacaataatttgtaagaataagaatcccaaaaatttatatggcagttccaatagagatgtataaaggtagaaacaacttctaaactaataaaaaatgtaataaaccatgccagagcaaaaattgaaataccttcctattacgtgtattgaaaaatcacatttcttgcacatgtacctctgaacctaaaacaaaagttgaagaaaatcatatttctaaatcactggaatatgaagaggagatcaatgaatagacggccaaaagttatatggctttagaggtatgtcaggcagttaataaaaatatatattttttattttgtgagatttatagtatttgtgagattttcaaaatttgtaactagttctgatttctttttatcttttatttttttgagatgagtcttgctctgtcacccaggctggagtgcagtggcttaatctcggctcaccgcaacctccacctcccgatttcaagcaattatctgcctcagcctcccaagtggctgggattacaggtgcccaccaccacacccggctaggctaatttttttgtatttttagtagagatggggtttcaccatcttggccaggatggtcttgaactcctgacctcatgatccacccacctcggcctcccaaagtgctgggattagaggtgtgaaccaccacgcccagcctctttttatcttctaaataagaattcacattcattcttaatttttatttgttactttggattttttttaaggcttctccaaaactgtatcagcctcatgcccctcaaaagataggcaattccctagtggtcacgtactttcaatggcaaaagatgatgtgtggaagagttgaaaaagaagatgcatttgtatcccctcacctcaagccaaatgactacaagtttcatggacacagaagctgaggaaactgttaaatcactgtgtgtccccacctccctttatttactgccaactatgaggaagggtttctccatcacctcagccaggtgagaagggctatgagagaatcatagcaagacatcagcatgtcccctggagaaattggtgcctgacacttccttcaagatttctaaagactggagttgtctctttttagaagtaaagggaaatcagagtgcttgggcacaaactgctcttccacggaatagggcaaggatgcctgagtttctcaagagtcaagttgttcccagaaaggggacatacttgggaaattttaagattccccactcaagggaactacctggagaggcaaaaagaccccacaagagagaagctgtattgggtgaccccacctcctgcctggtttctgaggaaggagagaaagttttcatttaaatgaaatttggagttctgattattgcattggactggatgttttaattattgaattgtgattgctcttgtggctctgtgacctgcctgagatatcattcaacactgaggaaagatctaactgagtttgaagggagtaagagaaaagaataaagttgctttatagtgtgtaccctaatgagccctaattattcaagaacagttacactccatttacctttcaccttcataatttaccagagacttagatatttatgttaaagcctccctattgtttttcttcagagcttcttttctattttaacgaatatttttaaaaattattttaaggctacattacatagtacataaaggcttattatgttttaacctcaacaaacatatagacataaatagtgtctacttctttctttttctttagcattgacctaactaaattcagctttgagagaagaagatgtagtctgagtaatttctgtggtttggaattgttttaattttttgttgtcttaaaaaatgattttagacaaaagtgattcatggcatttgaaagaaatatatattcactgtttaaagaaggcaagtttttctatatctacatctatattatgcatatctacagccagatataaagcaaaattattttttctcaaaaaaatcaatcagaaaaaagaaagtaccttccttatatttgaaacccatagcaagttccaagaggagaaaaggacagagtataaaattcttcattatgctgagcagtggacctgattttctccaggtctttaagcctatttatgtatccaaaaaaggatggagatgacagagttcctcaatgtgatgactctatatgctctccccagagctcttgcaacatgacagaactttgctaagcccatattagactaggaatgtgatcaacaaggcaaagatttcggggagaggtcaaaaattatttcggatatactggagaaccagagtggggagaaaacagaatggcactcccaagctggccaaatttatgcaagctaaaaatgcttattatccttccggccagcagttccatttattaaggtctatctttaaaaaaaacattgtacatctacataaaaaaccatgaacaagaattttcagggagcattattttaagagcaaaaaaaaggcaatcatctaaatgctcaccaacagaaagctaactaaattatgctacacccataccatgaaatactgtaagtaaaatttatatactgacatgtgagatgcataagaccctacaaaaatgtttaaatgaggttgcaaaaatgtataaagtctgatcacatttgtgaaaatatgtttgtgtatggttttgaacaaatgcctaggaaaggttttggagggatgtaaaacaaagctcttcatgctatacttttgggaggcaaatggggctagggagagtgtgctgaagcgatgctgaagataaacttctcaactgattaaactttacaatgagaatatgttcatgtattaattacataaaagattataataggaatatggaaatcatccctttacaacttggaagtttggatttttgtaacccacagagcaagcaaatgaagctgaattcaatatggattataaagctttagaattttgcatttccattttatcatataatactaaaaaaattgactttcattgccactaaaaattttatagtaaaaaagttcttacccattgacaaaggtgctagattataaatgctactaataaataaagaaatcattgggtcgacatccataaatcgtaagcatttattaaatataggatacatttctggtactatattacacacaaatatcacaaagcatcttggaactcaagaaggtagaatgtagttacattgtatctggtctaatcaaagagattctaacaaattaccagatatgtttactttcaatattatcatagttgactgcttgaataaatgacagttaacttctgttgtatttgccagtctgtatatccataataaaatacaaaatgctaataaaaatattacattgaatagataatattgtcactatttcaaaacatgaggagctgacagtaaaagactttgcttacggccactaggcaaataaatgtcagaatcagaatgtaattctgtttctaatggggctacatattttatatctttccattctttcaaaatacctcctccctacccatgtggcaatttagaaaggattgcaagaaaatacaatggagtgctcctctccactttatttttttaagttttagagctgaaatagttaagtttcaagaactgttaaattttctagcccagagcattgcattgctcataaatattagaaatcaattactgtaaaatggcctattacatgtattttaattcatttttaaaaacaattcagatttagtcttttctggccttttcctgtttttaagaagtcttgcagaaaaaaatgtattatttatactttctgaaatttttccagcttaaggtttaacaagtattatttgaaagaggccaatactcctgagtagttcagatatttgagctttaacattaattatgccctttagttggattgcttctattttaggttatagttgaagtcgtagacaatggtattgttgatgggggcatagggttgttggttagaggaataagaaaaggtaaaatgattgaaaaaccggtaatttcagagcatagacactgtgaaagagctgatacagatgtctgtcatcagccataggaggctgggggtcaggaagtatcaggaaacaggaaagatgtaaagaaatgacagtgaaagtgaacttgattataaaaataatattgataacaccattattagaaatgtcactaccaataatgattggcatttatagtgtgctttaccaagtgccaggcactgataagcactttacatatgttatttcacttaatccttacagaaaccttacaatatatttttatgcccattctatagatgaagaaatggtggcttagagatgttgagcaacttgaccagtttacacattagtaagtactctgatccatccagaataatttttaatatttctaggaggatcagatctcatatacaatgtggaaattctccaagttaattccatgaaatgtggatttattttgtgctcagaaatataagtagaaacctatagctagatttccattccatggccgaaattttattttcttccaagtgcccttcaagaggacttagagcacaaaggaaaaaatgatctgtgaaagtcaaggaaaagctgacaattgaaaccatgattcctaatctaatgcctttccattgctttgcatttcatatgaacatctctctgtgtgtctctctcttctctctgtctctctctctctctctctccctttctctctcttctccctacaccccttcctcttatttttccttgctttgaagattaagattctccatctcagtccctctgcttccctcactattttagttttcatgtggtttgggcccactatggctttgatttcagcttggactctacatgacctcattgtgagctcatcactgttacctgacataggtgtgtcaatgtcaaattcccaagatcctgcattccgatgaacctgaattgcatcacttttccacttctggtgcaattggttgttgtcatggcccctataataatggagctgcctcctttgagggcttgtaattgggatgtttttgctaagaaaagagcatgaacggggaagaaataatttgtatttttagaacaatagcattgaagcagtaggtggagaagccaaacttctgaaaggagaggagcctttcagttaggaaataacctgtgagaacagccagaatagcaaaggctcttctcatcttacgctgtctcatctttttttgtcttctgctttttctttgcttcatttaattactaaaacttttatttttaaccttctcattattaaggaatttgtcaagagaaagtagatctttgtttaatatcactagactatgggtaactaaaagggaaggactcttgttatttaactctgcgtccttagcaaccagcaaagggtctgggttcttgcacttgtttaataaatatttgccgaaagactcagacctggagcagaccaccccagggaggcagatgttgtgttagtagaagcagaccatgatcaagggcagaggtgattgggcaatcagggcaggcagtgaaagagaatttcagaagcttacaaatcaactgtaaatatgatgttagtatttctgagcacataatagccagatgaaactgggaatagacagactactgtgcttggggtgaagcgtaagcacttaatagaacaaaattgttcattccagtactaccagcaatagctcaaaactcaaagggctttgtggtgctttaaacctttctttaaaactctgcaactatgactgatagtaacacagtatacccttttcattcaggcaattggctcacaccttcgtcctatcttactcccaccactgagcatctaagaagcctccttgtgagtgggtagctataggcttttgtcctgacactcttgccaagttaccaaacaatagtatactaaagagatagatagcatgggccaaacagagataaatgatgtttttcaccaagtttcctgaacccattaaaaatgtggtgtatgtatcacattatataatatgtacataataatatataataatattccattatataatgaaatattatatatactatatttaatggaatattgttaaatatataatggaatgttattatatatataaaatattccattttattcatataaaatatatgatttcattcttttcatggctgaatataatatgcccattatattccagcccctgaaaagaatgaaatcatatattttgcagcaacatggatgaaactggaagtcactgtcttaagtgaagcaagcccagcacagaaagttagatattgcatcctctcactcataggtggatgctaagaaatgtgtcacatggatgtagagagtggaattatagacaatggagacttagaagggtgatggggtgggaggagggtggatgatgagaagttagttaatgggtataacgtacattatttgggtgatggataccctaaaaaccctgacttgaccactacatgatctatgcatataaaaaattacacaagtacccaatacttttgtacaaatattttataaaaagctttgcctccaatccatagcaatcccctttgatttgtggaagagtcaaaatgaatggtaaagatagattttcttttcataatcttttacttggtaactaatctcactgaaaatgcatgaaaaggaagtgggctagggaagcaaggggaaccatgactaaatcattctgtttcagtctctgcatattttactttaacataaattaatctaatagtctccttctttcaagaactaccatttctctccatcagtatactgacaaaaaattgtcctccataaaaatatgggaaatgagtataagttttaagaagtctgatgttcacaagtatttaatcataaaatttaatttgcaaaaaaggtgactaactttctgaatgtccctttggagattttgattaatgtcttactatggagggcacagcctttgaaataccttgtgatcttgcattacatggggtcaggtgagacttcaatttatcagagagccaaatttcactctgacaatgaaagtgactccttgggcacctcatacttttcctttaaaaagcctctgctttttctaaattacatatttagctcctgtgttactcttatctcttttaatgcagggcttggctctaatgcaactatcacaggtggaccaggacctgctcttgcctggcaagagcctgtggaacttcaaattcacacttcaggaaaatttcattttccctcatattaattgtgatgtcagactcaaaatatttcctagctccaagtgaaatgttttcttttccccccacattccctctccctagtccagtattatggaactaaaactacaaatgctgctaaatctcttaaaatatgagacattgacatggagtatctgctgacatagttgggtgatgtttaaacaaataatatagcaatcttcactgaacttctcctacctgtaaagcaatatgtgttataggggatacagagatatttagggcctagctgcatttatagtgtaatgggatgatatatgtataagaacttctagcatatagtgtaaggcaaggcaagatatgtgccaaatcaatgtcatgatcagcaaattctaatagatgaacaaaatgtacaaatccctacaggtagagttttggagataggttctggtttgagtaaagaaagatgggcagggtagttggaatggagttggtaagggcatgaataagtttacaggtacaatgaatcaacacattggttggtggagcacgtgctggagaaaagtttgggacattagtctggaaatttgatactgacgccagtctgtggaaggcaaactgaggattgcaaaataagtttcatggtgatataatactactgaaaatttttgagcagttatgtgatatagtgaatacattaagctttaggaagagtattatggcacctgtgtgaacccttcaactagtatatatgctgtatgatgaagggactgtcagtcatgcttctcatgatattctatgacacatggtacatgtctagtaaaatatatgttgagtaactgaaaaaaagaagaaaatgcccggaggaagtgaatcaataaatcttgtagttttcttggaccagaggaaataagcttatgttccagaacaatggctcccaaatggaggtgatttagcctcccaagagacatttagcaacacttgtagacattttttttcacaactcaggggatgttactggtatctggaaggtaaaaggcaaggatgatgctaactgttctacaaaacacaaaacagcctctcaagacaaagaattatccatccccaagtgtacatagtgccaaggttgagtggaccagatctagaaggaaggcagtcaaaagagaaaaaatagagataagacaaaggatagctgtaagaacttggtgactgctttcatacagaggagcaaaggagaacaaaggccaaagattacatgggaattctcttctgggtcactctggaatcgtgacactacaggcaaaactggagcccagaaaagaggccaaattgttcatgtctgtgtgttggtgagtttggtttagatttgcagaatttatgaaaaaggtaaaatctactaatataattgtctattggatgctggggatgctggactagaagttaggggaaaagttaggactaatgttctaactatggtggctgacaaagctgatatgagtcttaccttcatggggagttcagtggaggaggtgggcattaaatggatagtctctagtatatcagtataattggaaattgtaagttctgtaaaagaaatgtatagtttctatgtgaaagcataacaggcatcatcaggacatatctgtggactgggaaatgcctctcttagcaaatgacatttatactgaacaatgagtatgactgccaccaggcaaagaacagggagaaaatattgaaagcggttgaaatggcatgggtgaaggctatgaggcagacaaaaataggtgggtttaacgaacagaaggaagtgaatgagctgcagagagaaaagggtgggaagtacaagaggttgaagaaataggcaggggatgagcccagggttcatgctaaaacttctgaatataatccagttgtaataggaaatgattgaaaattttaagcagagaactgagaaaatccattttacatttttaaaagaatgtattttatatttttacaattttaaaattggttattattcatatatggagaataaattggaggatccaagagtagaaatagggagataaagagttggctattgcagttggcaaggcaagagataacggcagcttggactaaagtgataaattgttggaagagaaatttgagaaaagtcacattattcaagtgacattcttgaagcagaattcttggggaggtgatggattggataagaagaataacagaaaggggagtattcaggttgatagctctattagtctcctgaggctgctgtaacaaatgaccacaaactgggtggcttacaacaactgaaatttatcttctcacagttccaaagggcagaaatccgaactccaggtgtcaacagggccacacttccactgaaggctctaggagggaattcttccttgcttctttcagcttctagtggctccaggcgttcgttggcttgtggctggaaaacaccaattttctcctctgtctacacatagtcttctcctcttctctcacttaaatctttttcagcttttctcccataaaaacatttgtcattggatttaggatctacctgaataaccgggatgatataatcttgagatatttaattacatctgaaaagaccctttttccaaataaagtcacattcatggttcagggatatggacatatcttttaggggacatatccctattcactccactacaatggctatgtatctggctttaataattgcgtaggataagattgaagaagaagcaaagtttaggggaaggatcaagagttcagtttagatacattatattgagatgcctgtgaaatagtaaaaagaagccggatgtggtggctcacgcctgtaatcccagcactttgggaggccaaggcaggtggatcacttgaggtcaggccagcctggccaatatggtgaaaccctttctctatgaaaaataaaacaatcagtccagcatggtggcgcatgcctgtagtcccagctactcggaaggctgaggcaggataatggcactccagcctgggtgacaaagcaagactctgtctcaaaacaaaacaaaacaaatactaaggagagatgtcaagtagacagtttaataaatagttcagaagaggttgatgtttgttattcaaagcctgggatgagtgagattgctgagggcaattgtttagtgagaaaataaaccacgattgttatttgaaaattccaagtttgagacatatagtagaagattcggagctagcaaaagagttcaaaaatgaactgccagagatgtggaagtgaaaagaagagactggagtacttgaatggtggtgagtaaaggtgaacaatcaggtttatgcaaagtttcatcaggtacgtatgtaaggaaagaaaattgagagtattttaagaaaagaggggttattcctaaagagggaaaatttagcatattcagcatattcatattcagcaattgtaatagtgattacaactaccaatagaaagaggcaagattagattcttgactattgaaccctggtgtatatctgtattttgatatcaaaattagtcattaaaaaggagaaagagaaatcacaggggtgcaatagcaataacgtagaactcctaaatttaagggaagtaaagttaacttctacatatactggtaaaatgttaaaattggatttctaaggagaatgatgaaataaatgtgaataacattaaagttaagtgtgaaacttggagctgctcttcaagttaattacatatcctaaaagtgggtgttttattatgaaaatatgttccagacaagaactccagtaactagagtatcatgatgggctgaacactggaaccttgggattctctacttctctgctatgaacttgctgtgtgactttgggtaattcatttcacttttctgagcctgactcagtttctgcccccataaatagttttgagctacataatctctgaagttctcttgagttctagatatgatgactcaatgtcactttcaggccttctatttggctgtatttagatgtatttctatgaggccctttcaagttctaaggctcagaggcataggaatctgttagcctgacacacagactcaggctggatggtgagctttgttctttcctctggctatggccataggcactggaacaatgtccattgccatggtcattctcccttctcattggagcaaagcctcttccaagtcacaagctaggttttgagtactttctggattttcgttatttcacaatctttatcttgatcatcaggaagcttcttcttttaaatcctcaaaacatgaaagttctgattagaccatgtacatttcctgatgtacatctacgcactcacatgctaatggatgctaccctctcagttcccatggatcttgcacacgccctttagagaatggctactctcttccatgacacaaagataacttacccaaaagggcaactccttatagttctcaaggtgatctagtgccttttgttagcatgcagaatcaaaaactataattttcatcagagcatcttgatttagagaagttttacccgagggtttaagtttgtttaggagatcatgatttctcttaaattgtgggtgtgtatgtgaaaatgtgctttctttaaaaaagagaacgatttactttcatcagatcctcaagtaagtcacagcccattaaatattaagaaccactgttataggtttcctctagccaggacaccaattcttacttcagccaaccgtggaaaagttaagggtgctacatgacagtaggtatggctacttaagctgaaggaaaatctgtgagacagtatgtggcctattcagtaaaatattatatttcatatgccataagcatggaaaggaataagctcttacatatttctatttctagaacattagttcctttacgaggtaaccatcttaggcaaggttgttattagtttccaaggaatcagtggagaggctcatgacaaagggaagaaggggctgcttctgcttacagagaaaattatgtggaatttgggattttcatatactttcataatctgactcctcccatttaactgtttatttatttatttatttatttattgagatggagtctcactctgttgcccaggctggagtgcagtggcaccatcttggctcactgcaacctccgcctcccaggttcaagcgattctcccgcctcaacctcccacgtagctgggattacaggcgcccaccaccacgcccggctaatgtttgtatttttgtagagacagggtttcaccatgttggccaggctggtctcgaactcctgacctcaggtgatctgcccttggcctcccaaagtgctgggattacaggagtgagccaccgcctccagcctaaatgaaccacttctgagactgcaaaaattgtctcactgtttttatgcgttatgacacagtatttttcagaaggacaattattaaaaggcatgaaaagactatttgaaaaggttaaagaaataggtttgttttaataaggagagaatgataaacagccaatatgaatgtttacatgtatgagagaatacagggaattaaagcagatgtttttgttttcaactgatataaaaaattaggagttagtctttcattttaaaatggaggcatatgtttgacttagagaaagtgttgactgtagaatgttactaaaggagtttgtagaatctcctttttcagatatttttaaagaatagaaaatggtatcgcttgacttgggcagattcttgcctaatgtgtcctttctaaaatacaaccacagacatcagtatcatttatggtagagaatggggaggcttactctccgaattcatgcaacaaacatttatggagcctcatgatgtaccaggcactaggaattaaacttccaattcaatgtccccatgcaaacagatcttcagatagataggcagatagacagtggaaagggaatgtggtaaatgccatgtagggaaggggaaagactggcccagtaattatgaccacctttaactgagtccaggcactgtcaggcagtgtccaggcacagtgtcaagcactccatgtacattattttatttagtgctcacaacaaccctatggaatatatactatcatttgccagctattatccatgaagaaactaaggttaaggagagattaaataacttgcccaagatcacgcagacagcaaattgcagagattgttttgactgtagagttgaagttcttaaaccctgggccagccagtcagaatctgagaggagacaagtaaggttggtgaggggaatgggaattgaaagggatgaggaaagccttctgaaggagaagccatttcaatggagttttgaatgagcaggagttggccaggtgtattttatccggggggctggtagtggaggagaagacatgtttgccagataaagcagctgtggaagggactgaatttcagtcacttgttatttagctaaagacatggtcattctaaagtccctaccgagttcttgcacactgataccagggttttcaatgagtagtgctcagtttataagagttaagaagtcaccatttttttttcttagtccaaatgaaaatagtgcttcatctgagatctgcgtatgaatggctctgcctgtctttggtcaacccattttccactccctttacttgtcccttctttccctccggcctctaactctcttagtccttccttcttttctctgaaatgaagctctctcctacccatagagaacacttcctcctctggttcaccaggaagtttttttgggcacagcttcatggcctctcacagtgatggatccttatttaaagcctgaaatcgatttccccatggcatcacaatatctatggccatgcttccctctcaaacatgtgcatttacttttttttggaaggagagaggagcaaaattcataattcttttcttctttcaggccttttaatagttccagttcttctctggtcaatcaatccccatttagtggaggcttaagctccctccagcctgattctcttttatacggctgcctttctgatgtcgtatatcggtacaaacaaataaacataaagaggtttggtttttcttttttcagtttgtttcttctcaggaaaataaattctatttaatttttctgactccaatatactcttgcatgtcatagaatcttgttttataatcagctattggaactttagtaggtctacaaacaaccatttcctttcctaactaaaatcagaaccaattgaaaaagagaagaggagtcagaccactgcctcacagacagtggattttaaaatgtggctttagatctgcagtcgtcactggcctccaacacgtaactcctgaaagagactgtcagagcagtgatgccaacgcagacccggggaatgacaggacttccccagacagtccccaccgggcagagtctgcccggtgagctcattccctctaaggaggagtgaatcaggacagctagagctgggactgacatgttgaagcaagtttctgcacacagaaataggaggccagggtaaaggaaaatcctccatgttgagatgtggaaagaaacctgatttttgtttgtctccctttataacattaattcccattcctttcagattagactttcatgtgttatttgtcgtttacataatgcttttgaatacaattatttaaacctttttctgtctgtctcacatttctcggatgagatattctcactttcctcttaagggtattttattgttcttgtgtaactactgtcaaaaaataaaaatttcaacaaatttagtttaatgatctaaactattagtgattcattaatcagacggtatcccatctatgaaacagaaaagcacgctagtaagctgaggagaggcagtgggctttataggcagaaaagcctgaagaaagcagaaacaggaacagaaagccgattggttgtttcaaagttactttctttaaaaggataaagcagagccaggggactttcttattatgtcagctcaggttgactgggccccttttaattgattgctgtgaatctgttttttgttgttgttgttttgtgtttttttgggggtttttttgtttgttttctaactggctgattttaaagtccagtttggggacctagcactagtgattccattctggtttggtctgttcttctgggcctagtgcaagagcttagtccaaaacaatagcctcccataaatttaacactactctcagtaaaaataaccattggtatttttatagcatggcttttaataatgcctatattctcatatttgcaaagtgcattttcctgagctgattttatcagtggctttacttccaaaataatttccttttaggacaatatcagaacggcacatacaagtgtccccaagtcatatttggaataagatcacttgggaacacaagtcaaagaaggtatgtaaccaactcacctcatctaatggaacaggtttccctgggcaagcataagattattgtacattgttcaaagatttcaagacagatagcgtagatttcaagaatgccaaacataaggcagagaggagtctactgggatattttcccgaattgtggcttgtatctctctctggtctattagaagacctcctgcatacccctaacaagagaaaaaatgacagatgaaagaaagagagagagagagactttcttgtaattaatctaataggcatttttaaaattgaacacttggacttcctccaactggcatctttaaaacacccattgattaacaggcaaatgggatgagtgaattcattataagaagtgaatcctttgcgtccaccagattcttctgccttcattgtcatcaaagttcttgggctcactcactggctatcatccctctcactcatctctaaaatggtttcaacatcccctctgtgcggtccagtttctcacctaatttgcattaggctgattcattcattcctcagcagggttacttgatgtgctttcttcccagtggcatccatgtgtaaagctgtctctcactggctcttatcacagtcagattcaaaatgctcatttcagaaagactgcaagtcttaatagaaggtatagaatttaacaacatgaacacagtgaaagtttaagaatggtttctggaatacctgaaatctattctgcttatattaaaatggctttcggcagagggtgaaaaaccctgccggcaatcagagcattctgtgacattcaagtctgcccagagtcagcagccaagcagcgtgctctctgatctacagatttgcattgttcactaaccttcctgtgccaaaaacactcagttgctccctttcaccagcctctaaggtcacaagacagacagttctttcttgattactcaaacaaatacacgtctgattcagagcggggaaaaaagagttgccaacagtcaaggcttagaaaggccagggctgcttgcacttagaagccagcctgatgaatcaccacatccatgactaattgtggggttcaagtgtgcccagttatagagcctgttttttagaaaggaaaatgctaaagaagacacatagaaatgtggaagaaaactagacacttttgtgtgactacacagatggcccgtggtcattaacaggcttgatacatacctttctctatatatatatagtttttttttttttttttgacagagtttcactcttattgcccaggctagagtgcaatggtgcaatctcagctcaccaaaacctccgcctcccgggttcaagcaattctcctgcctcagcctcctgagtagctgagattacaggcatgcgccaccatgcctgactaattttgtatttttagtagagatggggtttcttcatgttggtcaggctggtcttgaactcccaacctcaggtgatccgccagcctcggcctcccaaagtgctgggattagaggtataagccactgcacccagccctctctctatgttctttcaattaagccccagaaaatgtggaaatgccattgccctcaacctggctttcctcacaagagtaaacttcatgggcttaaaaaaaattccaaacattttttaaatctcataaggttaagaaagggcagtcgacttcaataaattatgatgctgatgatttttgttttaaaaaactggcaaaaacagacttttacatatatatgactatcatatatgacttttacatatacgtatataggtgaattacttatatacatataagtacataaagtatacagttacatgtatgttaaagtatgtatatacatatctaatgtaaatatacatatatatgcacatatgaacctatatcttcattgcatgcttatgtaatagatgcagtgtgtaatatgtgtaaatccatgttttatttgtatagataccaaggacatgataataaaaatgacatagttcttgtcctcaattgtatagtctgttgggaaagaaaacacacaaatagaaaaaattttcatatagagaatttttaatattctctatatgctgctataaaatcaatagtagtcatgcacagggtgttgttggcataagggaggaaaccttgaaaaaggggtacatgttagggaaagctttgggaaagtgagagatgagctgatctgaaaggacttgtagtagtgactcttgttgagtgggagggaggggtaggcaatgaatggaggaaatcccaggtagaggaaaaagagagtaccagaacagccccacatttatttaagaaattgaaattatagctaaaaacctccacacacaaaactccaggcaccaaagttttcatggttaaattgtaccaaacctttagtaaataaataaaaccaattatacacaaactcttccagaaaatttaagacaaggaaatacttcccactttatctgggagggctgccttaccttaacccaaaatctagatgttacaagaaaagataactacacaacattaaatatcccacataaacataggtacgaaaaaccttgagaaaattatagcaaatgaaatttaacaacatatagaaagaataatacatcatgaataaatgaggtttattatgagagtgcagggcaaacatttggaaataaattgacgtaattcaccatataaaaaacagacgaacatctcaataggtgcagaaaatataattgacaaaattctatatagattcatgatagaatgaacagcactcagtaatctgggaatagatgggaattcccttaacttgataaaggcatccatttaaaaaacaaataaccaaaatactatagctagcatcaaactgaatgggaaatgacaattcagtgcagaaacaattggtgttgaaacaatttgatatccacatgtcctatagtttgaatatgtccccttcaaaattcaggtgttaaaacttaatggccaatgcagtgacattaaaaggtgggtcttctcagaggttattaggtaatgagagctcctcccattacgagtgggattaaggccctcataaaaggagcttcactcaacatttgaccctcttgccctctgccttccaccatataaggacacagtgttctgcctctcctgagtaagcagcaacaacgcaccatcttggaatcaggggacggccctcaccagacaactaaatctgcagacaccttggacttcccagcctccagaactgtaagaaatagatttctgttctttacacattatccagtcttgggtgttctatcatagcaacactagtaaactaagacaatatgcagagagagaaaaagagagagaggaaggaaggagggagggaaggaggaacaaaagaaagagagatctttaaagcataccttacatacaaatactaactcaaaatggatcaatacctaaaagtgaaatctaaattaaattattgtaccttttgaaaaaataagccacagaatgggagaaaatgcttgcaaatcatttatctgataaagaacttataacaaagatatataaggatgtctcaaaactcaatactaagaaaacaacaatgtaatacaaaaaggacaaaatttattttcgtttggtcactttttaaaaattttactttaagttctgggatatatttgcagaatgtgcaggtttgttacgtaggtatacatgagttgacacttcaccaaagaagatattcatataacaaataattacatgaaaagacccttgagttcattagttatgaagcaaatgaaaaaccctaatgacatactactacatgcctattacaattactaaaatcaaaagaactgacaatattgatgatcacatagaaaaagcgaaactttcatacattcctaatggaaatgcaaaatagtattgtcactttagaaaaacagtttagcagcttcttaaagagttaagtatttacctacaatacaatctagcattgccacttcaaagatgaaagttttatttacataaaagcagatatagaaaagtttatacagcttttctatatatcttccaaaactggaacaacacaaatgttcttcaacaggtgaatggataaccaaattatggtacatccatacaatggaatactattcaggattaaaaaggaatgaactactgatagacacaacatggccaagtgcattataccaagcaaaaaaagccagatttaaaagactacatactggctgggcatggtggctcaagcctgtaatcctagcactttgggaggctgaggcaggtggatcacttgaggtcaagagttcaagactggcctggccaacatgatgaaaccccatctctactaaaaatagctaattagctgggcctgctggcgggaaccagtaatcccagttactcaggaggctgaggcaggagaatcgcttaaacctgggaggtagagggtactgtgaaccaagatcgtgccactgcactctagcctgggtgacagagtaagactctgcctcaaaaataaataaaataaaataaaagattgcatacttttacttgattccagttgtatgacattctgaaaaaaagcaaaactatagggacacaaaacagaactataccttagaacaggtaaatttatttatgtaaagtgtatcttaataaagcatgaagaaaaattaaaatgtcatccataataagaaaattatttaacatacatgaattaccacatcttaaaactaaatcataaaatttaatgtattaaaattttagcattttaatttgttgtaatatggaaagttatctagatcaaccctcttgctgaaacaagctaataatcctgagtaaatatatattcttaaaaataattattgaactgacagggtcataaagcatttttagcagaaatccagaaggtaagtggaattctgcagccaactttcatttttatggcatttgctaattaggatgaatttgatctacaatattttagcttcatgtggtgcaaagaacaaaagacaaaaagtccaaagcagtttataagagacaagtttgaaatctaaatattcagaacatttggaagtaaaatgattcaataaatcatatacatgaatcaaaatctaagtacttggcaggtagtaaactattagcatcactctaaatagatttactaactaaagcattaggagattaaactgatcactacacgatgctaaaacatttaataactcaagaagatataacagttctaaacctgtatgtacctatcaacatagccttaaatatgtaaaccaaaaattgaaagacaggaaaaataaatgcaaataatagtgaggatgttagtatattcctctcatagctaaagaaacagctgacaaaataaaattaacatgatactgatgatttttaaaacatgattcaatgaataagcggacatatatagaacactatatccacccatgtaaattacaaaaacttttgaaacatacagaaaacatattataaaattggccatattctgatccaaaagcagctctcaacaaagtttaaagaactaagccatgcatatcacattctctatgatgaaatttagttaaaaatcaaaacaaaaagataactagaaaaaaacacagtatgtttagaagaaaaccacaactaaataacccatgagccaaagataaaatcataatattacaaaatattcaaagctgaataataatgaatatattatacataaaaactcacaggacatggttaaaatagcatatgtctccatttcagtggtattagaaaaaaacaaaagctcagaattcaagctaagcaaccatctaaaaagtaagaaacaaaccagaaaaacagggtaaattttttaaatagaaaaatgtatatataatagaaccaaaagagccaaatgatggttctttgtgaggataaataaaattgattaaattgtgatgagattaataaagaagagaaaaggtagaagcagtcaaaattaggaatgaaaatggaggcatagctacagttgatgtagacagttgaaagactttgagaaaatataataaacaactttattcctgtaaaatcactacagattaacagattatgtttctattaactcaacctggaaaatgcatctatcctgttctctgaaggattcctaacatttgatgatgctgtcagacatgaccaacaacatcataaggaatgtggcttttcagggtgagataagaagctttgggaagtttttgtagaggggtaacataatctcactttcattttgtataggtctttctggcaactgtctaaacataaaccagagaagggcaaggcagactcaggaaggacaaatagaaggctattttcataaatcgggtaagagacggtggcatggactcaagtggtaggggtgaaggtggagagaagtaattagttttagatattttagaaggtagagccagaggatttactggtgaattgaatatggaacatgagagaaagtaaatacaatgagttcaaaacagtgatttctccaaagttgttttgttttttcttttgtttgtttctttgtcaaagtgatcagaagaacatattccatttcctgagatgaaaaaatccttaggaagagaaagttttaaggaaaccaagagttccattatggacaaagtaggtttgaagttcctatacaggtggacttctttatagtgcactttcctttattgtgcttcacagatattgaaatttttacaaattgaaggtctgtggcaaccctgcattaagcaagtctatcggtgccatttttctaatagcgtgtgcttgcttcgtgtctctgtgttatgttttggtaattccggcaatatttcaaactttttcattattattatatctgttatggagatctgtgatcagtgatctttgatttttatgactgtaattgtttggcagccccactaaccatgcccatataagatgacaaacttaactgataaatgttaagtgtgttctgacagctccactggaaaaccgttcccttgtctttgtccctcccctggggcctctctactccctgagacacaacactattgaaattaggtcaattaataactctacgatggcctctaagtatttaagtgataggaagagtcacacatctctcactttaaatcagaagatagaaatgatgaagcttagtgaagaaggcatgttgaaagccacaataggaagtcctcttatgccacacagccaagttttgaatgcaaaggaaaagttcttgaaggaaattaaaagtgctactccagtgaacacacaaatgataagaaagtgaaacagcctactgctgatatggagaaagtttttgtgatttggacagaaaatcaaattagccacaacatatccttaagccaaatcctaatccagaggaagaccctgactcttcaattctatgaatgctgagagaggtgagaaagctgcagaagaaatgttggaagctagcagaggctgattcatgaggtgtaaggaaagaagccatctccacagtacaaaagtgaaaggtgaaacagcaagtgctgatgtagaagctgcagcaagttatccagaatatctagctaaggtcattgatgaaggtgcctacacctttagtatattcccctcatagctaaataaactgctgataaaataaaattaacatgatattgatgattttaaaaacatgattaactaaatgaataagtagacatatatagaacaccacacccacccagattttgaatgtagacgaaacagccttctattggaagaagatgttatgtaggactattgtagctagagaggagaagccaatgcctgtaagcttcaaaagacagactgattctcttgttagggactagcacagccggtgactttaagttgaaaccaatactacagactattccaaaatcctggggcccttaagaactatgctaaatctatgctgcctatgctctataaatggaaaaatgcttgaataacagtacaactgtttacagcatggtttactgaatattttaagttcactgttaagacttactgctcagaaaaaaagaatcctttcagagataactgctctgtattagtcctttttcacactgctataaggaactacctgatgctgggtaatttatgaaggggtttaattgactcatagttcttcaggattaacaggaagcatggctcagaggcttcaggaaacttacaatcatggcagaaggtgaaagggaagcaaacacctcttaccatggcaaagcaggagagagagagagacagagagcactaaaggggaagtgccacacacttttaaacaaccagatcttttgagaacacactcactattacaagaacagcaagggggaaatcggcccccatgattcaatcacttcccaccaggccattccccagacacatgcggattacaattagagatgagatttgggtggggacacagagccaaaccatgtcatgctcattgacaatgcacctggccacccaagagctctgatagagatgtacaaggagatgaatgttgttttcatgcctgctaacacaacacaatatccatcctgtagcccataaatcaaggagtaatttctattttcaagttgcctaatataacaaatgcattttgtaaggctacagttgtcatacacagtgattcctccgatagatctggataaagaaaacagaaaatcttctggaaaggattaatcattctagatgccactaggaacatttgtgattcatgggaagaggtaaaaatattaacatgaatgggagtttagacgaagttgattcgaatccccacggaaaactaacttagaagggttcaagacttcagaggagggagtaactgcagctgtggtagaaacagcaagaaactacaattaaaagtgaagcctgaacatgtgactgaattgctgcaatctcatgataaaacttgaatagattgggaatctcttcttacggacgagcaaagtgttttcttgagatcaaatctattcctggtgaagatgctatgaacagtgttgaaatgacaacaaaagatttagaccattgcataaacttagttgttaaagtagcagcaggatttcagacaatttcctcccattttgaaagaagttctactgtgagtataatgccatcaaacggcatcacgtgctacagagaaattctttgtgaaaggaagattcaattgatacagtaaacttcagtgctgtcttactttaagtaattgtcacagccacccaaccttcagcagcccccaccctggttagctgccatcaacactgaggcaagtccctctaccagcaaaaagaatatgactcactgaagattcagatgatcacgagcatttttcagtaataaacaatttttacactaagatatgtccatgttttttaagacataatgctattttacactgaacagactacagtataaacatataacttttatacgcactgggaaatcaaaaacgtgtgtggctcactttattgtggtagtctggaacagaactcacaacatctccaaggtatgcctgtatttcatttaggtgaagatatgaaagcggcagttgaatatacaaatctgtaattcatgggactgctcagtgttggagatctaatttgggttcatccatctataggtatatttaaaaagctgaggcctgaataaagatacctagggaacacaggtagagagagcacacaaagcctgacctgcagcattccagtgtttagaggtcaagaaataagatagagtagtggactagtggccaagtaataaactgggtcaaagatgaagaatgaagaatgccagtggattttgccatgtgggggttttaagggacctcgataagagagcttttagtacagttgttaggacaagacaggcctagagtttagtcttaaaagggaacagagaaatgacgtggttgttggaggagaccatagagacaaagaaggttcatttattcatttttatgtttaagacaggagataactgtcctatgttgtatgatgatggaaatggcccagtagagacagaaacattgatggtttctattttttccatcttgtttggtttggtctttcagaatttaatacctaatgaatgactttttttaacttttattttagtttcagggatacatgtgcaggttggttctatagataaattgcatgttgcgggggtttgggtgtacatattattttgtcacccaggtaaaagcatagtacccgatatgcagtttttcaatcttcacccttcacccaccctccacgctcaagcaggccccagtgtctattgttctcttctttgtatccatgtgtactcaatctttagctcccaattataagtaagaacatgcagtgtttggttttctgtttctgcattaattcatttatgataatggcctccagctccatccatgttgctgcaaaggacatgttctcattatttttttatgactgcgtagtatttcatggtgtatatgtaccacattttctttatccagtctactgttgatgggcatttaggttgatttcatgtctttgctattgtgaatagtgctgcaacgaacatacgtgtgcatgtcactttatgatagaatgatttatattcctttgggtgtatacgcagtaatgagactgctgggtcaagtggtaattcttctttgagttctttaagaaatctccagactgctttccacaatggctgaactaacttacattccaaccagcagtgtataagcgtccctttcctccgcagcctcgccagcatctgttattttttgactttttaataatggcctgaatgacacatttgaattaattagtttgacaagagttttaaaatatcaaacacactttcccacagtgttcattttgtttatatttgcttatctcagtaaattgttaacatgtagaaatgaaagcttaaatgtataatgagccatatctctgcatttattcaaagactttaggggtcaaatttgcttattaaactgtgtgacaaccagttctgtttttgaaatgtttaaaatttatcttaatgtccactttaggttctaaataattgagataggctatctataaaccctgcattcaccagataatggcctcagtatatcctgcacttggccaggaattgacattcagtctataattatttacttacggaagatttatgttttataagtaaaaacagagagtattggttttagaaatatatgatgtagttaagaaaatccaagaaaagcattaattaataatagaaaaaatcactcacagttattgaaagcatcccgcatgatgggcgctgtgctgcaatctacgttcatgctctcatttactcccctcagcaattctctctggtggtggccactatgattctattttacagaccaggaagttgagtcattacagggggcaagtgacttgctgaacggtacacagctgggaagtggtgtggctggaatttgaggtcatgctttccatagtcatagtacacgaccgctcaagcaggctagcatatggatggaaggaagagaatgcttccttttcataccaatgtctttatgtatgaaaagcaaagttatgttgatcgtattaggaatcagggtgagtaatttctattttaccatggaaatgatgaattaacaaattattttaatgtagcaaaattcctctactgaaagaattagacaaaactccaccatatattcactgtgcatttggaaggaggaggccagaaactgaaaactccaaaagcaattttatgaggcagacagaattcctttgggacttcatattaagctattttcagtagggagtacaaatattttgttgaaaatgctaagaaacgcctttaaaacatttcctaatagggtcatagtggcttgttgtaaagaacagaaaccaatttgccccatgcctgacatattgttcagtatttactattaattttgttctaacaaaagcctacctcagatcaataaatataaatgttgtaaaaaataaatttgataaagattacattttttcatttgatgtaaaagtacttttcacactttttggtaattcattaggatggtgatttcattttaagattagctttccctttccttttgtgttacctgtattgaaaactggctattaccatatgtacttctttacattttctgcagcatgtaattaagagctaaacttatatatttgttgccctttttcacctaatgaagataattccaaggtttgtagagagaaataagaaaccattcaaaccacttgtgttattttgtttgttgctttgtttttgagacggagtctcactctgtcacccaggctggagaatagtggcgcaaccttggctcactgcaaccactgcctcccaggttcaagcgattctcctgcctcagcctcctaagtagctgggacttcaggagcccactgtcacacctagctaatttttgtatttttagtagagacagagtttcaccatgttggccaggctggtctcgaactcccgaccttaggtgatctgcccgcctcggcctcccaaagtgctgggattacaggcatgagccaccacacccagccacattcaaaccacttctgaggactctcctatactctgggtacttaactatgaagtctaaagttgtgggatgtataaaccagctataaagctagacaggctgactctaaagcaaagggtaacattctccaccttctgttttctctggctgtccttccctctggagtgtcctccttatacctatagggatgtctagtgtctgctatcacaatttgctaattgaataggctcgatatcagtcatttccaccttagtgaaaattaaaactgctgtgtattctctccctccctaaagtaattttattttaggccttgtttataatgtgacatgggaagcatttcctctcccacctcctttaaatatattttgaatatcagggattaagtagaaaagatattagtgaagatagactagccttgagaagcttagttatgcacctcagataacacaaatccgtgcatagctagtcccaaagtaaagcacaataaattgcatgaaataatcaatgaatctgaggtgcttgaataatagagtcttagaactggttggtacctaaggatttgttgtactcttccctcccacccaatgcagtaatcttctctgtaagagcagtaacagatggtcaagaacttgtaccactattttggtttttcttattaaaatggctagatttcagaacttcttggcaagctgctattcaaatgcagaaatgcatctgcttagaaactcaaaaataaacatgttttccaaaggaatcaagtatgttctataaaatcctggcctgttcataggatgtggtaagcatgaatttcattacaagttaattctaccatgatggtagtgagcttctttgttccaaactaagaagtgttgagtgtgattggtgatggttggaactaaggggagggagctgagaactgacagatgtatgctcaaatcctggatgtgtcctggcatcaaatttcagaaagttaagaaataatgttttgtaaggcagtttcatctcataattttaagttactgtattcattctacatgaaatccatcattaaactcagataccatatccagtagagtaaatcaggaccaaatacagcctgtaatacgcagagccagtgaggctgggcagcttctgtctgagttccagactcactggcactcagctaaggattccagacactcaaacttagcaagaaataggacaagaagcatggagcatgacttaatattagtctgtgtgcatttctatgtggagcaatacatttgcaatgcttcttaaaatgtaatgatgccacagttttatttttacatacagttattaactttcaaatatattcagcagatgatatgactgcacatattgggatttggtatatataacctttcagtccttttgacagagagtgataacattgataatctccatatggcttaatgtttctttgctctccctcctttcggaaattctctgtgcctcgttaaatggagaagattccattaatattcaatgatacatgaacaagcaattaaaataatttctattctaatctggaaatagaaagtattttctatgtagcattatacaaatgctatatttatgagctatgtgggtactataggcagagatcagtttcaaaaatgagcaattacactgtgccacattatagactgatttgaaccacataaatttcatgtttaagactcactttgattatgttgcgtattttaccattttagagaggtttccttgtgatcctaattctaactcaaaataacctgttttcactttttgcctatccttccaacaatctcttcccaacaaaccaccaccaccaccaccaaaaaaaaaaaaaaaaaaaaaaaaaaaggcttcacaaaggtttttggaattcaaatgggtcttacaaaacttttggataattcaagtgtaaactaatcagaaacacatgggattgaattccctttgagatttacaatcagggtgaaaggacttggcaaactgtaatggtttaacaacaaaagaaatcaagaattttcagcctcacaagcctctacatttcctctcaattcatttatatttaaaagggaagcatatgctagaggctagagtttggaaaactgcctggttatctgatctagtgttctgcatcagcacctcatccaccacccatcaccttaagtttatcttctcaacctgcatgattttgagtgaaaggggagccagaagtgagatgtatgatcatcctactaatagttcacatctgttctgagattctgattgctgtgaaaattcttgtgatagaaaaataatttgttaaattccctcttaaaacctgaagcaaaaattatcaggcttctacttttataatacaaacaattttcttccagaaacattctgatctgtgtactcattattttctaaagtacatatttacttcacatcaggcatacaatggtggacaaaacagctgcctttcttccccgtatggagcttacagtatagtgaatatttcatgggactagtatctacagaaggtgttttgggaagcacagctttggagagagtaatttgccaacattgcacagaataaaggcaccatgagggcccaaggaaggaaaagatttgcagctgtcttggtaagaactgatgataagtggaatcacacaagagatggtttagatataaaatcagcaggatttggtagctgcttgactttgggaatcaaagatgaatttcactagaaagatagttgcgctgatacaaagaaaatacaagaagcttgggaaacacaattgagtttaggctgcatatttgttttatgtgctgtatagcaaattaccacaaacctagcaatataaaacaatatgcctttactctgtcacagtttctgtgggtcagcagtctgggtatggcttagctaagctctctgctcagaagctcacaagctgtaatcaaggttgcattctacattctcatctggaagctgcattctcatatggaggcttgactggggaagatccacttttccaagtttttcaggttttttgagaatttgtgtatttgtggttgtatgactgagggtcttagccttttattggttgcggctaaggcaaactttaagccctaaagggaggtccttgctgcctgggcctccctataggcagttcataacatggccatttgctttttcaaggccaatgggagaatctctagttgcagtgtgctaagagagtcttgtatacttaaggcagtgacaatccaccatctttggcatacaatatacactcatcaaaagagtgaaatcctgcctttgcatattgtattggtcagaagcaagtcacgggctctgcctacattcaagaagagagaattaaacaagaacgaggatgcattgggggtcaccttagtgtatgtcggctctaagtttggatgtgttgtgtttgaggtgttagaagagcctttggtgaacaagtcatccacggttataaactggacaatgtacatctagaatgtttttttcctttgtgaacttctgatagcaattagggttaaatggctatttccttataatatttctttatccagtttgtgctgattacatttataaaataaagagaagtaaaccttatatatgaaaacaaaaatgaaataatatttgtcaggtggtgataaaaataaagcttagaaagatacgtacaacggcaactctcagatagggctagaaagtttggagatggatatttattccttaaagccaaagataaaataatttaattttcttctccaaaaaacttcatagcacagaaattggcagcctctcagccaaatatctcttggaagaagaaataatacctcctgctacacattaacttctgagccaatttcaatctaatacacagaagttaattctagtcagctctcaagaaaatcttgacctacgaatatctatttgaaaaattgaaaagagatgtaaaagcagagccctacagacaatattctaacaattggtgctgcattaccaggtttgttttcttcttatcttatccctaaatggcaaaataaaaggcctagatcaactatatcttggatttatgtgaccaagtctatcaacaaaccaataacatcatcatgcataaagtgagccttactctgtatttcacttctggtggttttagtcaacagccactccattttctaaaggcagaagattgaacaaaagatcagtatattccacaagaacaaataaatccaataactctgtaaagaagaatatccctctgaccaaattttgacttagttacatgatataatcataggttttttaaaaagctacttcatagctatgttttaaaaatctagatataaactctcaaaaggcaaactgtagcttggagagatatttgagacatactatacaacaaaagattaccttttataactagagaacttttaaaatcaataagattaacacaataaaatacatgaaagacatgaagaaatgcagtggctaatatgtttacgaagaaggcttgatcttatttgaaattaaatacaagtaaattaaagcaatgaactatttttaatatgtctaataagcaaattaatatacccagataaagtaggaaaatgagtacttttaagtactggagatggcatacattggcttctggaagacaacaaatatacatcaaaagttctaaaatgtaatgattctttgcaccagcaattccacttccaggaattaatcctaaagggaagaatgtgatttaccttcaaaggatttttaaaatcgcaattttcttataataggaaaaaattagaatgaaagaatattcaatattaggggatttgtaaaacatgttatgggtataatcatagcctgccatcataacttttagcctgttttcccactccatgccccattctctcctttctgagaaccactgccagcctcacatctcacaaatagtgttgataccatataaccctttgcacctatccattcccctgtgttcatagctcattaggtgtggatatactaaaccggcctaatcagatatgctcccttggaagttcagaattggaataaagaggctctggttaattcagcactttaatcgaatggcagagcggtgaactcaggtgctgtagtggccatttacacagagaaggggagaaaacagcctccaaagaaaaacaaagcaaaggagccagaaaattagggaaaagaagcattatggtatgggtgctaaggccaaggtcatgccccaaaccacagggttgtgcctatccttgacagaagtgcaaagaaggagctcattttcggacatcccaccttttatttctgagcccttccttcccacatttttttgttttcatttagatgttgcatatattcgtcatttaggactttccaagaatgactttccaatagcactccaatttcttttttggaggttaatcagcctccagaacccaccaccaatttttgtgttggtgatgggggaatccagatgcctccagtcattatggaagctgaagctgacagaggccatgactcctcatccctgctgaaggcagaggataggtccacacctaagctcagccactgatgctctctgactggcctttgagtcataaatagcagcatgctatcctatccacactgctgcgctttccacatctggatactcgggatcaccctaggctcctgtgcatcccacacttatccctcagcgttccattgattttccaacatgaatagccttctaatatgtcacatatgattaagttagctggagtccatttctgtgtttttaaatatacttttattttaaatatatttttaaatatattgatgtgtacttttctttctcacctttccttgtatatgatgccctcttacttcagctagtggaggcttggccattattgtaaggaggctaagcattaaaacagcaatgtaagataaaaagatgtccatgttcagcttttgatttccaaaattagacttgttttaatctccagtaagattcttaaaaatgaggctttgtttaaagaggttaagttttttctgaatcccttaaactccaatttttatatacagatctaggcctgatggacttttgtcctagagttttactagaaaatactgcgtagagacaacaaatgatttgacacaagggatatgcccaatagtaagaaggaagaagaagaaattattctgtcatggaagggaggcacagggctcagagaggaagcagttaaactgatgagatgcctggttcccttcgctgatctagagcagccacactgccatccctgtgccgtggccaaagagacaaaacaaataattaaaaatgcccacagaaagctaaaatggattaaatgagaggttgatgctctgcttctctgtcaacaggccaaagagctgtacagtaggaattacaaaggaagcatttgatgatgtacccaagagggtgccccagtcctcccatagacgatgcaaggcataccagagacccagaaatgtctgtgtggctcagtggggaaatgtggagaggccacaaaaacctagaggggactctgattgggaaaaggaagctacacagcctagggactttactccttgaggcaactggcaagaagtgatacattagaagttaatgccagcgaaatattcaacaaggttaggtataaccagccacatctcagaggacaccagtatagggcctctggggaccaaaccaacccctccgaagcaaagaacatcaagaatgtggaaagtgccctcaactcctgccacatgaggatggatgcaacctcctcctgcacattggaaagaaggatcagggagggaccagcctatggtagcaggaggcacagccaaaatagggctctaaattgctgaaagttatttactcataagagatgaactatcttaacttggaaaagttgtttaccctgacttcacctggaattgaaattgtctgctaaataaaataaaggaaattataaaatatgttacacatacagactataacaaaaacccctttttttttttttttttttttttttttttttttttctgagacagagttttactcatcacccaggctggagtgcagtggcgcaatctcagctcactgcaacctccatctcccgagtttaagcgattctcctgcctcagcctcctgagtagctgggattacaggcacccaccaccacgcccagccaatttttgtatttttggtagagatggtgtttcatcatgttggccaggctggtctcaaactcctgtcctcaggtgatccactcgccttggcctcccaaagtgctgggattacaggcatgagccaccgtgctcggccagaatacacttaattcttgatataaacataattgagtctactaagtaagataatagacaagatggtgtgtgtgtgtgtgtgtgtgtgtgtgtgtgtgtgtgtgtgtgtgtgtgtgtggcttacaggcagatattaaaaagccaatatcaaaaaagagattacagatgtagttgggtcctttccgctttccaaggttcctacttctgttcctgcaccctaaattttgtcttccccatctgctctcagatcttatttcctctgtaacttattctgatatataagtagaggaaaatgaaatgggtctagagttcatgtttaaaaagagaacaaaagaaatatgggtgctagtatgtctcatgttctcaactatctcaagccatatgctcaaagagaagaaaaacctgaggaaagtatcaaaacacttgtaaagctcattgtctagtatattacattttttaattttttatttttaagtactatggatatataatagttgttcaaattttggggatgcatgtgatatgctgataccagcatacaacgtgtaatgattaaatcaaggtaattggggtactcctcacctccagcatttatcttttctttgtgttagaccaccaccacatgtgcagcatccctctgggtctcttccatgacaaccctgtgggaagccaggcaagtgagaatcaatgtaaacatgaagttcatgctgcttactgtgtcgtgataatgtccttgtctcccaatcaggagcctcatgtcttcttgccagcctctgtggaactgtggtaggctattaagttaattagcaagcagggtaaagtctcagatcctttgcattttcttttaaccagctctttctaggtgaaagacacatggatatcactgtgaaacttcatgctctgtatagctcaaaattttgcccaaggggaggttccagcaccatctgattagtacatattgctgagaaaaatactaaaggaagaaaatactaataataatatatttcactaaccctcttagatattaagaaatgaatgaaaaggtctatattattgactattaatcacttggaatctctgttgttaaactgagaagtaaactgcattgcctagaatattggccatatttttagtgatactaattaaattgtttgagatagatctgaagacagcagaagcttgtctgggcctagcttccttgaattcttcttccccgaattgctatgtcttggtaattttgaaatatgagttagaaaccatctacttacctaactgatatcattattccagttaatgtttgtcccaaggtatttctcaaagacttaagaaaaatgaaaattctattttttaaagggcctagctcttttaaaaggatatgtttcatggaattctatttatcaacaaacatgtagactacttcaacaagacttcaatgtgatttcatgtgtttattctcctgagtcagatgtgaacaatgtaatcctaaaagattttggggaatggtgacatatgctacttaattcacactcatgagcttaagagaagataagagaatgtcatgctcatgtgtgacaaagataaaactatattctaactaggattacaagaataaaacaccagaaacttgacaacttgacattttttcacagtgcttaaaaataaatgtaataaaactttggcagttaatgtcattttgatttgctttaattttattttcaaacctctattattgaaataataatttcattatttcaaaccttcataggaaaataatagaattgtgctgttgtgtcagtataagacatagtcaacattttctgcaatgaacaagtaatgttgagattaacaagatttctcttaataaatgttttatacaagcataagaaaaatggatagcacaaaaaatggatagcacaatagggtaacattagcactttaacaaataaatcccaacattctaatggcttaatacaattgaattttatttcttgctcatgcaacagtccagcacaggtgctcatggtctgctgctggggccacgatgcatctgtctcatgcagtcatatagagacccaagttgatagctgtgatgtgttctccaaaacatggctttagaggttgccatggaaatcaacatccaactgatggaagaggcaagagaaaggatgcaaaacccacaccagctgtttaattacctgggtccagaagtaacaggtgccactacctctcacattctattagtggaaattagtcacatggcctctcctaactgctagtaagtatagaaaagttggttttggctgggcagccacaagacaaagctactaagaaagacatagcattaattttatgttgttagccatctctgctataagcgtaagtcaaatagaattttcatttttcttaagtctttgagaaaaacattgggacaaacattaactggaatattgatatccattaggtatgagcttgattgtttctaactcatatttcaaaattaccaatatagcaattcagggaagaagaaaaaggtttaaagactgtgacattcagactgctatattcaatacagaaaagatatttggtgatatttctatccctttttcttaaatgtacattcttctgggatttaataaagtcacattctgatttttaaaaatagtactattaatctcactatagagctctgaaaataatagaatcgtgctgttatattacagcagttattgattgtccattttttccaaagacactgagatctatggaagaaataagcctcattatttttcatttgtatttaatgtagatgcaacaaaagttatatacttctttattatatattttgtcatgcctattaaatgccagttatataagatgattcctgatccaaacacagtgctttatgttattgggattaaaagaattagttaaagctttaagttaaattacttttgaattcatttatggctaggtacacatgaaataaacactctacattgtctacagtggtaattgccaagaaaaagagtatattttagtaacaatttggctaagcgcctcaaattcaaagtaattccacatttaaatactaacactcaaacctgaaagttgtctttaaaagctttataaattgtttctggtgagggttttacgactatggggtgggtggaaaggggaggaaggaagagggactgcctcactataagctgataacaaggttgctaaaaattgctcttatcaatggtctttgcacttaacttgtttaaataaaagaaaaaacttcatgtgagtcatcgtattttgttcactacagcttggcaggtcaccttgttctagcagatagaaactgaatcaatatgggaagagccagaatttggacaaggttcaccaaacattcacactgatgccaggtgggccaagaaaaagggaatgtcctgcctctgaggtatctaaaaatttttatgtttaagtcaagggttttgtgttgtgaaggcagagctttgaatttctaatagaagaagaaaagcagaatatacccagaaactcctgattaaatttatggtcctctaataatattttaactttaaaggagtcagacggcattctagaaaagagccctttggtcaatgctttcctatctatagtttaatcaacccttccatatatgcacatattaagcaaattcaaatgacattaaaaataagttacatttcttattctaacccctgccattcatcccgctttccccccattgtcacacatatgcccacttccacttctgcacataggaagaaagggtgaataaatgtcagaatcaagtggaaagattaatcataggctgttttttacattgttttattctgagtcagaatacgctttacaggacataggcaagcacttgaaatataggactcagaacataagatgcttcgtaggacccaggcaagcacagcaattaaatggaattccacatttttaaggaaagctttttacttttcttcctctttttgtttctctttacttttgcagctcccttcaaaagtcctttctgtgagacacatttttaactaccatattgttcaattttaacaagagttcagggtgaggaaggttatagctgaggcatttacaaggatttcctgtttgtagtggctgctttttcctctttggtaatgtgtttttcacattttttaaaagctgcctgtatgcattaatattacttaatctccatcaccttaagaaaccatatggggcagggagaggaagaccggtgctggctctttccctttctcaatgacttgagacaccttaaccttgcttaactttttctagaaaatgaagatagtaacacctgctctgaattgtcacagaattattgtaaggctcaaataaaatctatgtatttaaggaatcaatatgtaataaagatcttgaagtgttagtagtcgattatatctgagatacattcgccaatatccaagggggacaaagagagctccataccccgggggaaatgtagtccactgacaatttgtccacacaattagaatacaaaatagcaccctatgcctcaacttttttacagtcaaagaaagcatgaggcataaatagtcctgaagggatgtggagtctgtttgctctgcatatgatttgcatatgctcctctgaaaagtcaccgggcaaccgagtaattgtacagtaatgatgtggttaaaaaaacagattgatctacttttattattattgttacaaaataatacatatatttttaaaattcaaacgatactaaaagttacattccctgtcctactccctgtcacttataccatttcccagtttctgtttttagttctgatggtttcctttttgctctccactgtgactgatatacatttatacttctattttttgatgactcaagtttcgatagtatcttctcactcccagtacaagatattcagtacacaaaagatatccttttctctcctgagtttcattttacgtgtgtatgaacacacaaacatgctaacacacatgctcacacaatcttttagctcttgtataggttcctgaattaattgttcagtagtatactaagcctctacttctggtttccaatttaggccctgcatgttgtccaacactagcccatcagtgggattgttttacattcagggcagctgcactactgcctccttggagaacagtgcctcctggagtttagcagtgcacagccctacagattaatgcaggggccctgatcatatttgtattttgttcctgtatatgtttaatcaatctttagaatctcatctatagttggttcattattgctgggaaacaaacggcatttacaaagtcaaattttagtaatgttattcattatataaatgaatagtatctttctctccatatcctttacaaagtcttcaaaagtttctgaaatttcactaggataagttggtggatctttttctcacccattcagtactttgtgggctttttcaaatggcagatttgtgtcttttttaaaactctgaataattttcttctattacagctttgataattttcatccctctgttttccctactcactctttctagaacttctttttccattttttagtgataaaatacacatacataaatactatcttaaccatttctaagtatgcaattcagtggtactaaatacattcataatgttatgccacataaccaccatccatctccataactcttttcaacttgtaaaactgaaactctatacccattaagcaataactcctcattcctcctcccccaaactcctggaaacaactattctactttctgtgtttatgattttgaatactctaagtacttcatgtaaaaggaatcatgcagcatttgtgtttttgtaattggcttatttcacttagcaggtcctcagggttcatcagtgttttagcatgaatcagaatttccttctttttaaggctgcataatagtctactgtatgtatacaccatagttacttatccacacatccactgatggatacttgagttgcttccatggtttagctactgtggataatgctgctatggtcatgagtgtacaaatatctcttagggttctatcaattattttgggtatatactcagaagtggaattgctgaatcatataatgattctatttttaatttttttaggaatggccatactgttgtccacagtggctgtatcacataaattcccattaatggtgcaaaggtttcagtttctccacatcctcaccaacatttgttattttctgttttgtcttgttgatatttgtcattctaatgagtgtgaggcgttatctcatggtagttttaatttgcacttccctaatgattagtgatgctaagcatctgttcacgtacttattgtccatttgtatatcttgtttggagaaatgtctattcaagtactctgctcatttttgaatcaggttgtttgctttttttgttgtaagttacagaagtttctatatattctaaatattatattctgataagggtatcagatatatgacttgagaatatttcctcccattctgtggttcacatttttactccattgctagtgtcttttgatgtataaaattaattttaatgaggtcaatttgtctattatttcctttgctgtctgtgcctttggtgtcaagtccaagaagtcattgccaagtccaatgtcataaagcttttgctctatgttttcttctgagagttttattagtttagatcttacatttaggtctttgatgcatttgcagttaatttttgtatatagtgttgggtaagggcccaacttcattcttttgcatgggaaaatccagttttctaagcaccattgttgaaaagagtattctttctacattgaatagtcttagcaccttgtcaaaaatcacttgatcatatgtgttagggtttatttctgggctctgtattctattccattagcctgtatgtctgtctttttaccagtgccacgctgtattgatttttgtagctttgttgtaagttttccaatagaaaactgtgatttttccagctttgttcttcttcaagattgttttgtctatttgaggtcccttcagaattccatttgaatttttggatgagtttttctatttatgaaaaaaaaaatcattggaattttgaaaaacattgcactgaatttttacattactttggagagcattgacatcttaacaatatgaagttttccaatctatccatgaagatgggatgtgttttcatgtatttatgtattctttctttcagcaacattttatagtttaggctgggtgtggtggctcacacctctaatgccagcactttgggaaagcaaggcgagaggattgcttgagattaggggttcgagaccagcctgggcaacagagcaagacctcatctctactttaaaaaaaaaaaaaaagttttatagtttaacttgggtaactgtataagtctttatgcaactaatttttgcatgttggctttgtatcctgctgctttactatattcatttattagttctaacagttttgtatgtgaggttaatctttagggttttctacatataagatcatctcatctgcaaacagataaatttacttcttccttccaacttggatgcctttaatattttctcttcctacctaatgctttggctagaacttccagtattgtattgaatacaagtggtgaaaggacatgcttgtgttttgatctcagagcaaaagctttcaaccttgcaccacggggtataatgattactttgtttaaattacggctgttattatattgaggtagttttcttctattcttaatttgttaagtgttttttgtttatcataaaagggtgttgaagttaatgaaatgttttgtctgcatcaattgagataagtatgtgtttttttcttcattctgttaatgtggtataatgcatcgattgattttcatgtgttgaaccatccttagacgccaggaatacatttcacttggttgctatgtatataatccttttaatatgctgcagattttggtttgctagtattttgttgaggattttttaatcaatatttacaacggatattggtctgcagttttctttccttgcagtctctttgtctgactttaatatcaagtaaatgctgtcctcctaaaattaatttagaagtgtttctttttcttcaactaaaaaaagtttgggaaagattgctattatttttttctttaaatgtttggtagaatttgcctgtgaagccatcaggtccagatctttttttttttttttttttttttggtgggagattttgaatactgatttaatattctcacaagtttctattcagattttctatttcttcatgatttagtcttggtaggtttcttcttgttgctaggaagttgttcttgtaggttatccaattttttgtagtataattgttcataacacgtttataatcctttttatttctataaagtcagtagtaatgtccccacttctacttctgattttggtaatttgagtcttctcccttttttcttagtttatctagccaatgtttgtcaattttattgatgtttttaagtgattaacttttgatttcattgattttcaccattggttttctattctctattttgtttatctctgctctaatctattaattccttacttctgatagtttgggtttaatttattcttcttcttctagttctttaagttgtaaagttaggttgctgatttgagatctttcttgttttacagtgtaagcatatataactataaatttttccctcaggattgcttttgctgtgtcccctaaattttggtatgttgtgttttcacttttattgatctgtaagtattttctaatttcccttgtgattcttcctctcaataatgaataaaactaggctgggcatggtagctcacacctgtagtgccaacaatttcggaggccaagaagggagaactattgagcccaggactttgagaccagattggacaaaatactgagaccttgtttctacaaaaaataaacaaaattagttgagcatggtggcatgcacctttagtcccagctacttgggaggctgaggtggaagaattgcttgagaccaagaggctgaggctgcagtgagccaagatcatgccactgcactccaggttgggcaacagaggcagactttgtctccaaaaaataaaataaaaaataatggatgaaacaaccagacagaaaataagtaaggaaacagaggatttaaacagcccaataaaccaaccagatctattagatctaatatatatatatagtgtgtgtgtgtgtgtgtgtgtgtgtgtgtgtgtgtatatatatatacacacacacacacacacacacacacacacacacagaacattctacccaacaacaatgtacacattcttctcaattgtatctgggatgtttttcaggattcactacatattaggctacacattaagtctcaatagacttaaaaaaatagatatctgattaaatgtcttctctcatctctagagaatgaagttagaaatcaataacagaaataaaactggaaaattccacagaattgtggaaattaaacaacaccctcttaaccaagatattgaagtctctattattatactactatatttctcctttcaattttgtcagtttttattttatatattttcatgatctgttattaggtgagtaaatgtttataattgatctatcttcttgctatactaaaactttcattaatatataatgttcttttgtcccttgtaaactttttaaacttaaagactattttgtctgatgttagtatagccagactttctctatgttggttactatctgcatgaaatatctttttccatcctttcacttccaatctatttgtatctttggatctaaagtgagtcttttgtagacagcatatatttgaatcacgtattttattcattctgccaatctctgtcttttgatttgagagcttatgccacttacatttaaagcaattactgttaagtaagcacatacttctgtcattttgctatttgttttctgtaggccttatagcattttcatccttcacatcctatatcattatcttcttttgtgtttatttttttgtagtgaaacatttaaattcctttcacatttcttctgtttgttttctatagctacattttgtggttatcatggggattacacttaagttcctaaagttgtaacattctaatttgaatttgttccaaagtaacttcaataatacacaaaatctctgttcctttaacaacttcattctcacccctttcaattgttgatgtcacacaattatgtctttatacatgatgtccaaaatacattaataattatttaaatggtattagtctcttaaattatgttaaaaaatgtggatttataagtcaaaattacaatattaccagcttttagattatttttaatgtattagtcttttaaaccatgtagaaaacaaaagtaatagaccattgtgacaataatattagcttctataattgtctatgaatttacctttattgagatatgtatttcttcatatggcttcacattactctctagtgtccttttattttaccctgcaggacactcccttgagtatttcttgcagagaatatctagttgtaatgaactcccttagcttttctttatctgggaatgtcttaacttctgccttacttttgatggacaattttgctagatataagattctaggttgaccttttttacttttactttttgttttactttttactttttgttttacttacttactcttactctttgttttacttttagcactcttaatattttggcccactgccgttggccttcaaattctctcatgacaaatttgctcataatcttattgagtagccctcgtatatggcaggttgcttttctcttgctgcttttgttactacaaaggccagggattcggtctaggtcccattgcttgctgcaaaagaaagccaatcactgaaacaattagtattgccaaggaagaaggctttaatcaggtgctgcaacctgaaacattagattcaaggcagcgaattttagaataagggcctagacccagcctctgagcttctcaatagccattctggtgtgtggcactctttcttgtcttacacccatgttcaggtgtacactgaagttgtacaaaatctgactcctcagtaaatgagcaagatgtcatagtcctcaggctgatgattccatttctttagacatatacaatgtggattttagagtgagagtaaaaagtcactgtcaccatttaatgtacaaaaggtaagacttgcaactgactttactgctccacagacagtcctttggccaatcaccattttcctgcctggcttccctgcttgctccccttaactgctcactctgagtatgaaaacccttcaaagctccacgaaagaatagctacagctcaggggcagccttcactacatgtggacacctgtgcttgcagaatgcaaaaacaatcactagctgtaacacaacaatgtagaaactaaaataatatattaatattagttttaactgattgaagagcaaaaaagctgaaaagaaaaagttttgcaagtaggtcaaattatgatggctgccatgactttttagataagagtctttgttatagaataattattaaaaagacatggattataaagcttctgatagagttggaaaaaaaaaaccaaattacctattagaaggaaaagtatatggaggctaatcctggggctctatgctagaaaaattaattgttgtatctccagtagttatttagagaggatatttcctgagaaaagttaaaaaatttggagaatctcaaatatggaccttcacaagcatgtgacacagcacagagcgtttgatatgtgttctgtggagttacgaatttttgcagttgttcagtttgaattcctctggttggatctccagggactttagacatggttggaatagatggtcttacagcaataaagacctcatcgacaaaggcctgtttgtgcttttttttcaacaaatctatttaagcacaagtcctgtcattataccctttcaaattctctctagcccatcctctcatctccatcacattgtcattgccttagatcagaccctcatcatttctcccttggacgattcccatagccttctaataggttttcttacctccagacttgccatccagtctatactctacacatcactagaatgatatgggtaacaggaaaacttgatcattaaaattctttaatgtctccatacttcttcagcaaaattccaaaatctttaacataaacaaatacaacattatccctgacttagtctgcctacctcactagtcacttcttgtactccaacctccccaacccatctactttgcttttcagtaacacagaactatttgccacttccttgatgccacctaatcccttgactttatgcatttgtctacttccattttccacacccatatctttaaacaggctctcttccatcttcccaacaccacctgggatcatctcttccagataccatccctaacactacactttctcactcaactgtcccgctccatccaggattggttaggtgtccaattatgttttccacaacactccaaatataattcttaccagccagcatggttgtgatgtttcttctatactttctccccacaagaagaaagttttgtgagggtaaggatcatatttaatacttgtatgttcaccagaaactcatcatacagtttggagataacatttgttgaaggagagaagaaaagaggagagaggaatggagtgaggcagaaaggaaatgatgacgagctactcttcaaaattaagctggataacaacaagaaattctagaaagcaattgaggcaacctccaccctaagacccaagtaaaccctacatttaaagtgctgttctggggcacagtgaaagatttctgccagaaagtttgctccctaggatttacatgatgatgagattacatgctgccttgtggcaacaaaatcaaaagtctgtaaaagaaaaagcgtgctatgcttctgaatgtttggagatcctacaatagatttttcattcagctattttgttgctgcttcatgagcacacctgacagtcttgtgggataatagaaataaacttctcataaacaacggtcaaatttttcagatatatattttcaacacagaactagcaaaatgtacacagtgctaagttgtgccatctctgtactttactacgcaaggcacttctttgataatgtgcagcagaataatgttatagcagatttcacaatgaaatcgtcaatgaatcttctttcagtcatttcattcgggatcaaatcggacatatgcaaagttcttagaatcacttttgtcaaatggggcaaaattgcagaggtcatagcaagtaaggagccatcctcttttataactgctatgcccatccaacaaccacagctttcttaccaagatggtcaccaaggtctgctgcacaggattgcatactccagagcaccctccagtcagtgcagacacaccaaccgctggtcagcctacaggggtggtgtctctgcttcttctgcccaggcaaagctgatatcatgctagagaaaggataagccattgacaccatccccaaaggatccttaagaactagcattgcaatttacattattgaccattcagtgttggttggacacatggtggtaaatttaagagatcctactagccaaacagtccaagccaagttgctctgggataacaaggtactagcattgcaactggtctgtgctgtaacaccagaaggaaactgagtctaggtatgctgtatcaaaaatctatgatgatgtcttccacggtattctctctcaaggccctttgtcaaagaggtcactgctactaggccttccataggagtaattgcaggtaatttggcaaactaggtcttcctaagagggagaaacttgggtagggaatgtcaaagtccatgattcacattctataccacaatcatgaccaaagtgatcataagattggggtggcttgacttacagaggttgttaacaaatgtcccaaggtggtcgcggaggcacttgtcagaaaaggtagtgtttttctttcaagaatcaaaaattgagccaattcaatagaaactccttggtttcactgaccatattgaaaaactccagaaattattctaagaaattctccaaccagtgaatcacatctgttggttttaacacctgaggcaaaccttggcaaccatcgggacactgtcaaggatacactgaaggagcgtctctacacagaattgcagtaaatcgactccttgcaattctgggggcaaacaacacagttcaaatttatcaaatgttaattttagagttaccactggaaaaactaaaacaactatcttatccaattggcactctgtattgtcatctttacatctttactgttaaatcttaaatgttcctggtcatatgaaacaatgttttcaaagaatataggaaccgttcttcattttgaagatgtattcattgactatgtgataaaggaaaagccttcgggaaatattcattgactatcacatttaaaccagttatgggtatggaggaaagcaaaaaatgcaaaagttaaaaactttatatctctttctaaagttaccaatattactggtatccaatctatctaaaacagcatgaatgtaatatatagttaccctactataaaggccaagcaagaattttaacctctttgacagctcctcaatttccaccatgttttccactgcaaaggtagtcacttctccacccatagcagtaacactttctgtggccctgacctcagtaggaacaggactgctatctagaaagaccagctcttgatgtttgatgtccgggctatacccccaaaacaatgaaatcagcagtccttgtggtgggacaaggagagggctagacaccgaaatgcacctaaaattttccaggtgattctaatgtgcaaccagggttgataatcactgggacagtctaacaggcccacaccaaacacagtgagagaagtaagcaaagggaaatctattccttgcccttaagaaatttgctggccaggctcggtggctcacacctgtaatcccagttctttgggaggtcgaggtgggtggatcacgaggccaggagatggagatcatcctggctaacacggtgaaaccccgtctctactaaaaatacaaaaaattagccgggcgtggtggcgggagcctgtagtcccagctactcgggaggctgaggcaggggaatggcgtgaacccgggaggcggagcttgcagtgagccaagatcgcgccactgcactcctgcctgggtgacagagcgagcgagactccatctcaaaaaaaaaaaaaaaaggaatttgccaaaagtgaataaacaactctgtaggcagtggacatcttctagagtagctatccgctcctccatctacaggctgcagtaggcgtggtttaggcagctgtttgtaccacactaccctgccaacaacattgattgaacagaaggctggatatgcagcacaaggcaagatgatccaatccctttaaatttggaataaagaccctaagtctaattcagatatttgggggatgttgagctgaagcataaaagcagaaatgataaagaaattggaagaaattaaaaatttggaagagagaaaagggaagaaaatgaaagtagacatgcctaagaaagagtcagaggggtactgtatgatcctgagagtctgagagagctgcctaggcttctaagaggtttccagtttacatcatgaaaggcccgtttcttggactttgtaggtttacaataccttctccttagtttgagacaactgagtgggtctctgccctttgcaataaaaaagggtatcctgtttaccttctggtttccagttcaattctcacttgaatcctccatgtgtttaccttgtttccgaaaatgataagagcaatgagagttcagagaagtgggaaaccaaagggcgccggagtggtctgaggaggtttcacaaatcatgtggggattgaactgaatcccaaaaaatggaaagaagggagctccctcactccgggtgaaggaaagagtagtacaaaatcacagaggcaggagtgtgcccaaggagactggagtctacacagaaggatgtgggacgccagaaaattaatttaacctggtggagtgaacctaatgaaagctcagcaacactagctccatgctccttctacttcttgacgtatcctacaggtaaaaagtcctgagacccagcaggttttaagaaatgcttcctaaactcttttatatatatatatatttttttaattttgagacagagttgcgctcttgttgcccaggctggagtgcagtggcgcgatctcagctcactgcagcgtccgcctcccgggttcaagcaattctcctgcctcagcctcctaagtagctgggattacaggcgcccgacaccacgcccagctaaattttgtattttcaggagtaatggtgtttcaccatattttccaggctagtctcgaactcctgacctcaggtgatctgtccatcttggcctcccaaagtgctggaattacaggtgtgagccactgctccctgcccataaactcttacatacgttccatgttgcctcactactttaagggaaaacacattaataataacaaacaaaaagtaataaacaagagaaaagcattgatagcaacaaacatagttgcttgcctgtttctgtcaaaaaaataattttgtacacatcaatggattcttatggcctgttttattcttcgcatattttggcagaagttggctgttgagaatacattttacttcatttttcaaagtaattctttttttaaaaaaaactctttaacttagttgcataattacatacgtgactaggataatagtctatgaccatgattggtgaaaaggtagtgtattttagtattaactacaacttaaaaacattatgggtaagattaattaaatgctgtgaaatttgccataatatttaccatcagctggaaataaagagaacagagttgtaagtattatgcaatcattttaattcaggcccattcccataagtgatacagacctggaattgtagtgtgaagtcacaggcaggctggcacccagccaatacacatcagcacaccagcctaggactgtaccatgccagtgctccagactttgactttcatcccaactcacttccagggaccttttcaaagatattcagtagacagcctgtattttctgcatacgctatacccggccctcaagttacagacagcccaaactaaatgggatcttggaggttagttgacattttaccaatgagacaactaaggtaagataactgttaagattaaggggaatgctgaattttcatttttctaaaacaaacaaacaaaaaaagtttcttcttccagctaacatctcaatcacgtacccaaaatgacttttaaaaatttcacattctttctactaagatgccagcggcagcagcctactccatacgtcaggcagtgtttgtatatatttcagcgtatccaagcaaggcctttttaactttccatcctacagacgaagctgtactttcctgaatggcagccaggaaaaaacttggggatttggcaggaagactgtgggaagcctggtgttccaccaggctgagatctggagcggagctttctacaaagacagaggagcgaaacacctccctttgtttagctcttcataggagcacaaatggagcccccagattgtaatcaggccctattgtataaacttggggttttcaggccatacagcatttttggcagcaaatcccttattatttttcagctggaaaaccaattagcattctttttatatctgggtgttaatacttgggccttagagcaattttttggccactggcccacatggctgtagtctcttgggcaatgcctgacaaattgagataaaactgttacttcatgttttcctacaaagacaaaacaaaaactgtttcctgctcttattaattggatgaagtcaatttccacatttaacaaataagaaggtaagcataatcagggtgtcaacccacggctcttatctctccccaggctggttcctctgcaggaatgtgagggagcaagacttgtcaggttctgactaagctttccttttattggaaaaataaaaagtcctcctgggcaacagagacctctgtcaggtgaacaggctgcgaccaccacaaggtcaccctttggtctcagtggcatttttgcttcacaagtctgagcgatgtgatttacctgagggaaagaattgttaggagattccagccatgacaagtggattagtcataacagtcaagaggacactgcccagtttgagaggaataaacagagccaaacatttccctatctcgaaagcatagcaaagtcaagttcacgctccgggaatgtagtttacgattagagaaagccatatctgggctgctgtctcagaatatctaagcgagtagagaagaggaggaaaggagtttggaatggctgtgggaggtgcccatcctgttaagtgttcccctatggtaaacaacccctgccatggcaacacaacttcatgctgcaaatcagaggagcgcagccctccagcgagcagaccacaacttgggaaaatctccaggatgatgcaaaatatttcaaagggaagtggtaaaacaaacagaacggaaacacagccatacaactgcagtttgaagacaaaaatttgttaggtacaaaaaatagtttgggtgcaattacaggagcatttttgtgttgctggtactgattgtacatctctttgatagaaatggcctgaggggttgctgctccccttcaagactttctttgtaagtagtgggcggtggcatcatttaaaaaaaatccacttgaaagacttctttaaagaatttgtacagaacattttctttgcaagaaaatctattctgaagcaatattatttaacaacggggctgtgttttgagtcatatgaaaatttattatccaattttttcttattgttatatttgctatcaagagcagaaaatgatcatctataataatttagaggagcgactaaaaatgcccaatcacgcacaggaaaagaagcacttgacttgcatctctagagccagaaatcacccgattctctatgcagagggtggccatacaccgcagtttgccaggagagtctcagttgactctagttgtccagatttaattaccaacagtgcctctttcactgacagaagtgttctggtttggatagtaaataatttggtgaccctattgattcacagagcccaagaatcttctgtctgctcctactctccccggggacatcagtctaagactctaaaaatcagaacgtaaatgcaaaatgaaaaagagtcgggtggggaattgctgccacctggtaaagaagaaacctcgacagtttggcttcacctaaaggaagcatggaaggactgtgaacaaaattaaccctgtgtgtattgaggagaggagagtaccccccttcatagagaccccctgcggcagcctttaggaatacctgggagcttcccactggattagacaccaaagtctaaacaagtgctcctctgtcaaatcctggaaggcggacagtcatttcaaaagcagacatgcatgctgcctctttttgtgccttgcagcccagaaagtattgctcagatgttccaaatcagaaggtgttcagccacttcatactgccaccagccatgctgctgggctgcagctatttggatcagaatggaactctttgatctgttttatatctaagtttaactatggcctgggtccaaaaggtagactaattttggcaacttcccctgtacacttttatctagagataaaaggaacacttggaagcataaacagaaggtgcatttctgtaggcccaatagccagcacatcaaaacacaagaccatagaagctggtgctgaatattagttctgattttagaatgcagctctactctgctacctcactcactggcagccagtaggaccatttccttctattgtaaacatataaagataacatagcattacagaactcagaaaggaaagactcatttccagcacagtgacttccatttttacatgaatttttaaaattgaaaaccatgatttttaagttataaagtaattacactggctttgggtccaggagtccaaggctctcatacaaatatgtgggtgactggagacctgagcatcgatactcttccaacctccctgtctctcaagcggtctgtgctttaatcaggaatttatggcttggtaagcccagttaggagagtggaacataaatccccaggggcagccagcttggagctccagagaagagttatagcttgcccatgacctttgcactatgtgaatttgtcagtgaaggaccaaatgagagaaatgcaaggcctggcagggtttaatgtagcccattttaacttatagtcagagctactgtctattccagaataggacaatggacagtggagttctaaaaatagtaaggtgatttttctatagggacatgcagctgaatacacagaggcagtttagctgcatgcaaatcagataagctctgagtagcagtatttggtaccttattgccaaaccagtccattctataagaagtacaatcaccaaattggaaggagacatttctagtctttccttgctaggatctaaagagaccagtgagtttcttgaagggctcttgggacacataggacctgactgacagaataatgtgacatggcttaaacacactaacatgaccaactacccccaaatagtgatttgccaaatggagatgaactaaccaggccagtgctgggcagttagtggaaaggaataccacagagtttgtgtataaaagggccctaatatagaacagtgaagtaacactgggacacattttttgtaggtcatcaaatggcatcacagaattaatttgctgaaaaatacataatattaactataattcctttgaatgaaattaccttgttttgttgatgtaaaaattgagaaagtagtaccatctatttgggttttcagtggggatgttttcccagtttctgggtaaaaggatatgactcacggatgagaaatatgaaattcccattaaactgtcctggttggccaggcacaatggttcatgcttataatcccagaactttgggaggctgaggcaggcagattgcttgtgcccaggagtttgagaccagactgggcaacatgacaaaacactatttctacaaaaaacacaaaaaattagccaggcatgcctgtagtcccagcttctcgggaaactgaagtgggaggtccaggcttcagtgagctgtgatcactccatacattccagcctgggcaacagagcgagaccctgtcttgaaaataaaaataaagtgtcttggccatctcagaaatcagaattccacataaagtttgggaattgcattagatcatatctaagacctctttcaaatgcaatttttgcatagcaaggatctgaacagtcttgaaaggatttccttttatgttcatttcaaaaaaccctcagaaaagaaaaaattgacagcacagcccaaggtcaagagaataagtaagtacagagaaggctgaactcaagttagcaacagacatgtgattcccacagcctcctcaaagtagttctctatcatgtgaggaagagcttgagccaccagacctgacctttcctgaatattcctctttaacaacaaaaaattattttagttaaacaataagaaccacatgactctactctcacacagtaaaagagtcaatccattagatcgctagactaattcatcacgcatgactaaagaaagtaaatttcaggtgcttttgccatacacacatagttacaaaaggtggcaactatgtaaggggaagaatatgttaatttgctttgctgtgttaattatttcactatggatagttacatcaaaacagcatattgtacacgttaaatctacacaactttttttattttaatttttgagacggaggctcgctctgttacccaggctggagtgcagtggcgctgtctcggctcactgcaagctccgcctctggggttcacgccattctcctgcctcagcctcccgagtagctgggactgaaggcacctgccaccacacccggctaattttttatttcttatttttttgtatttttaatagagacggggtttcaccatgttagccaggatggtctccatctttctgacctcgtgatctgcccgcctcggcctcccaaagtgctgggattacaggcatgagccactgcacccgggctcaatctacacaacttttattaaaaagaaaggaaagggtgcttaagaaaaaaatacccaaaagcaatgaggtaaaaaataaatgaatacagtgtatctatacatatatgggacacatacattacatatgattctgctatgctgtgacaacctgtttttatttgagtcttaggggctggttacagtggctcacacctgtaaatcccagcacttttggaggccaagacgggtggatcgcctgaggtcaggagtttgagaccagcctggccaacatggcaaaaccccatctctactaaaaatacaaaaattagccgggtgtggtggcagacgcctgtaattccagctacttgggaggctgaaacaggagaatcacttgaacccgggaggtggagtttgcagtgagccgagattgcaccactacactacagcctgggtgacacagcaagactccatctcaaaaaataataataaaataaaatatatttgggtctcaaaaaacttttaaatttaatatgtaaacatagatctagttctttctttataataatggaatgttctttaatatagttacatcgacttttgttaatcatagtttgtttctacttatttgctattataatacctatttaaaatagcaaatatgctcgtaaatatgtcttagtgcctataagtatttctgcagaacagattcctagaagtatatcgcaagatcaaagagtaggcttactttacattttggtaaatatcatctattttatacatgctttagtatttcctctgtaggtgaatctttgtatcctctttgtaccttctactcagttatttgtattttttcatatgcaagcactctatatattatattttatatatgttataaatatttctcctagtctgtagcttaacttcatttttatgattatctcacagaactttattttttcatttttatgggggtcaaaattatacttatatgatttatgagttttgcgtattgcttaggaaagctttctctatccccagagttataaatttaaaaagtcttttcttcaaatacttttataatttgtttttaacagttaatctgaatatttttgctttatgttatgaactgagtttaattttttcttaggttagccaattgtcacaatgcaatttattgaaaagtcttgaataattttattgatttgagatgctacctttactatgaacagtattcttgtacatgtctgggtttctgttctacttttttctcttaatgtatttgttcatccctatgcctaaatacactgtttttatactacattctggttattagtaggtcatatcacattgttattctattaaaagttaatttgctaatcattggtattcttttcatatatgagaaccagcgtatcaacatctttacaatgttgagtcttcccattttaaaatatgaaacagaatttcatttatataggtttttaaatacccttttataaaagtcctgcacattttctatttcttcccaagtataaaatgtgttatgttgctattgtgaatgagatttcttttatcattatgttctctaagtcattattgataatgttaatttggccaggcgtggtggctcacacctgtaatcccagcactttgggaggccgagacaggtggatcatgaggtcaggagatcgagaccatcctggctaacatggtgaaaccctatctctactaaaaatacaaaaaattggctgggcgtggtgtcgggcacttgtaatcccagctactcgggaggctgaggcaggagaatggcgtgaacccaggaggtggagcttgcagtcagccatgatcacaccactgcactccagcctaggcaatggagcaagactctgtctcaaaaaaaagtactaagttgtgtatattgatttttacatctggccaccttattatgctcttaacatgacctcttaaactctaatcgttttttatcctgattttcatgatagaaaaaccttatatatttccctaattaattgatgggattttagtaaaacttcaattctgaaatgttttaagatggaccaaccaacacccatcctttgagagcttacataaggctaagaacattgaaggtaccactgggaccccacgggaaaacatgtaactcttgtttgtgaaacacagtcttcctattttgacatagggtttgtgatatggtttggatttgtgtccccacccaaatctcatgtcaagctgtaatctctagtgtaagaggaggggtttggcaggaggtgattggatcatgggggcagattccctccttgttgttatcatgctagttagttctcatgagatctgattgtttaaaagtgtgtagcacctcccctttcactctctccctcctgctctggccatgtaagacatgcctccttcctcttcatctttcaccatgattgtgagtttcctgaagcctctccagccatgtttcctgtacagactgtagaaccatgagccaattaaaccccttttctttataaattacccagtctcaggcatttctttataccagtgtgagaacagactaatacagatgtttgtttggtttggattttttttgtataggtcaagtactatcttatttttctagtaggttttcctattcctctcacatacatacaaaaaaagaattctcatatttaatagccgtcttcattgcttaccaaaagaccaccagtgaagtacataaatatataaattacacaaaaaagtatttttaatactgaaaaaataaagacaagaggaaatcattttcagcttcactgtcacacagcccatttctattcttagccagcctgggtcttccacagaagagcacccgctaggtcagggtttgcttccctgacatggaaacactgcagccaactgcctttgagtgggtgtcccatcagcctccaaggccacatttcctgtgggagggaattcctgatgctggaatccttgctaacttccttttccaaaactgattgcttcatatagggacatgttttctctgcttctataggtccgaaaggacatagaaacattccaatgaacagctctgaggtgatcttcctccattttctttcttacaagctaagggctcatttccttcaacttaatttgtatagagtagaacctttttggttacagatacagatacaatgagagatgtctagatgagaagatgtcatgttctattttgatccattcataatgaattggtttggtccctttgccattgctagctgactgtggcttcctagggcactgtttggagagaggtctgaagctgcctctggccatagtcaacaaataatgtctgtcatgagcatgggagggaatgtagcaggatgcccaagaagcattagccatctttgattataattggctttttgtttctgagcttatttctataaccttagaagttttgttcatttatagatattatacatataatatacatataaaagaaaaaatactgtgcttttttttcttggatcaacaaagaagtttaaacagtccagtgctcttaaatctgggaagccttaatgctaagcattgagtatataaatttatatcctaaataaaactttggccagaatactatattctgtactttcaaaaatacttttgtagttacgatttttcctactatcattaatagtagtagtaattgtagcattactagtaattgtaactctcttaaaacccaacttggtataattttggctggcatataacatcatcagtaaagtattttcacataatactcacaaaaatagagaactttatttttacaattcacacatgctaggtggctaagggctaaagaaataccatgaatgtttctggtttttaccaaagatcagttatatgttttgtataattgagggagtaacacaacccaaaagttagaatttgcatactttttgagaaattagtcaagaaaatagcaatgtgctgctctaagcattagaggttcccaagtctgcgcttcagaatgggattatctgggaaacctggtagagaagacagtttgtttttctttttaaaaagtgttgagctgtggtttagggtattaaataataaaaactcatctctattttccatatccacatatttataatattttactctttatgggcaaaaatttattctttcaaaccaccccctactatgcctcaacatgtctattacattaaaattatctcatatgtagagcaagaagagg

SEQ ID NO: 23438 - DNA, 2296 bp, Homo Sapiens
gtttatttgcaaaatcaccagtatattttctattgtgtctataaaaaatcagtcatttaagtacaagaatcatattttccattcctttttagaaatttattttgttgtccctatggaaatcattcacatctgacaatttatatgttaaagagttttactctctctattttggtccaatttgtatctagtggctgagaaattaaataattctaaagtatgaagttacctatctgaaaatgtacttacagagtatcattttaaaatggatgtctctttaaaaattttgttacttttaccaacaatgtaatataatttatgtatattttattaataatagtgaattccttaaaatttgttctatgtacttatatttaatttgatttaatggttactgcccagatattgagaaatggttcaaatattgagtgtgtttcaatatattatctggcttatttcaacatgagtaatatgagcaaaataagttaaaacctgcgtctgatcaattttcctcatgactagaactaaaacagtaaatttggacaatattaagcctcaaataatcatctccaaactccttctaacactttttaaatcagattggaagacatggacaaatcaggttcatgtgttgcatctttatgtcctttgccaatatccaagatcatcacatatggtagatattcacatggagtttcaaattcagaatagattaccattaccttcctgcccttacacatcctactccttatttaaaagttctatttgtgacttttcatttcctgaaagtttaaaaatacaatttgagaatgtttataatacattctctcctgtcttttcacggttacgtctgttattgctgaaatacaccacattttctttgttctggtcaaggttaactcaatatctgtgtgaaagagaactactaacaacgttacaatagaggctagatttgaaaaaaaaaatctatagatctaattgatacaattgtagaacaaaatgtcaaaataatgttttaagtataagagaagatggaccaaggagagagagatcatttgaaaatctaattgtagcttttctaggctcacattcatgtactacttttagcacccttatgggctgtgctcgccccctggacagttgagctttggattatcttcctcttcaattttccctctattgacccgagtgtctccctctgcttctacagatttatagtactccttggctcttttgagtctccacttttactcactgtctctgggatttttaagatccttttcttctcttataaatcatcctcttaatgaaaattagcctaacaaaagtttggagactggaatcctactttgagccactgacttgaaataactcttttggcaagttgcctgacatcctgtcttaccaaggtggcatatttgcatttttactgcttaaaacatttttttttttttaccatctttatccaaatttatcatattgatggtaggactaacaggctttttagaagctggctttaactttgagtctcaagctacaatgctgttgggcagcctggtcttcccacgtgagggtttaactttgtttatttgcctccagttattccaaaatgcttattaaatgaaaggcccaggaacatgtttattttagtcacctttgctttttaacaattttgttttgtaatcaatgagtaattcatgatgaattatttttgactaatggatagccgaagcaagcttttaattctaataggtaatgttcttcttttgtcttattgaaacaatgagaatactctgtgcatttcaaatgcactccgattatgctgtggttttattcacataagcacaatatgtgttttatttataacttcataacaaacttataatataataatttaccttagcagacatgcaaaagcttattcttgtgtgacttactttctttaagctaataatataaaaataaatatgtatcttaaaaatctataataaaacattagaaattaaagatatgtgctttttattttgcagatgagttcatttgcttctgtagatgtgttttcagagctaggtacagaggaatgtttgctacctttagcggtgaaaaaagaaagagagtcaagaattttgttggattgtgtttgtgtgtgcatatatttgatatcatcattatatttgtaatctttggacttgtaatcatagcctgtttattctactgtgccattaaatatactttaccttatacataacgaataaaatacctagatgtagatttatttaaaaaaaaaaaaaaaaaaaaa

SEQ ID NO: 23439 - DNA, 1307 bp, Homo Sapiens
cctgctcgctccgggtcccggcgccgcgccatgtgggctgcggcgggcgggctgtggcgctcccgcgcgggtctccgggccctgttccgtagccgcgatgctgcgctatttccaggctgcgagcggggacttcactgctctgctgtctcctgcaagaactggctcaagaaatttgcctcgaaaaccaaaaaaaaggtttggtatgaaagtccttccttgggttctcactcgacttacaaaccgtccaagttggaattcctcatgaggagcacctcaaagaaaaccaggaaggaagaccatgcgcgcctgagggccctgaacggcctcctctataaggcactgacagacctgctgtgtacccctgaagtgagtcaggagctgtatgaccttaacgtggagctctccaaggtttccctgactccagacttctcagcctgccgagcgtactggaagacaacgctctctgctgagcagaacgcacacatggaggctgtcctgcagagaagtgccgcgcacatgaggcaccttttgatgtcccagcagaccctgaggaatgtgccaccgatagtgtttgttcaagacaagggaaatgcagctctagctgagcttgatcagttactggcagtcgcagactttggaccccgggatgaaagagacaactttgtacaaaatgatttcagggaccctgatgccccacaaccctgcggcaccacagagccgaccacaagctccagtctgtgtgggatcgatcatgaggcgctcaacaagcagattatggagtacaaaaggaggaaagataaagggctcgggggcctggtgtggcaggggcaggtggctgagctgacaacgcagatgaaaaagggaaggaagagggccaagccccgcctggagcaggacagctccctcaagagttacctgtcaggcgaggaggttgaagatgacctggacctggttggtgccccggagtacgaatgctatgccccggacacagaggagttggaggcagggagaggaggtggcagaacagaggatggccacagctgcggagcaagcagggagtagatggagaggctctgcccatcccacatttgcagggaaaagcattggcacgcaacgcagcatgtggcttcattgaggcagttgatggagttaaaccatctgctcttctgctacttcaacattttctagcttttccgtgtatctaaacacaatttgctacacaagtcactgttttttttccatgcactgtgtgtaatttaaaaattaaatggccatcttatcacagattctcaaaaaaaaaaaaaaaa

SEQ ID NO: 23440 - DNA, 1293 bp, Homo Sapiens
tcagacaagcactggacgtggcggccattttgttttggacaccgagcaggagctggcggccgctgcagacgaaaggcaggaaagggcaggccgggtgagcagacggatcggccgactagacagccaaccagcaacaacgaactgagctcgcatactaccgcttacgcatctaaccaaccgcccatctagctaacccgagcccctccaccgtcaactcaggttcggccggtccccggcccgcctgccggagccgtggtggcagccccgggaggagcactggcgtctgtttccttcgattctcgggattcgaagatggctgcacagtcagcgccgaaagttgtgctaaaaagcaccaccaagatgtctctaaatgagcgctttactaatatgctgaagaacaaacagccgacgccagtgaatattcgggcttcgatgcagcaacaacagcagctagccagtgccagaaacagaagactggcccagcagatggagaatagaccctctgtccaggcagcattaaaacttaagcagagcttaaagcagcgcctgggtaagagtaacatccaggcacggttaggccgacccataggggccctggccaggggagcaatcggaggacgaggcctacccataatccagagaggcttgcccagaggaggactacgtgggggacgtgccaccagaaccctacttaggggcgggatgtcactccgaggtcaaaacctgctccgaggtggacgagccgtagctccccgaatgggcttaagaagaggtggtgttcgaggtcgtggaggtcctgggagagggggcctagggcgtggagctatgggtcgtggcggaatcggtggtagaggtcggggtatgataggtcggggaagagggggctttggaggccgaggccgaggccgtggacgagggagaggtgcccttgctcgccctgtattgaccaaggagcagctggacaaccaattggatgcatatatgtcgaaaacaaaaggacacctggatgctgagttggatgcctacatggcgcagacagatcccgaaaccaatgattgaagcctgcccatcctcccatgagagactcttgttagtcaacacatctgtaaataaccttgagataacagatgagaagaaatctgattgatgctggatggacctatcacaataggctgtggacttacttgccaccagcttgtgcatttagtgtgttccttttactttttgatactgtgttgtatgaaacccttttgtcctttgatttggttttttgtttttgtttttttagggggg

SEQ ID NO: 23441 - DNA, 5141 bp, Homo Sapiens
ccatgagcatttattacttttgtaataaaaggaaagagatgcccttttaaaagaaaagacgagggcggaaacaaggaagttggcttgctgcttgaggagtaaagtcccagaggccacctccttgacaggaggcgctctggggcattcagaatgggaatggcaggtgggcctgggtcttcacaacccagcatccgtagggcagacggccatgcacagatggtaccaggaatcactgtggctgaggacacaggctagatcagtgcctgccagtgtcatgttcctgatttaaggggccagcctggacactgaccaggggagagctgggctgtgatccttgaccctcgggccctccactcatatcaaatggaccctcttgggactagagccccaggaggcaatggctgtgtggggtccaccttcactatagccctggccatcagtcatcccaagttagagcccggctgcccatgcagtgccgctgtgggaggcacaggaaggcggtgctcagtctgaaggtggttcaggtccgtaccttaactgagcccccccatgtaccctcaactggctcctttatgcagtgaacaccctgcaccactgcagccctatatccagggctgcgactcagttccttctccccttctcccagactctggcagacatacctcagatgggggcaggaaccaagaatggcggggctccagccccagctagcctgtcggataactgctgcataagtgacaccaggaatcagagccaggccagggccactgatgagcccttggatgctcactgtgtgatgcgtgcatttgaaatatctgacagtaagagtgaggcctgggagagatgcagggactctgaggatgggggccaagctgggctgagaaacaagttagtggtgtcctgcagcagcccctacagcaagtgccagcgtgggagggaggtgggtaggcatggggtgggtggtatggcactcacagcactgcctgcagaccaccaccacctgacagctgggccggtggtgccagctaatggctccctagttttctcgtaagtcagacgtggccaaagcaaaacactgagcacacaggttgccttgaggagcagtgactgcctcaagagctcagggctgaggagctggctccagacagcctgttgccaatgttcagcaacatcaccccactcctggttactgatcgacctggtgtgctcttgagagtacccccaccaggcctcatgggtcaatactactgttattgttgctattgttattaccaggccccgccctcctaaagcatttgcatattttcatccttaatcacagaaccagaatcagtatcttccagaagagaaaactgaggcccaggagaaagcaagaggctgtgctgtgctcccagggccttcctgggctcgctgtggctttgagctccaggtctctcagctagacaatgagaacgtcggcccacgcgcggcacagtaaaagcccaaaatgctatgatggacggggtgggccgctggctgcagagccctccataccacagagcatctctggctgggagaaaggagcaggctgaggcctgcagcagagcgcggggttggggaccgctcctgttgggccccagcaaggcgccctgagacccctgctccatccctgccgctccccacccgcctgctcctagcctctgttctagctctgcccgcggcgggccacagcctccccgagccgccggccgggccctctgctgccctctggcggcccgagcgcgcggtgccgagctccgcgcctgaggccctgaaaccccgcgtccgcccggcggtcgcctcccgggaacaagagcccggctggggaccggagcggaagggggctggggctggggctgtgctctgaggactgcaatatacggtccgcgcaagcactcagcaaacgctgctgcgcttactgggttacttactagattcctattctctggggaaactgagaaccaaagaaaataagagtacgcgcgcgggaggtgcaggaatgggggtccttgcccgaagtcgcagagggacaggggcaccgccgggaccagaaccccgacgcccctgcggccgccgagcccgcggcagtggaaaagcggagtccgagcgcctccagcctcagcccgaccctggactgctccccccagcccccgcgcccagagagcaggagcccggcagcgggtgacgaggtcgccgggactgggagccggtgcgggggaggcgggccccgcggggcgtgacgcaccgagctgggagggccggggcggggcagccgagcaggctgcatataagggcggcggccgggcgccaaaggcagagcaagcggcctgtgcccagatcctgggagaaccccagccgagcccagcctagcccgagcccagcccgagcggagccggagccccaagcccgagccgcgcccagcccgagcagagccctccagccgctcaccccgcgtgccaccccagcgaccctcagccgctctctgcccttctctcggccccgcgcccgccctcgcggcccctctgcccaatgaaactggccgcgatgatcaagaagatgtgcccgagcgactcggagctgagtatcccggccaagaactgctatcgcatggtcatcctcggctcgtccaaggtgggcaagacggccatcgtgtcgcgcttcctcaccggccgcttcgaggacgcctacacgcctaccatcgaggacttccaccgcaagttctactccatccgcggcgaggtctaccagctcgacatcctcgacacgtccggcaaccacccgttccccgccatgcggcgcctctccatcctcacaggtgagccgggggccgggcaggtgcgggagggaagggcggggaaccctcggccagggcgccccgcgagcgccggtccggctgccgcgcgccgagtagtgcgcttcgcgcttagagaggctagcgcgccccgcgcggcctcaaagtcagcccgacttgtcccctgggcggccaccctcaccttctccttttctgctctctgtgccccctctaggagacgttttcatcctggtgttcagtctggacaaccgcgactccttcgaggaggtgcagcggctcaagcagcagatcctcgacaccaagtcttgcctcaagaacaaaaccaaggagaacgtggacgtgcccctggtcatctgcggcaacaagggtgaccgcgacttctaccgcgaggtggaccagcgcgagatcgagcagctggtgggcgacgacccccagcgctgcgcctacttcgagatctcggccaagaagaacagcagcctggaccagatgttccgcgcgctcttcgccatggccaagctgcccagcgagatgagcccagacctgcaccgcaaggtctcggtgcagtactgcgacgtgctgcacaagaaggcgctgcggaacaagaagctgctgcgggccggcagcggcggcggcggcggcgacccgggcgacgcctttggcatcgtggcacccttcgcgcgccggcccagcgtacacagcgacctcatgtacatccgcgagaaggccagcgccggcagccaggccaaggacaaggagcgctgcgtcatcagctaggagccccgccgcgctggcgacacaacctaaggaggacctttttgttaagtcaaatccaacggcccggtgcgccccaggccgggagcgcgcgcggactggcgtctcccctcccggcgatccgccccccacactgggaggcgccactgaaccgagaagggacggtcatctgctccggaaggaaagagaacgggccaagactgggactattccccacccccggtcccccattgaggcccgccacccccataactttgggagcgagggcccagccgagggtggatttatcttctcaaagacctaaagtgagcgcggggtgggggagggatgtgaagttatccagcctctgctaggcttcaagaaaccgtcatgcccgcttgagggtcaggacccacggggcattatcttgtctgtgattccgggttgctgtgacagccggtagagcctctgccctcccgaaactaagcgggggggcgtgggtcaaatcatagccaagtgacttgtttacatgtgagtgaaactgcacaaaggaacacaaaacaaaacttgcactttaacggtagttccggtgtcaacatggacacgaacaaaaccttacccaggtgtttatactgtgtgtgtgtgaggtctttaaagttattgctttatttggttttttaatatacaataaaataatttaaaatggaaaaccgggtttttttttttttttttttttttttcgcttttaaaaatggctggagtggggaagggtggggagaaggaaagggctgggctttgacttaggtggaactagaacttaccttccccagaactggaaaataaccctggccttctgaaggcagcttcagctgccagaaaagccccagatgcctggggcatctatgtaggggatggttccctagaaaaccgggaagaatataaaggatttcagggtctcccctggagatgaactctttctagccatccacccgcttaattttctttgggttagatgacaaaaggcctcattttctgagagaatgttctgaattcttcagcgtaaaagccactggaactgtgcctaaccattttgtcaccagactcagtgtgggcccaggcaaactttcggactgttggaggcatcagtcaggccctggggaaagagcctgagaccccatctggaaacaggaccatcctggcgcgcccccaccacccgctcactccagggtgccaccctgtctggaaacagctaactcctcagcctctgctcccctctagctccaggaagtgctcctggccaggtgtagagccccatcccccttcagccttgctgtctcggtctcatggctaaggcaccccagaacaccaatctctctgccactagtactgcaaacctgttggtgggtgacacctgccaagcctctaattcttcaccccgggaagagagaacaccctcggcatgggctcactgtggggattaagtgtgatgtttgaaaagtacttagcataaatgccggccacccagtaatccaagtaattggtggctttcagaggacgctca

SEQ ID NO: 23442 - DNA, 2700 bp, Homo Sapiens
gtcagattctcctctaagtctggctttcctgcaaaacccagtcttgtaatcattttgccaacattaaaaatgtgttccaggtctacacctgacagtcactggaatgctactccaggccttagaagaaagtgaaactaattttaaaggccccttattctttctgttacctgcctgctgaagtgaaaataaatctccctgctcctttattctatactgattttactttcccatctcaaaaacgtgtgcagggagcaggagccctcctacccgagccccagctgtattggaaaccctcctaagtcagagtgatgggtcaggaatctagcaagcctgtatggcccaatccaacaggagggtatcagtccaatacaggtaggaggtatggaagaaggcatgcttatgtcagtttcaggccacccacgagccagcgggaaaggattgccagccagagaaagacgaactccgaagtcccaatgcacagatcagcccccagtcaaaccaccaagaggagccgatcgccattttccactactcgtcgtagttgggacgacagcgagagttcgggaaccaacctgaatattgataatgaggactattccaggtatccgccaagagagtacagagcttcgggtagcagaagaggaatggcctatggacatattgactcttatggggcagatgatagtgaggaggagggggctgggcctgttgagcgaccgccagtgagagggaaaactggcaagtttaaagatgataagctgtatgacccagagaaaggggcaaggtctttggctgggccacctccacatttctctagttttagccgtgatgtgagagaggagcgagacaagttagacccagtccctgcagcaagatgctcagctagcagagctgacttcctgccacaaagtagtgtggcctcacagtcgtcttctgaaggcaagctggctacaaaaggtgacagctcggagagggagagaagggagcaaaatttacctgcacgtcccagcagggctcctgtgagtatttgtggtggtggggaaaacacctcaaagagtgcagaggaacctgtggtcaggcccaaaatcagaaacctggcaagtccaaactgcgtgaaaccaaaaattttttttgatactgatgatgatgacgatatgccacacagtacttccaggtggagggataccgccaatgacaatgagggccactcggatggcctggcaagaagagggagaggcgagagttcaagtggctatcccgagccaaagtaccctgaagacaaacgggaagcgaggagtgaccaagtgaaaccagaaaaggtgccgagacgacgacgcaccatggccgaccctgacttctggacgcacagtgatgattactacaaatactgcgacgaagactctgacagtgacaaagagtggattgctgctctgcgtcggaaatatcgaagccgagagcaaaccctgtcctccagtggcgaaagctgggagactctgccggggaaagaagagcgggaacctccacaggctaaggtgagtgccagcactggcaccagccctggccccggtgctagtgccagtgccggggctggcgccggggccagtgctggcagcaatggcagcaattaccttgaagaagttcgagaaccatctcttcaggaagagcaggcatccctggaagaaggagaaattccttggctccagtaccatgagaatgacagtagcagtgagggggataatgattctggtcacgagttgatgcaacctggggtattcatgctggatggaaacaacaaccttgaagatgactccagtgtgagcgaagacctagaagtggattggagcctctttgatggatttgcagatgggttaggagtggctgaagccatttcctatgtggaccctcagttcctcacctacatggcacttgaagaacgcctggcccaggcaatggaaactgcccttgcgcacttggagtctctcgcagtggatgtagaggtggccaatccaccagcaagcaaggagagcattgacgctcttcccgagatcctggtcactgaagatcatggcgcagttggtcaggagatgtgctgccccatctgctgtagcgaatatgtgaagggggaggtggcaactgagctgccgtgccaccactatttccacaagccgtgtgtgtccatctggcttcagaagtcaggcacctgccccgtgtgccgctgcatgttccctcccccactctaaagaccaaggccgtttactcctggtctgattattttccccatctgaaatccacaatactgcaggagccctcttgaaattaacaatggaaataaaaccaatcagtcagttagcctaaacctattgattcctcgtgattatttccaatgtgaaaacagttgtgtatgattgcattaaaaatcatatcatcttttagaggttagaaaagggaaaactaaactttctaaatgctacttgagattgcagtaagaagatacgttttctaacctgaaagttaaatcgcatttgttttcttcagtagaatgggaatgtgttgctgttacttgtaatgtcaagtttatctgttaaatatgtccaaaaggcaaaatcatttttgttgcatgttatgggtcgatgttcctgtaattgcagtgccgtaaaagcttattaaagttgttcttttggttttacatggtaaaaaaaa

SEQ ID NO: 23443 - DNA, 2494 bp, Homo Sapiens
ggcacgaggctacaaacaaacaaacccagtccaaacaacgcctccagtaggaaaagaggaaaactgcgataacacgaccccccgagaagagacgagaccaacacgctgagactgtggggcgtcagcaaacctccaagtgcacggcggactgagttgtacttcgcagctctctggacattaattacctcctgcaccttccatttgggggagggtgaggaagaaggcactcacctacactgagcgaagaagtcctatcagcgtggaagagaagtttaagaatgaaccactgaatgtttcgcttttatttttaaatttactttggcacttaaaaaacctcatttccagatttctggacaatctcggctgcagacatctaagcctaaccttttggtatcctgagttttttccctctccttctccttcctcacgcccaccccgcttctctcgcacacggtcatctttacatatcaagagaaagcaaaaaggttccaagaggtacttttctttttagaaaatcaccttttctcccctaattcttctgcagaagaaaagaggtttcgaaagagggaaaaggaaaaaacaagccggctacggtatcagccggtcagcccaggtggaaaacgagagtgaaagtagggcttaacggggagcgcaccgcctctttcgaaagccgctgggccaccaccagtgcgtgagccttggatccctcaacgtattgcgagacgccggtgtatagcccggacctgtgccccaacatgatcgccgctcaggctaagctggtttaccagctcaataagtactacactgagcgctgtcaggcgcgcaaggcggccatcgccaaaaccatccgagaggtctgtaaggtggtctcggacgtgctcaaggaagtggaggtgcaggagcctcgcttcatcagctccttgagcgagatcgatgcccgctacgaggggctcgaggtcatttcgcccaccgaatttgaggtggtgctctacctaaaccagatgggcgtcttcaacttcgtggacgacggctcgctgcccggctgcgcagtgctcaaactgagcgatgggcggaagcggagcatgtctctctgggtcgagttcatcacggcgtcgggctatctctcagcgcgtaagatccgctcgcgtttccagacgctggtggcccaggcggtggacaagtgcagctatcgggatgtggtcaagatgatcgcggacaccagcgaggtcaagttgcgcatcagggagcgctatgtggtgcaaatcactccggcgttcaagtgcaccgggatctggcctcgcagcgcggcacagtggcctatgccccacatcccttggcccggccccaatcgggtggccgaggtcaaggccgaagggttcaacttgctctcgaaggagtgctactcgctgaccggcaagcagagctcggcagagagcgacgcctgggtgctacagttcgtggaggcggagaaccgcctgctgatgggcggctgccgaaacaagtgcctctcagtgctgaagactctgcgggaccgccacctggagctacccggccagccgctcaacaactaccacatgaagacgctgctgctgtacgagtgcgagaaacacccacgagaaacggactgggacgagtcgtgcctgggcgaccggctcaacggcatcctgctgcagctcatctcctgcctgcagtgccgccgctgccctcactactttctgcccaacctcgacctctttcagggcaagccccattcggccctggagagcgctgccaagcagacctggaggttggccagggaaattctcaccaatcccaaaagcctggacaaactatagggtgctggggactgcttgaaaagcgacacaaacgggcgtgctctctcagacacacaactcagctataaacagcagaaactctggacacaaacttttatgtaagtcacctgaaataggaatccggcagaagaccttcattaattaagaagcaaacaaaaagagagcaacccaaccaaaacaaatcacattcttgcacaaaagtgatcgttttcttccaaacaatgtgaatttaaaaggtcacacaaaagaagcaatcgggctccgccaccacaaaatgaaacccaaggtacattttcaaatcaatgtatagtagttccccccccttttccttctttccccctatcctttttctctccaccccatcccccccccatttcgttttgcttttggttgcctgaatgttgtcaccaagtgaaaaaattatttaactatatgtaaaatttctcttttaaaaaaaagttttactgatgttaaacgttctcagtgccaatgtcagactgtgctcctccctctcctgaacctctaccctcaccctgagctgtcttgttgaaaacagtaataaaaacattactttacattgtaaaaaaaaaaaaaaaaaaaaaaaaaaaaaaaaaaaaaaaaaaaaaaaaaaaaaaaaaaaaaaaaaaaaaaaaaaaaaa

SEQ ID NO: 23444 - DNA, 1452 bp, Homo Sapiens
cgacttcacgcagggtccgtggggtccccgcggcgcgcagcggctgaaggaggccccagggccttggcgaccgcagcggcggctttagcgtcagtgactaggcagcagggggtcaggatgcggcgaagctcccgcccgggctcggcctcgtcctcgcgcaagcacacgcccaactttttcagcgagaacagctcaatgagcatcacctcggaggacagcaaagggctccggtcagcggagcccgggcctggggagcccgagggcagaagagcccggggcccgagctgcggtgagcccgccttgagcgcgggagtgcccggaggaaccacatgggcaggaagctctcagcagaagccagcgcctcggagccacaactggcagacagcctgtggcgcggcaaccgtgaggggcggggcctcggaaccgactgggtctccagtagtctctgaggagccgctcgaccttctcccgaccctggatctgaggcaggagatgcctcccccgcgggtgttcaagagctttctgagcctgctcttccaggggctgagcgtgttgttatccctggcaggagacgtgctggtcagcatgtacagggaggtctgttccatccgcttcctgttcacggctgtgtcgctgctgagcctctttctgtcagcattctggctggggcttctgtacctggtctctcctttggagaatgaacctaaggagatgctgactctaagtgagtaccacgagcgcgtgcgctcccaggggcagcagctgcagcagctccaggccgagctggataaactccacaaggaggtgtccactgttcgggcagccaacagcgagagagtggccaagctcgtgttccagaggctgaatgaggattttgtgcggaagcccgactatgctttgagctctgtgggagcctccatcgacctgcagaagacatcccacgattacgcagacaggaacactgcctacttctggaatcgcttcagcttctggaactacgcacggccgcccacggttatcctggagccccacgtgttccctgggaattgctgggcttttgaaggcgaccaaggccaggtggtgatccaactgccgggccgagtgcagctgagcgacatcactctgcagcatccaccgcccagcgtggagcacaccggaggagccaacagcgccccccgcgatttcgcggtctttggcctccaggtttatgatgaaactgaagtttccttggggaaattcaccttcgatgttgagaaatcggagattcagactttccacctgcagaatgaccccccagctgcctttcccaaggtgaagatccagattctaagcaactggggccacccccgtttcacgtgcttgtatcgagtccgtgcccacggtgtgcgaacctcagagggggcagagggcagtgcacaggggccccattaaacatgctgatttttggagtag

SEQ ID NO: 23445 - DNA, 6409 bp, Homo Sapiens
aaagatcttttttttttttttttctttttttttcggcggagatcctcgttggggctgggaaactcctgcaaaactcgagaccaggaagccagcccgcaccccaacccccaccaaagccacctactcttcttctgtgggaggccagtccacatccgctctcacccgagagagatattcagctggatccaaagtgactgatgaagggaaggaaatcatgtcaagcgaagccttgaaaaagctgccctgagacggtgtcccgccgaaagaatgttggctcaattaagaaacatcagggagataaattcaacccagtgtgtctaaaaatgactacaaaacgaagtttgtttgtgcggttggtaccatgtcgctgtctacgaggggaagaggagactgtcactactcttgattattctcattgcagcttagaacaagttccgaaagagatttttacttttgaaaaaaccttggaggaactctatttagatgctaatcagattgaagagcttccaaagcaactttttaactgtcagtctttacacaagctgagtttgccagacaatgatttaacaacgttaccagcatccattgcaaaccttattaatctcagggaactggatgtcagcaagaatggaatacaggagtttccagaaaatataaaaaattgtaaagttttgacaattgtggaggccagtgtaaaccctatttccaagctccctgatggattttctcagctgttaaacctaacccagttgtatctgaatgatgcttttcttgagttcttgccagcaaattttggcagattaactaaactccaaatattagagcttagagaaaaccagttaaaaatgttgcctaaaactatgaatagactgacccagctggaaagattggatttgggaagtaacgaattcacggaagtgcctgaagtacttgagcaactaagtggattgaaagagttttggatggatgctaatagactgacttttattccagggtttattggtagtttgaaacagctcacatatttggatgtttctaaaaataatattgaaatggttgaagaaggaatttcaacatgtgaaaaccttcaagacctcctattatcaagcaattcacttcagcagcttcctgagactattggttcgttgaagaatataacaacgcttaaaatagatgaaaaccagttaatgtatctgccagactctataggagggttaatatcagtagaagaactggattgtagtttcaatgaggttgaagctttgccttcatctattgggcagcttactaacttaagaacttttgctgctgatcataattacttacagcagttgcccccagagattggaagctggaaaaatataactgtgctgtttctccattccaataaacttgagacacttccagaggaaatgggtgatatgcaaaaattaaaagtcattaatttaagtgataatagattaaagaatttaccctttagctttacaaagctacagcaattgacagctatgtggctctcagataatcagtccaaacccctgatacctcttcaaaaagaaactgattcagagacccagaaaatggtgcttaccaactacatgttccctcaacagccaaggactgaggatgttatgtttatatcagataatgaaagttttaacccttcattgtgggaggaacagaggaaacagcgggctcaagttgcatttgaatgtgatgaagacaaagatgaaagggaggcacctcccagggagggaaatttaaaaagatatccaacaccatacccagatgagcttaagaatatggtcaaaactgttcaaaccattgtacatagattaaaagatgaagagaccaatgaagactcaggaagagatttgaaaccacatgaagatcaacaagatataaataaagatgtgggtgtgaagacctcagaaagtactactacagtaaaaagcaaagttgatgaaagagaaaaatatatgataggaaactctgtacagaagatcagtgaacctgaagctgagattagtcctgggagtttaccagtgactgcaaatatgaaagcctctgagaacttgaagcatattgttaaccatgatgatgtttttgaggaatctgaagaactttcttctgatgaagagatgaaaatggcggagatgcgaccaccattaattgaaacctctattaaccagccaaaagtcgtagcacttagtaataacaaaaaagatgatacaaaggaaacagattctttatcagatgaagttacacacaatagcaatcagaataacagcaattgttcttctccatctcggatgtctgattcagtttctcttaatactgatagtagtcaagacacctcactctgctctccagtgaaacaaactcatattgatattaattccaaaatcaggcaagaagatgaaaattttaacagccttttacaaaatggagatattttaaacagttcaacagaggaaaagttcaaagctcatgataaaaaagattttaacttacctgaatatgatttgaatgttgaagagcgattagttctaattgagaaaagtgttgactcaacagccacagctgatgacactcacaaattagatcatatcaatatgaatcttaataaacttataactaatgatacatttcaaccagagatcatggaaagatcaaaaacacaggatattgtgcttggaacaagctttttaagcattaattctaaagaggaaactgagcacttggaaaatggaaacaagtatcctaatttggaatccgtaaataaggtaaatggacattctgaggaaacttcccagtctcctaataggactgaaccacatgacagtgattgttctgttgacttaggtatttccaaaagcactgaagatctctcccctcagaaaagtggtccagttggatctgttgtgaaatctcatagcataactaatatggagattggagggctaaaaatctatgatattcttagtgataatggacctcagcagccaagtacaaccgttaaaatcacatctgctgttgatggaaaaaatatagtcaggagcaagtctgccacactgttgtatgatcaaccattgcaggtatttactggttcttcctcatcttctgatttaatatcaggaacaaaggcaattttcaagtttgattcaaatcataatcccgaagagccaaatataataagaggccccacaagtggcccacaatctgcacctcaaatatatggtcctccacagtataatatccaatacagtagcagtgctgcagtcaaagacactttgtggcactccaaacaaaatccccaaatagaccatgccagttttcctcctcagctccttcctagatcagagagcacagaaaatcaaagttatgctaaacattctgccaatatgaatttctctaatcataacaatgttcgagctaatactgcataccatttacatcagagacttggcccagcaagacatggggaaatgtgggccatctcaccaaacgaccgacttattcctgcagtaactcgaagtacaatccagcgacaaagtagtgtgtcctccacagcctctgtaaatcttggtgatccaggctctacaaggcgggctcagattcctgaaggagattatttatcatacagagagttccactcagcgggaagaactcctccaatgatgccaggatcacagagacccctttctgcacgaacatacagcatagatggtccaaatgcatcaagacctcagagtgctcgaccctctattaatgaaataccagagagaactatgtcagttagtgatttcaattattcacggactagtccttcaaaaagaccaaatgcaagggttggttctgagcattctttattagatcctccaggaaaaagtaaagttcctcgtgactggagagaacaagtacttcgacatattgaagccaaaaagttagaaaagatgcctttgagtaatggacagatgggccagcctctcaggcctcaggcaaattatagtcaaatacatcacccccctcaggcatctgtggcaaggcatccctctagagaacaactaattgattacttgatgctgaaagtggcccaccagcctccatatacacagccccattgttctcctagacaaggccatgaactggcaaaacaagagattcgagtgagggttgaaaaggatccagaacttggatttagcatatcaggtggtgtcgggggtagaggaaacccattcagacctgatgatgatggtatatttgtaacaagggtacaacctgaaggaccagcatcaaaattactgcagccaggtgataaaattattcaggctaatggctacagttttataaatattgaacatggacaagcagtgtccttgctaaaaactttccagaatacagttgaactcatcattgtacgagaagtttcctcataagcactgtggacaaaaaaagcggggaagacagcaagatttattggaagatacttacaggggaaattaatattttgactatttttatatataaagaagaactcaaaaaattatgttcaaatttgtacattaatgaaataatggataaaggagactgttgaattcataccatataaaacttgttaggtttttaaacatagcaatcaaggctacaaaaacaaacctgtgttgtttttgtatagattgtaggtttatttttggatttcatatacatgactgaactgtgtgcaaggcaatagttagccttgattttagcccagagacagatggcagagctatctctctcatagcttttatgcccttatttttattcaactggtattaatgtttttctcctgaaactactttttttgatgtgggcaagagatttgaagtgttggcttttgctatgtgcatattgaattgaagagtgagtaggtgaaggtggtgctggtgggttcactttccaaggccagactaaaacagttattttctataaaaatctggaagcaaagaatggggatggggagagctacgtggtagtatgtttttattaggagaataatgcaataaaatatgtaatgtcttttttataaagcaaaaaagacaataattgcatttatgagctcggcaggatctgttcttgtcatagccattgactatacatttgctactggtgattcagtttttaattttttagtcacaggaaatttttaactctactgtagatgcatgtccatgcattttctgtgttatggaaatccactgatttttttttttttttcaaatggtggtacttgcaatctgttttataattagtgctccatttaaatctaatttataatttttattttaagcagcaaatgaaacaaaaatggccagttttaagattgtgttgcctgtaacacaaaatgttacgaaggtttaggaaagcctctttgatttttgtttggccttgcattggcccttggtaaagtaaaaggaaacagtacacttggagctaggaaaccaaagcaagctttgtgaaactggcacagtgatagagaattgctgtggagagttatagagcaaagggatgggtccttgaggcctgccagtgtgtaaaggtgttcaaataaagggctgtttctacaggtaacattaaatgtgaactcaacacttccagagtctttaaagggtttctatgtgtatcagtgtaatagtgttttaccaccaactgcctttctttgttcctagttactgtaacaaatatttgatgatagaggtttattaattttgtttatccagaccattaattttatttgtttttgtctatgtaatcaaataaaatttgagtaacatgtaatggtaaggattaatgcatggttatttggaccagaaaaaagtgccatagaagaccaataactgtttagttgaggctagtctggaacctttcattagagcaatatttggttattgcacttcatttttatttactaagaaatgcaatttgggaatttttaatctgttatgctttgtttatcaaccttgattttaattaagacttttataagactagcttaaaacaccaaccaacattatttttgcaaaagtgagttggactcactttccattcttgctagtcagagtaagtaggcagcacttttaaaaatatgtgaactcaaatattgcacttctttcaagatgttatcaattggttattgtactgtatagttttaataattttgattgaaaccctttaacaactctttgtaaattttaactcattttagttgattttcagtactatttacataggaattgatttttatggatatagtagaagaaatgtgctgtattttgataaaattcacttattgtatgtgtgttgtaatctaaaaaaaaaaagaatgacaaacagcttctttaagacaaaaaaaaaaaaaaaaaaaaaa

SEQ ID NO: 23446 - DNA, 3074 bp, Homo Sapiens
cccgccccactctggactcccgcgctgggcgcgctgaggcggcccccgagcgagcgcgcgtgcagccgccgccgccccgagcacccgcagctccggcgccgcggcgagacggagacggaccgagccacgggcccccgcggccgcagcatctcggaggagaacatgcttgccaactcagccagcgtgaggatcctcatcaagggaggcaaggtggtgaacgatgactgcacccacgaggctgacgtctacatcgagaatggcatcatccagcaggtgggccgcgagctcatgatccctggcggggccaaggtgattgatgccacaggaaaactggtgatccctggtggcatcgacaccagcacccacttccaccagaccttcatgaatgccacgtgcgtggacgacttctaccatgggaccaaggcagcactcgtcggaggcaccaccatgatcatcggccacgtcctgcccgacaaggagacctcccttgtggacgcttatgagaagtgccgaggtctggccgaccccaaggtctgctgtgattacgccctccacgtggggatcacctggtgggcacccaaggtgaaagcagaaatggagacactggtgagggagaagggtgtcaactcgttccagatgttcatgacctacaaggacctgtacatgcttcgagacagtgagctgtaccaagtgttgcacgcttgcaaggacattggggcaatcgcccgcgtccatgctgaaaatggggagcttgtggccgagggtgctaaggaggcactggatttggggatcacaggcccagaaggaatcgagatcagccgtccagaggagctggaagctgaagccactcatcgtgttatcaccattgcaaacaggactcactgtccaatctacctggtcaacgtgtccagtatctcggctggtgacgttatcgcagctgctaagatgcaagggaaggttgtgctggcggagaccaccactgcacatgccacgctgacaggcttacactactaccaccaggactggtcccacgcggctgcctatgtcacggtgcctcccctgagactggacaccaacacctcaacctacctcatgagcctgctggccaatgacactctgaacatcgtggcatcagatcaccggcctttcaccacaaagcagaaagctatgggcaaggaagacttcaccaagatcccacatggagtgagtggcgtgcaggaccgcatgagcgtcatctgggagagaggagtggttggaggaaagatggatgagaaccgttttgtggccgttaccagttccaacgcagctaagcttctgaacctgtatccccgcaagggccgcattattcccggagccgatgctgatgtggtggtgtgggacccagaagccacaaagaccatctcagccagcacgcaggtccagggaggagacttcaacctgtatgagaacatgcgctgccacggcgtgccactggtcaccatcagccgggggcgcgtcgtgtatgagaacggcgtcttcatgtgcgccgagggcaccggcaagttctgtcccctgaggtccttcccagacactgtctacaagaagctggtccagagagagaagactttaaaggttagaggagtggaccgcactccctacctgggggatgtcgctgttgtcgtgcaccctgggaaaaaagagatgggaaccccactcgcagacactcctacccggcccgtcacccggcatgggggcatgagggaccttcacgaatccagcttcagcctctctggctctcagatcgatgaccatgttccaaagcgagcttcagctcggatcctcgctcctcccggaggcaggtcgagtggcatttggtaaaggcattgccaagccccccgagtgaggacgcaccgccgccaccagcccgcaactctccagccgaagctgcaggggcaggagaggctgggctgggtggcacaccacccgaggggggccccgggacccacggagccctccctatgtctgcaaagtgattcactgtgcttcgagccaactctaacaggcactttgagatgtgttcctcctgctgtagtcctttctgccttggcctcggcgggcttttctggggcccaggaagcccacactatgcacagagcccaatgcatagagccctggccagcccttcctctcactcctgcctccgctggctttgggaaagcccagactttagtgccctgccccctggctgactggccagttgcccagagcactttagcagatgtggtttcaaagtaaaggcctcctcccccaccccttaggccccgtggtgacatttcccaagtcagacagatgtcagcttcccagccatgcccaggacgtcctatctcccccaacccacctctggccctgtgtaggggcagggatgggggtggctgggactcctggtgcccctcgccagcttctcctgcgccccgcccacaccctcgggggggtcacaggcccagaagggtagctgggcggggctcgaggctggtgccaggcgcgtgtaaatggttttgttttgcacgtttggtttgcgcagtagtttggtttgacttgtttgtgcatcctgtgaaaaataacggtgcttgtgtcactagcatagaatagcgacaggaatagatgtggtccttaggagacgctgcacttgacaccaaccagacagcacagggcaggggtggtggagggggctgggctcacaggcctctcttttccccgcctgcagtcttctgggctgcgggaggccctggccctttccccttcccctcccctccttgtctagtttcccacattccaaaagggggcctgggatgctagccccagagatgccagcccttcaggaagcaggtgtcctttcccctctctgcccctgatcactcccagcactccccttgccttcccctgtcttcacctgccaccacacacacacacacacacacacacacacacacacgcatggcttcctataacttcttcctgctggacagagactcagcgctcctcctgtgtgactggcaagaggcctcatgcctgctgagagagggtcgacgcggccg

SEQ ID NO: 23447 - DNA, 2122 bp, Homo Sapiens
gcggtcgtggcggtcggagatccgagagctctgcttctctgaaaagcgtgtggctttctggacttggtctacacctgacagtcactggaatgctactccaggccttagaagaaagtgaaactaattttaaaggccccttattctttctgttacctgcctgctgaagtgaaaataaatctccctgctcctttattctatactgattttactttcccatctcaaaaacgtgtgcagggagcaggagccctcctacccgagccccagctgtattggaaaccctcctaagtcagagtgatgggtcaggaatctagcaagcctgtatggcccaatccaacaggagggtatcagtccaatacaggtaggaggtatggaagaaggcatgcttatgtcagtttcaggccacccacgagccagcgggaaaggattgccagccagagaaagacgaactccgaagtcccaatgcacagatcagcccccagtcaaaccaccaagaggagccgatcgccattttccactactcgtcgtagttgggacgacagcgagagttcgggaaccaacctgaatattgataatgaggactattccagtacttccaggtggagggataccgccaatgacaatgagggccactcggatggcctggcaagaagagggagaggcgagagttcaagtggctatcccgagccaaagtaccctgaagacaaacgggaagcgaggagtgaccaagtgaaaccagaaaaggtgccgagacgacgacgcaccatggccgaccctgacttctggacgcacagtgatgattactacaaatactgcgacgaagactctgacagtgacaaagagtggattgctgctctgcgtcggaaatatcgaagccgagagcaaaccctgtcctccagtggcgaaagctgggagactctgccggggaaagaagagcgggaacctccacaggctaaggtgagtgccagcactggcaccagccctggccccggtgctagtgccagtgccggggctggcgccggggccagtgctggcagcaatggcagcaattaccttgaagaagttcgagaaccatctcttcaggaagagcaggcatccctggaagaaggagaaattccttggctccagtaccatgagaatgacagtagcagtgagggggataatgattctggtcacgagttgatgcaacctggggtattcatgctggatggaaacaacaaccttgaagatgactccagtgtgagcgaagacctagaagtggattggagcctctttgatggatttgcagatgggttaggagtggctgaagccatttcctatgtggaccctcagttcctcacctacatggcacttgaagaacgcctggcccaggcaatggaaactgcccttgcgcacttggagtctctcgcagtggatgtagaggtggccaatccaccagcaagcaaggagagcattgacgctcttcccgagatcctggtcactgaagatcatggcgcagttggtcaggagatgtgctgccccatctgctgtagcgaatatgtgaagggggaggtggcaactgagctgccgtgccaccactatttccacaagccgtgtgtgtccatctggcttcagaagtcaggcacctgccccgtgtgccgctgcatgttccctcccccactctaaagaccaaggccgtttactcctggtctgattattttccccatctgaaatccacaatactgcaggagccctcttgaaattaacaatggaaataaaaccaatcagtcagttagcctaaacctattgattcctcgtgattatttccaatgtgaaaacagttgtgtatgattgcattaaaaatcatatcatcttttagaggttagaaaagggaaaactaaactttctaaatgctacttgagattgcagtaagaagatacgttttctaacctgaaagttaaatcgcatttgttttcttcagtagaatgggaatgtgttgctgttacttgtaatgtcaagtttatctgttaaatatgtccaaaaggcaaaatcatttttgttgcatgttatgggtcgatgttcctgtaattgcagtgccgtaaaagcttattaaagttgttcttttggttttacatggtaaaaaaaa

SEQ ID NO: 23448 - DNA, 3652 bp, Homo Sapiens
tggcggacgccgcctggtgagaagcaggcagccagtacccttgccacggtagaatgggtgaggaggggccccccagcctggagtacatccaagccaaggatctgttcccccccaaggaactagtgaaggaggaagagaatcttcaggtccccttcacagtgctgcagggtgagggagtagagttcctgggccgggcagccgatgccctcattgccatctctaactaccggctgcatatcaaattcaaggactctgtcatcaacgtccccctccggatgattgacagtgtggagagccgtgatatgttccagttgcacatttcctgcaaggactccaaagtggtgaggtgccacttctccacttttaagcagtgccaagagtggctctcacggctaagccgagccacagcaagacctgccaagcctgaagacctctttgcctttgcctaccatgcctggtgcctggggctgaccgaggaggaccagcacactcacctatgtcagccaggtgagcacatacgttgtcgacaggaggcggagcttgcaaggatgggctttgacgtgcagaacgtctggagagtctcacacatcaacagcaactacaaattgtgccccagttacccccagaagctgctggttcctgtgtggatcactgacaaagagctggagaacgtggcttccttccgctcctggaagcggattcccgtggttgtgtatagacacttgcgcaatggggctgccatcgcccgctgcagccagccagagatcagctggtggggctggcgcaatgctgatgatgagtacctggtcacgtccattgctaaagcctgtgccctggacccggggacaagggccactgggggctccctcagcaccgggaataatgataccagcgaggcgtgtgatgctgactttgattcttctctgactgcgtgctctggagtggagagcacagcagctcctcaaaagctgctgatcctggatgcgcgatcctacacggcagcagtggccaaccgggccaagggtggaggctgtgaatgtgaagagtactatcccaactgtgaggtcgtgttcatgggaatggccaacatccatgccatccggaacagctttcagtacctccgggctgtgtgtagccagatgccggatcctagcaactggttgtcggcactggagagtaccaaatggctgcagcacttgtcggtgatgctaaaagcagctgtgctggtggctaatacagtagaccgggaaggccggcctgtgctggtacactgctcagatggctgggaccgcacaccgcagatcgtagccctggccaaaatattactggacccatattacaggacgttggagggcttccaagtgttagtggagtctgactggctggattttgggcacaagtttggagatcgctgtggccaccaagagaatgtggaggaccaaaacgaacaatgccctgtgttcctccagtggcttgattctgttcatcagttgcttaagcagttcccctgcctgtttgaatttaatgaagcattcctggtaaaactggtgcaacacacatactcctgcctctacggcaccttcctggccaacaacccctgtgagcgagagaagcgcaacatctacaagcggacctgctctgtgtgggcgctccttcgagctggcaataaaaactttcataacttcctctacacacccagctcagacatggtcctgcatcctgtttgtcatgtccgggccctgcacctctggacagctgtttatctgccagcatcatctccatgcacacttggggaagaaaacatggatctttacctttccccagtggcccagagccaggagttctctggccgctctctggacagattacctaaaaccagatccatggatgatcttctttctgcctgtgacacaagcagccccctgactcgtacatccagtgaccctaacctgaataaccactgtcaggaggtcagggtaggcctggagccctggcacagcaatcctgagggatcagagacaagctttgtggactctggggtaggagggcctcagcaaactgtaggagaagtgggtcttcctcctcctctgcccagcagccagaaagactacttgagcaataaacctttcaagagtcacaaaagctgttctccaagttacaaactgcttaataccgcagtgcctcgggaaatgaagagcaacacctctgatcctgagatcaaagtcctagaagagactaagggaccagctccagacccttctgcccaggatgagctgggtaggactttagatggcataggggagccacctgaacattgtcctgaaacagaagctgtcagtgcactctccaaggtcatttctaacaagtgtgatggagtttgtaattttcctgagtcttcccagaactctcctacaggtacgccccaacaggcccagccagactccatgctaggtgtgccctccaagtgtgttcttgatcacagcctcagcaccgtttgcaacccaccgagtgctgcctgccaaactcctctagacccaagcactgacttcctcaaccaagatccctcagggtctgtggcaagtatctcccaccaggaacaactgagttctgtgccggatctgacccatggggaggaagacattggtaaaagaggaaataataggaatgggcagttattggaaaatcctcgctttgggaaaatgccattggaattggtccggaagccaatttctcagagccagatcagtgagttctcttttctagggtccaactgggacagcttccaagggatggtgacttcattcccaagtggggaggccacccctcggcggctgctttcctatggctgttgtagcaagaggccaaacagtaagcagatgcgggccacagggccctgctttgggggccagtgggctcagagagaaggtgtgaagtcacctgtctgttctagtcattccaatggacattgtactggcccaggaggaaagaaccagatgtggttgtccagtcatccaaagcaagtctctagcacaaagcccgttccactgaactgcccttctccagtgcctcctctgtatttggatgatgatggactcccctttcccacggatgtgatccagcataggttacggcaaatcgaagcagggtacaaacaagaggtggagcagctacgtcgacaggtgcgtgagcttcagatgaggctggacatccgtcactgctgtgcccctccagcagagccccccatggactatgaggatgattttacatgtttgaaggagtcagatggcagtgatactgaggattttggctctgatcacagtgaagactgcctttcagaagcaagctgggaacctgttgataagaaagagactgaggtgactcgctgggttccagaccatatggcatcacactgctataactgtgactgtgaattctggttggccaaacgaagacaccattgcagaaattgtgggaatgtattttgtgctggatgctgccacctgaagctgcccattcctgatcagcaactctatgacccagttctcgtctgtaactcatgttacgaacacattcaagtctctcgtgccagggaactcatgagccaacagctgaagaaacccattgctacagcttccagttgaatgccggggag

SEQ ID NO: 23449 - DNA, 12689 bp, Homo Sapiens
aaaattccttagttgctggctttgaccttttatgttgctgagttttacacatctattttctcaactgccatatcctagggggcttggagtacccataatacagtgagcccaccttcctggtccccagacatttcagaaggtcgggaaatttttaaacccaggcagcttcctggcagtgccatttggagcatcaaagtgggccgtgggtctggatttccaggaaagcggagacctcgaggtgcaggactgtcggggcgaggtggccgaggcaggtcaaagctgaaaagtggaatcggagctgttgtattacctggggtgtctactgcagatatttcatcaaataaggatgatgaagaaaactctatgcacaatacagttgtgttgttttctagcagtgacaagttcactttgaatcaggatatgtgtgtagtttgtggcagttttggccaaggagcagaaggaagattacttgcctgttctcagtgtggtcagtgttaccatccatactgtgtcagtattaagatcactaaagtggttcttagcaaaggttggaggtgtcttgagtgcactgtgtgtgaggcctgtgggaaggcaactgacccaggaagactcctgctgtgtgatgactgtgacataagttatcacacctactgcctagaccctccattgcagacagttcccaaaggaggctggaagtgcaaatggtgtgtttggtgcagacactgtggagcaacatctgcaggtctaagatgtgaatggcagaacaattacacacagtgcgctccttgtgcaagcttatcttcctgtccagtctgctatcgaaactatagagaagaagatcttattctgcaatgtagacaatgtgatagatggatgcatgcagtttgtcagaacttaaatactgaggaagaagtggaaaatgtagcagacattggttttgattgtagcatgtgcagaccctatatgcctgcgtctaatgtgccttcctcagactgctgtgaatcttcacttgtagcacaaattgtcacaaaagtaaaagagctagacccacccaagacttatacccaggatggtgtgtgtttgactgaatcagggatgactcagttacagagcctcacagttacagttccaagaagaaaacggtcaaaaccaaaattgaaattgaagattataaatcagaatagcgtggccgtccttcagacccctccagacatccaatcagagcattcaagggatggtgaaatggatgatagtcgagaaggagaacttatggattgtgatggaaaatcagaatctagtcctgagcgggaagctgtggatgatgaaactaagggagtggaaggaacagatggtgtcaaaaagagaaaaaggaaaccatacagaccaggtattggtggatttatggtgcggcaaagaagtcgaactgggcaagggaaaaccaaaagatctgtgatcagaaaagattcctcaggctctatttccgagcagttaccttgcagagatgatggctggagtgagcagttaccagatactttagttgatgaatctgtttctgttactgaaagcactgaaaaaataaagaagagataccgaaaaaggaaaaataagcttgaagaaactttccctgcctatttacaagaagctttctttggaaaagatcttctagatacaagtagacaaagcaagataagtttagataatctgtcagaagatggagctcagcttttatataaaacaaacatgaacacaggtttcttggatccttccttagatccactacttagttcatcctcggctccaacaaaatctggaactcacggtcctgctgatgacccattagctgatatttctgaagttttaaacacagatgatgacattcttggaataatttcagatgatctagcaaaatcagttgatcattcagatattggtcctgtcactgatgatccttcctctttgcctcagccaaatgtcaatcagagttcacgaccattaagtgaagaacagctagatgggatcctcagtcctgaactagacaaaatggtcacagatggagcaattcttggaaaattatataaaattccagagcttggcggaaaagatgttgaagacttatttacagctgtacttagtcctgcgaacactcagccaactccattgccacagcctcccccaccaacacagctgttgccaatacacaatcaggatgctttttcacggatgcctctcatgaatggccttattggatccagtcctcatctcccacataattctttgccacctggaagcggactgggaactttctctgcaattgcacaatcctcttatcctgatgccagggataaaaattcagcctttaatccaatggcaagtgatcctaacaactcttggacatcatcagctcccactgtggaaggagaaaatgacacaatgtcgaatgcccagagaagcacgcttaagtgggagaaagaggaggctctgggtgaaatggcaactgttgccccagttctctacaccaatattaatttccccaacttaaaggaagaattccctgattggactactagagtgaagcaaattgccaaattgtggagaaaagcaagctcacaagaaagagcaccatatgtgcaaaaagccagagataacagagctgctttacgcattaataaagtacagatgtcaaatgattccatgaaaaggcagcaacagcaagatagcattgatcccagctctcgtattgattcggagctttttaaagatcctttaaagcaaagagaatcagaacatgaacaggaatggaaatttagacagcaaatgcgtcagaaaagtaagcagcaagctaaaattgaagccacacagaaacttgaacaggtgaaaaatgagcagcagcagcagcaacaacagcaatttggttctcagcatcttctggtgcagtctggttcagatacaccaagtagtgggatacagagtcccttgacacctcagcctggcaatggaaatatgtctcctgcacagtcattccataaagaactgtttacaaaacagccacccagtacccctacgtctacatcttcagatgatgtgtttgtaaagccacaagctccacctcctcctccagccccatcccggattcccatccaggatagtctttctcaggctcagacttctcagccaccctcaccgcaagtgttttcacctgggtcctctaactcacgaccaccatctccaatggatccatatgcaaaaatggttggtacccctcgaccacctcctgtgggccatagtttttccagaagaaattctgctgcaccagtggaaaactgtacacctttatcatcggtatctaggccccttcaaatgaatgagacaacagcaaataggccatcccctgtcagagatttatgttcttcttccacgacaaataatgacccctatgcaaaacctccagacacacctaggcctgtgatgacagatcaatttcccaaatccttgggcctatcccggtctcctgtagtttcagaacaaactgcaaaaggccctatagcagctggaaccagtgatcactttactaaaccatctcctagggcagatgtgtttcaaagacaaaggatacctgactcatatgcacgacccttgttgacacctgcacctcttgatagtggtcctggaccttttaagactccaatgcaacctcctccatcctctcaggatccttatggatcagtgtcacaggcatcaaggcgattgtctgttgacccttatgaaaggcctgctttgacaccaagacctatagataatttttctcataatcagtcaaatgatccatatagtcagcctccccttaccccacatccagcagtgaatgaatcttttgcccatccttcaagggctttttcccagcctggaaccatatcaaggccaacatctcaggacccatactcccaacccccaggaactccacgacctgttgtagattcttattcccaatcttcaggaacagctaggtccaatacagacccttactctcaacctcctggaactccccggcctactactgttgacccatatagtcagcagccccaaaccccaagaccatctacacaaactgacttgtttgttacacctgtaacaaatcagaggcattctgatccatatgctcatcctcctggaacaccaagacctggaatttctgtcccttactctcagccaccagcaacaccaaggccaaggatttcagagggttttactaggtcctcaatgacaagaccagtcctcatgccaaatcaggatcctttcctgcaagcagcacaaaaccgaggaccagctttacctggcccgttggtaaggccacctgatacatgttcccagacacctaggccccctggacctggtctttcagacacatttagccgtgtttccccatctgctgcccgtgatccctatgatcagtctccaatgactccaagatctcagtctgactcttttggaacaagtcaaactgcccatgatgttgctgatcagccaaggcctggatcagaggggagcttctgtgcatcttcaaactctccaatgcactcccaaggccagcagttctctggtgtctcccaacttcctggacctgtgccaacttcaggagtaactgatacacagaatactgtaaatatggcccaagcagatacagagaaattgagacagcggcagaagttacgtgaaatcattctccagcagcaacagcagaagaagattgcaggtcgacaggagaaggggtcacaggactcacccgcagtgcctcatccagggcctcttcaacactggcaaccagagaatgttaaccaggctttcaccagacccccacctccctatcctgggaacattaggtctcctgttgcccctcctttaggacctagatatgctgttttcccaaaagatcagcgtggaccctatcctcctgatgttgctagtatggggatgagacctcatggatttagatttggatttccaggaggtagtcatggtaccatgccgagtcaagagcgcttccttgtgcctcctcagcaaatacagggatctggagtttctccacagctaagaagatcagtatctgtagatatgcctaggcctttaaataactcacaaatgaataatccagttggacttcctcagcatttttcaccacagagcttgccagttcagcagcacaacatactgggccaagcatatattgaactgagacatagggctcctgacggaaggcaacggctgcctttcagtgctccacctggcagcgttgtagaggcatcttctaatctgagacatggaaacttcattccccggccagactttccgggccctagacacacagaccccatgcgacgacctccccagggtctacctaatcagctacctgtgcacccagatttggaacaagtgccaccatctcaacaagagcaaggtcattctgtccattcatcttctatggtcatgaggactctgaaccatccactaggtggtgaattttcagaagctcctttgtcaacatctgtaccgtctgaaacaacgtctgataatttacagataaccacccagccttctgatggtctagaggaaaaacttgattctgatgacccttctgtgaaggaactggatgttaaagaccttgagggggttgaagtcaaagacttagatgatgaagatcttgaaaacttaaatttagatacagaggatggcaaggtagttgaattggatactttagataatttggaaactaatgatcccaacctggatgacctcttaaggtcaggagagtttgatatcattgcatatacagatccagaacttgacatgggagataagaaaagcatgtttaatgaggaactagaccttccaattgatgataagttagataatcagtgtgtatctgttgaaccaaaaaaaaaggaacaagaaaacaaaactctggttctctctgataaacattcaccacagaaaaaatccactgttaccaatgaggtaaaaacggaagtactgtctccaaattctaaggtggaatccaaatgtgaaactgaaaaaaatgatgagaataaagataatgttgacactccttgctcacaggcttctgctcactcagacctaaatgatggagaaaagacttctttgcatccttgtgatccagatctatttgagaaaagaaccaatcgagaaactgctggccccagtgcaaatgtcattcaggcatccactcaactacctgctcaagatgtaataaactcttgtggcataactggatcaactccagttctctcaagtttacttgctaatgagaaatctgataattcagacattaggccatcggggtctccaccaccaccaactctgccggcctccccatccaatcatgtgtcaagtttgcctcctttcatagcaccgcctggccgtgttttggataatgccatgaattctaatgtgacagtagtctctagggtaaaccatgttttttctcagggtgtgcaggtaaacccagggctcattccaggtcaatcaacagttaaccacagtctggggacaggaaaacctgcaactcaaactgggcctcaaacaagtcagtctggtaccagtagcatgtctggaccccaacagctaatgattcctcaaacattagcacagcagaatagagagaggccccttcttctagaagaacagcctctacttctacaggatcttttggatcaagaaaggcaagaacagcagcagcaaagacagatgcaagccatgattcgtcagcgatcagaaccgttcttccctaatattgattttgatgcaattacagatcctataatgaaagccaaaatggtggcccttaaaggtataaataaagtgatggcacaaaacaatctgggcatgccaccaatggtgatgagcaggttcccttttatgggccaggtggtaactggaacacagaacagtgaaggacagaaccttggaccacaggccattcctcaggatggcagtataacacatcagatttctaggcctaatcctccaaattttggtccaggctttgtcaatgattcacagcgtaagcagtatgaagagtggctccaggagacccaacagctgcttcaaatgcagcagaagtatcttgaagaacaaattggtgctcacagaaaatctaagaaggccctttcagctaaacaacgtactgccaagaaagctgggcgtgaatttccagaggaagatgcagaacaactcaagcatgttactgaacagcaaagcatggttcagaaacagctagaacagattcgtaaacaacagaaagaacatgctgaattgattgaagattatcggatcaaacagcagcagcaatgtgcaatggccccacctaccatgatgcccagtgtccagccccagccacccctaattccaggtgccactccacccaccatgagccaacccacctttcccatggtgccacagcagcttcagcaccagcagcacacaacagttatttctggccatactagccctgttagaatgcccagtttacctggatggcaacccaacagtgctcctgcccacctgcccctcaatcctcctagaattcagcccccaattgcccagttaccaataaaaacttgtacaccagccccagggacagtctcaaatgcaaatccacagagtggaccaccacctcgggtagaatttgatgacaacaatccctttagtgaaagttttcaagaacgggaacgtaaggaacgtttacgagaacagcaagagagacaacggatccaactcatgcaggaggtagatagacaaagagctttgcagcagaggatggaaatggagcagcatggtatggtgggctctgagataagtagtagtaggacatctgtgtcccagattcccttctacagttccgacttaccttgtgattttatgcaacctctaggaccccttcagcagtctccacaacaccaacagcaaatggggcaggttttacagcagcagaatatacaacaaggatcaattaattcaccctccacccaaactttcatgcagactaatgagcgaaggcaggtaggccctccttcatttgttcctgattcaccatcaatccctgttggaagcccaaatttttcttctgtgaagcagggacatggaaatctttctgggaccagcttccagcagtccccagtgaggccttcttttacacctgctttaccagcagcacctccagtagctaatagcagtctcccatgtggccaagattctactataacccatggacacagttatccgggatcaacccaatcgctcattcagttgtattctgatataatcccagaggaaaaagggaaaaagaaaagaacaagaaagaagaaaagagatgatgatgcagaatccaccaaggctccatcaactccccattcagatataactgccccaccgactccaggcatctcagaaactacctctactcctgcagtgagcacacccagtgagcttcctcaacaagccgaccaagagtcggtggaaccagtcggcccatccactcccaatatggcagcaggccagctatgtacagaattagagaacaaactgcccaatagtgatttctcacaagcaactccaaatcaacagacgtatgcaaattcagaagtagacaagctctccatggaaacccctgccaaaacagaagagataaaactggaaaaggctgagacagagtcctgcccaggccaagaggagcctaaattggaggaacagaatggtagtaaggtagaaggaaacgctgtagcctgtcctgtctcctcagcacagagtcctccccattctgctggggcccctgctgccaaaggagactcagggaatgaacttctgaaacacttgttgaaaaataaaaagtcatcttctcttttgaatcaaaaacctgagggcagtatttgttcagaagatgactgtacaaaggataataaactagttgagaagcagaacccagctgaaggactgcaaactttgggggctcaaatgcaaggtggttttggatgtggcaaccagttgccaaaaacagatggaggaagtgaaaccaagaaacagcgaagcaaacggactcagaggacgggtgagaaagcagcacctcgctcaaagaaaaggaaaaaggacgaagaggagaaacaagctatgtactctagcactgacacgtttacccacttgaaacaggtgaggcagctctctctgctccctctaatggaaccaatcattggagtgaactttgcgcactttcttccttatggcagtggccaatttaatagtgggaatcgacttctaggaacttttggcagtgctaccctggaaggggtttcggactactattctcagttgatctacaagcagaataatttaagtaatcctccaacaccccctgcctctcttcctcctacaccacctcctatggcttgtcagaagatggccaatggttttgcaacaactgaagaacttgctggaaaagccggagtgttagtgagccatgaagttaccaaaactctaggacctaaaccatttcagctgcccttcagaccccaggacgacttgttggcccgagctcttgctcagggccccaagacagttgatgtgccagcctccctcccaacaccacctcataacaatcaggaagaattaaggatacaggatcactgtggtgatcgagatactcctgacagttttgttccctcatcctctcctgagagtgtggttggggtagaagtgagcaggtatccagatctgtcattggtcaaggaggagcctccagaaccggtgccgtcccccatcattccaattcttcctagcactgctgggaaaagttcagaatcaagaaggaatgacatcaaaactgagccaggcactttatattttgcgtcaccttttggtccttccccaaatggtcccagatcaggtcttatatctgtagcaattactctgcatcctacagctgctgagaacattagcagtgttgtggctgcattttccgaccttcttcacgtccgaatccctaacagctatgaggttagcagtgctccagatgtcccatccatgggtttggtcagtagccacagaatcaacccgggtttggagtatcgacagcatttacttctccgtgggcctccgccaggatctgcaaaccctcccagattagtgagctcttaccggctgaagcagcctaatgtaccatttcctccaacaagcaatggtctttctggatataaggattctagtcatggtattgcagaaagcgcagcactcagaccacagtggtgttgtcattgtaaagtggttattcttggaagtggtgtgcggaaatctttcaaagatctgacccttttgaacaaggattcccgagaaagcaccaagagggtagagaaggacattgtcttctgtagtaataactgctttattctttattcatcaactgcacaagcgaaaaactcagaaaacaaggaatccattccttcattgccacaatcacctatgagagaaacgccttccaaagcatttcatcagtacagcaacaacatctccactttggatgtgcactgtctcccccagctcccagagaaagcttctccccctgcctcaccacccatcgccttccctcctgcttttgaagcagcccaagtcgaggccaagccagatgagctgaaggtgacagtcaagctgaagcctcggctaagagctgtccatggtgggtttgaagattgcaggccgctcaataaaaaatggagaggaatgaaatggaagaagtggagcattcatattgtaatccctaaggggacatttaaaccaccttgtgaggatgaaatagatgaatttctaaagaaattgggcacttcccttaaacctgatcctgtgcccaaagactatcggaaatgttgcttttgtcatgaagaaggtgatggattgacagatggaccagcaaggctactcaaccttgacttggatctgtgggtccacttgaactgcgctctgtggtccacggaggtctatgagactcaggctggtgccttaataaatgtggagctagctctgaggagaggcctacaaatgaaatgtgtcttctgtcacaagacgggtgccactagtggatgccacagatttcgatgcaccaacatttatcacttcacttgcgccattaaagcacaatgcatgttttttaaggacaaaactatgctttgccccatgcacaaaccaaagggaattcatgagcaagaattaagttactttgcagtcttcaggagggtctatgttcagcgtgatgaggtgcgacagattgctagcatcgtgcaacgaggagaacgggaccatacctttcgcgtgggtagcctcatcttccacacaattggtcagctgcttccacagcagatgcaagcattccattctcctaaagcactcttccctgtgggctatgaagccagccggctgtactggagcactcgctatgccaataggcgctgccgctacctgtgctccattgaggagaaggatgggcgcccagtgtttgtcatcaggattgtggaacaaggccatgaagacctggttctaagtgacatctcacctaaaggtgtctgggataagattttggagcctgtggcatgtgtgagaaaaaagtctgaaatgctccagcttttcccagcgtatttaaaaggagaggatctgtttggcctgaccgtctctgcagtggcacgcatagcggaatcacttcctggggttgaggcatgtgaaaattataccttccgatacggccgaaatcctctcatggaacttcctcttgccgttaaccccacaggttgtgcccgttctgaacctaaaatgagtgcccatgtcaagaggcctcacaccttaaacagcaccagcacctcaaagtcatttcagagcacagtcactggagaactgaacgcaccttatagtaaacagtttgttcactccaagtcatcgcagtaccggaagatgaaaactgaatggaaatccaatgtgtatctggcacggtctcggattcaggggctgggcctgtatgctgctcgagacattgagaaacacaccatggtcattgagtacatcgggactatcattcgaaacgaagtagccaacaggaaagagaagctttatgagtctcagaaccgtggtgtgtacatgttccgcatggataacgaccatgtgattgacgcgacgctcacaggagggcccgcaaggtatatcaaccattcgtgtgcacctaattgtgtggctgaagtggtgacttttgagagaggacacaaaattatcatcagctccagtcggagaatccagaaaggagaagagctctgctatgactataagtttgactttgaagatgaccagcacaagattccgtgtcactgtggagctgtgaactgccggaagtggatgaactgaaatgcattccttgctagctcagcgggcggcttgtccctaggaagaggcgattcaacacaccattggaattttgcagacagaaagagatttttgttttctgttttatgactttttgaaaaagcttctgggagttctgatttcctcagtcctttaggttaaagcagcgccaggaggaagctgacagaagcagcgttcctgaagtggccgaggttaaacggaatcacagaatggtccagcacttttgcttt

SEQ ID NO: 23450 - DNA, 6251 bp, Homo Sapiens
caccacgcgcccatgagccccgggagcagcggcggcggggggcagccgtcgcccggacccctcagccatccagtccaatggatcagatgggcaagatgagacctcagccatatggcgggactaacccatactcgcagcaacagggacctccgtcaggaccgcagcaaggacatgggtacccagggcagccatacgggtcccagaccccgcagcggtacccgatgaccatgcagggccgggcgcagagtgccatgggcggcctctcttatacacagcagattcctccttatggacaacaaggccccagcgggtatggtcaacagggccagactccatattacaaccagcaaagtcctcaccctcagcagcagcagccaccctactcccagcaaccaccgtcccagacccctcatgcccaaccttcgtatcagcagcagccacagtctcaaccaccacagctccagtcctctcagcctccatactcccagcagccatcccagcctccacatcagcagtccccggctccatacccctcccagcagtcgacgacacagcagcacccccagagccagcccccctactcacagccacaggctcagtctccttaccagcagcagcaacctcagcagccagcaccctcgacgctctcccagcaggctgcgtatcctcagccccagtctcagcagtcccagcaaactgcctattcccagcagcgcttccctccaccgcaggagctatctcaagattcatttgggtctcaggcatcctcagccccctcaatgacctccagtaagggagggcaagaagatatgaacctgagccttcagtcaagaccctccagcttgcctgatctatctggttcaatagatgacctccccatggggacagaaggagctctgagtcctggagtgagcacatcagggatttccagcagccaaggagagcagagtaatccagctcagtctcctttctctcctcatacctcccctcacctgcctggcatccgaggcccttccccgtcccctgttggctctcccgccagtgttgctcagtctcgctcaggaccactctcgcctgctgcagtgccaggcaaccagatgccacctcggccacccagtggccagtcggacagcatcatgcatccttccatgaaccaatcaagcattgcccaagatcgaggttatatgcagaggaacccccagatgccccagtacagttccccccagcccggctcagccttatctccgcgtcagccttccggaggacagatacacacaggcatgggctcctaccagcagaactccatggggagctatggtccccaggggggtcagtatggcccacaaggtggctaccccaggcagccaaactataatgccttgcccaatgccaactaccccagtgcaggcatggctggaggcataaaccccatgggtgccggaggtcaaatgcatggacagcctggcatcccaccttatggcacactccctccagggaggatgagtcacgcctccatgggcaaccggccttatggccctaacatggccaatatgccacctcaggttgggtcagggatgtgtcccccaccagggggcatgaaccggaaaacccaagaaactgctgtcgccatgcatgttgctgccaactctatccaaaacaggccgccaggctaccccaatatgaatcaagggggcatgatgggaactggacctccttatggacaagggattaatagtatggctggcatgatcaaccctcagggacccccatattccatgggtggaaccatggccaacaattctgcagggatggcagccagcccagagatgatgggccttggggatgtaaagttaactccagccaccaagatgaacaacaaggcagatgggacacccaagacagaatccaaatccaagaaatccagttcttctactacaaccaatgagaagatcaccaagttgtatgagctgggtggtgagcctgagaggaagatgtgggtggaccgttatctggccttcactgaggagaaggccatgggcatgacaaatctgcctgctgtgggtaggaaacctctggacctctatcgcctctatgtgtctgtgaaggagattggtggattgactcaggtcaacaagaacaaaaaatggcgggaacttgcaaccaacctcaatgtgggcacatcaagcagtgctgccagctccttgaaaaagcagtatatccagtgtctctatgcctttgaatgcaagattgaacggggagaagaccctcccccagacatctttgcagctgctgattccaagaagtcccagcccaagatccagcctccctctcctgcgggatcaggatctatgcaggggccccagactccccagtcaaccagcagttccatggcagaaggaggagacttaaagccaccaactccagcatccacaccacacagtcagatccccccattgccaggcatgagcaggagcaattcagttgggatccaggatgcctttaatgatggaagtgactccacattccagaagcggaattccatgactccaaaccctgggtatcagcccagtatgaatacctctgacatgatggggcgcatgtcctatgagccaaataaggatccttatggcagcatgaggaaagctccagggagtgatcccttcatgtcctcagggcagggccccaacggcgggatgggtgacccctacagtcgtgctgccggccctgggctaggaaatgtggcgatgggaccacgacagcactatccctatggaggtccttatgacagagtgaggacggagcctggaatagggcctgagggaaacatgagcactggggccccacagccgaatctcatgccttccaacccagactcggggatgtattctcctagccgctaccccccgcagcagcagcagcagcagcagcaacgacatgattcctatggcaatcagttctccacccaaggcaccccttctggcagccccttccccagccagcagactacaatgtatcaacagcaacagcagaattacaagcggccaatggatggcacatatggccctcctgccaagcggcacgaaggggagatgtacagcgtgccatacagcactgggcaggggcagcctcagcagcagcagttgcccccagcccagccccagcctgccagccagcaacaagctgcccagccttcccctcagcaagatgtatacaaccagtatggcaatgcctatcctgccactgccacagctgctactgagcgccgaccagcaggcggcccccagaaccaatttccattccagtttggccgagaccgtgtctctgcaccccctggcaccaatgcccagcaaaacatgccaccacaaatgatgggcggccccatacaggcatcagctgaggttgctcagcaaggcaccatgtggcaggggcgtaatgacatgacctataattatgccaacaggcagagcacgggctctgccccccagggccccgcctatcatggcgtgaaccgaacagatgaaatgctgcacacagatcagagggccaaccacgaaggctcgtggccttcccatggcacacgccagcccccatatggtccctctgcccctgtgccccccatgacaaggccccctccatctaactaccagcccccaccaagcatgcagaatcacattcctcaggtatccagccctgctcccctgccccggccaatggagaaccgcacctctcctagcaagtctccattcctgcactctgggatgaaaatgcagaaggcaggtcccccagtacctgcctcgcacatagcacctgcccctgtgcagccccccatgattcggcgggatatcaccttcccacctggctctgttgaagccacacagcctgtgttgaagcagaggaggcggctcacaatgaaagacattggaaccccggaggcatggcgggtaatgatgtccctcaagtctggtctcctggcagagagcacatgggcattagataccatcaacatcctgctgtatgatgacaacagcatcatgaccttcaacctcagtcagctcccagggttgctagagctccttgtagaatatttccgacgatgcctgattgagatctttggcattttaaaggagtatgaggtgggtgacccaggacagagaacgctactggatcctgggaggttcagcaaggtgtctagtccagctcccatggagggtggggaagaagaagaagaacttctaggtcctaaactagaagaggaagaagaagaggaagtagttgaaaatgatgaggagatagccttttcaggcaaggacaagccagcttcagagaatagtgaggagaagctgatcagtaagtttgacaagcttccagtaaagatcgtacagaagaatgatccatttgtggtggactgctcagataagcttgggcgtgtgcaggagtttgacagtggcctgctgcactggcggattggtgggggggacaccactgagcatatccagacccacttcgagagcaagacagagctgctgccttcccggcctcacgcaccctgcccaccagcccctcggaagcatgtgacaacagcagagggtacaccagggacaacagaccaggaggggcccccacctgatggacctccagaaaaacggatcacagccactatggatgacatgttgtctactcggtctagcaccttgaccgaggatggagctaagagttcagaggccatcaaggagagcagcaagtttccatttggcattagcccagcacagagccaccggaacatcaagatcctagaggacgaaccccacagtaaggatgagaccccactgtgtacccttctggactggcaggattctcttgccaagcgctgcgtctgtgtgtccaataccattcgaagcctgtcatttgtgccaggcaatgactttgagatgtccaaacacccagggctgctgctcatcctgggcaagctgatcctgctgcaccacaagcacccagaacggaagcaggcaccactaacttatgaaaaggaggaggaacaggaccaaggggtgagctgcaacaaagtggagtggtggtgggactgcttggagatgctccgggaaaacaccttggttacactcgccaacatctcggggcagttggacctatctccataccccgagagcatttgcctgcctgtcctggacggactcctacactgggcagtttgcccttcagctgaagcccaggaccccttttccaccctgggccccaatgccgtcctttccccgcagagactggtcttggaaaccctcagcaaactcagcatccaggacaacaatgtggacctgattctggccacaccccccttcagccgcctggagaagttgtatagcactatggtgcgcttcctcagtgaccgaaagaacccggtgtgccgggagatggctgtggtactgctggccaacctggctcagggggacagcctggcagctcgtgccattgcagtgcagaagggcagtatcggcaacctcctgggcttcctagaggacagccttgccgccacacagttccagcagagccaggccagcctcctccacatgcagaacccaccctttgagccaactagtgtggacatgatgcggcgggctgcccgcgcgctgcttgccttggccaaggtggacgagaaccactcagagtttactctgtacgaatcacggctgttggacatctcggtatcaccgttgatgaactcattggtttcacaagtcatttgtgatgtactgtttttgattggccagtcatgacagccgtgggacacctcccccccccgtgtgtgtgtgcgtgtgtggagaacttagaaactgactgttgccctttatttatgcaaaaccacctcagaatccagtttaccctgtgctgtccagcttctcccttgggaaaaagtctctcctgtttctctctcctccttccacctcccctccctccatcacctcacgcctttctgttccttgtcctcaccttactcccctcaggaccctaccccaccctctttgaaaagacaaagctctgcctacatagaagactttttttattttaaccaaagttactgttgtttacagtgagtttggggaaaaaaaataaaataaaaatggctttcccagtccaagcatcaacgggatgccacatttcataactgtttttaatggtaaaaaaaaaaaaaacgggatgccacatttcataactgtttttaatggtaaaaaaaaaaaaaa

SEQ ID NO: 23451 - DNA, 1724 bp, Homo Sapiens
gaattcccgttgctgtcgcccaacgaggctccctggagccgacgcagagcagcgccctggccgggccaagcaggagccggcatcatggattccttcaaagtagtgctggaggggccagcaccttggggcttccggctgcaagggggcaaggacttcaatgtgcccctctccatttcccggctcactcctgggggcaaagcggcgcaggccggagtggccgtgggtgactgggtgctgagcatcgatggcgagaatgcgggtagcctcacacacatcgaagctcagaacaagatccgggcctgcggggagcgcctcagcctgggcctcagcagggcccagccggttcagagcaaaccgcagaaggcctccgcccccgccgcggaccctccgcggtacacctttgcacccagcgtctccctcaacaagacggcccggccctttggggcgcccccgcccgctgacagcgccccgcagcagaatggacagccgctccgaccgctggtcccagatgccagcaagcagcggctgatggagaacacagaggactggcggccgcggccggggacaggccagtcgcgttccttccgcatccttgcccacctcacaggcaccgagttcatgcaagacccggatgaggagcacctgaagaaatcaagccaggtgcccaggacagaagccccagccccagcctcatctacaccccaggagccctggcctggccctaccgcccccagccctaccagccgcccgccctgggctgtggaccctgcgtttgccgagcgctatgccccggacaaaacgagcacagtgctgacccggcacagccagccagccacgcccacgccgctgcagagccgcacctccattgtgcaggcagctgccggaggggtgccaggagggggcagcaacaacggcaagactcccgtgtgtcaccagtgccacaaggtcatccggggccgctacctggtggcgctgggccacgcgtaccacccggaggagtttgtgtgtagccagtgtgggaaggtcctggaagagggtggcttctttgaggagaagggcgccatcttctgcccaccatgctatgacgtgcgctatgcacccagctgtgccaagtgcaagaagaagattacaggcgagatcatgcacgccctgaagatgacctggcacgtgcactgctttacctgtgctgcctgcaagacgcccatccggaacagggccttctacatggaggagggcgtgccctattgcgagcgagactatgagaagatgtttggcacgaaatgccatggctgtgacttcaagatcgacgctggggaccgcttcctggaggccctgggcttcagctggcatgacacctgcttcgtctgtgcgatatgtcagatcaacctggaaggaaagaccttctactccaagaaggacaggcctctctgcaagagccatgccttctctcatgtgtgagccccttctgcccacagctgccgcggtggcccctagcctgaggggcctggagtcgtggccctgcatttctgggtagggctggcaatggttgccttaaccctggctcctggcccgagcctgggctccctggccctgccccacccacctttcctcccaccccactccctccaccaccacagcacaccggtgctggccacaccagccccctttcacctccagtgccacaataaacctgtacccagctgaaaaaaaaaaaaaaaaaaaaa

SEQ ID NO: 23452 - DNA, 2565 bp, Homo Sapiens
aacggctgcggcttcgggcggccgggtttctccggtctcccaacgccgaggagagcttgtaacaggcgctggagctggcccgccaccgccgcgtcagggacggcgctggagtcctccgttcccctcagcctctgagctgaggccccacaccagagtagggggcggcgcggcacccgtgccccggcatggcgacaccggacgcggggctccctggggctgagggcgtggagccggcgccctgggcgcagctggaggcccccgcccgcctcctgctgcaggcgctgcaggcggggcctgagggggcgcggcgcggcctgggggtgctccgggcgctgggcagccgcggctgggagcccttcgactggggtcgcttgctcgaggccctgtgccgggaggagccggtcgtgcaggggcctgacggccgtctggagctgaaaccactgttgctgcgattgccccggatatgccagaggaacctgatgtccctgctgatggccgttcggccatcgctgccggaaagtgggctcctctctgtgctgcagattgcccagcaggacctagcccctgaccccgatgcctggctccgtgccctgggggaattgctgcgaagggatttgggggtggggacctccatggagggagcttctccactgtctgaaagatgccagagacagctccaaagtctatgtagggggctgggcctggggggcaggaggttgaaatccccccaggctccagaccctgaagaagaggagaacagggactcccagcagcctgggaaacgcagaaaggactcagaggaagaggctgccagtcctgaggggaagagggtccccaaaagattacggtgttgggaagaggaagaagatcatgagaaggagagacccgaacataagtcactggaatccctggcagatggaggaagtgcatctcctattaaggaccagcctgtcatggcagttaagactggcgaggacggttcgaatctggatgatgctaaaggtctggctgagagtttggagttgcccaaagctatccaggaccagcttcccaggctgcagcagctgctgaagaccttggaggaggggttagagggattggaggatgcccccccagttgagctacagcttcttcacgaatgtagtcccagccagatggacttgctgtgtgcccagctgcagctccctcagctctcagacctcggtctcctgcggctctgcacctggctgctggccctttcacctgatctcagcctcagcaatgctactgtgctgaccagaagcctctttcttggacggatcctctccttgacttcctcagcctcccgcctgcttacaactgccctgacctccttctgtgccaaatatacataccctgtctgcagcgccctccttgaccctgtgctccaggccccaggcacaggtcctgctcaaacagagttactgtgttgccttgtgaagatggagtccctggagccagatgcacaggttctaatgctgggacagatcttggagctgccctggaaggaggaaactttcttggtgttgcagtcactcctagagcggcaggtggagatgacccctgagaagttcagtgtcttaatggagaagctctgtaaaaaggggctggcagccaccacctccatggcctatgccaagctcatgctgacagtgatgaccaagtatcaggctaacatcactgagacccagaggctgggcctggctatggccctagaacctaacaccaccttcctgaggaagtccctgaaggccgccttgaaacatttgggcccctgaccatccaccaagggaccaccctcttggtgctccatcaccagcttcctgaagggcatttctttcttcaccaccttgtcttgagccctagcctgaggataaaggctgagcctggccatcccagattgcaactgcctccctgttacaggctgcatagggaatattggcttcccagccagcagggaggctcctgggctaagggagctcagctatattttctttttcatttcttttgtttttgagagaaggtattgctctgtcatccaggctggagtgcagtgatgcgattgatcatggctcactgtaacctctgcctcccaggctcgatcctcccatgtcagcctcccaagtagctgggactacatgcacatgacactatgcccagctaattttttattttgtagataatatgctggtcagggctggtcttgaactcctgagctcaagtgatcttcctgccttggcacccaaagtgttgagatttacaggtgtgagccaccacaccaggccagagctatatttccaaaggctgctggccccaggcacactcctcatcaattctcaggctgcagggacaaactttccgatagggctcagtaggatcaagccgacccagagtgggcatgggatgctccaggaggtctggggtaccagtgggctcagatgaagctcttgtgctcatgtatattatgaccttctgtgtttttgtttctgacttgaataatttatcaatggtgttgaataaaagcaagttcaataatgaaaaaaaaaa

SEQ ID NO: 23453 - DNA, 3936 bp, Homo Sapiens
ggaagttctgccttgtctccgccgcgggtcaggggtgagagctggaatctctgcacgggccttggaaaacgactgtcttcttctgccaaaatgtcaggaattggaaataaaagagcagctggagaacctggcacctccatgcctcctgagaagaaggcagctgttgaagattcagggaccacagtggaaacaattaagctaggaggtgtctcttcaacggaggaactagacattagaacactgcaaaccaaaaatcgcaagctggcagaaatgttggatcagcggcaggccattgaagatgaacttcgtgagcacattgaaaaactggaacgacgacaggccactgatgatgcctcactattgattgtcaaccgatactggagtcagtttgatgaaaacatccgtatcatccttaaacgttatgatctggagcagggcttgggagacctactcacagaacgaaaagcccttgttgtgcctgaaccagaaccagactctgatagcaatcaggagcgtaaagatgaccgagagagaggggaagggcaagagccagctttctctttccttgctactttggccagcagttccagtgaagagatggagtctcagctgcaggaacgtgtggagtcttcccgccgagccgtgtcccagattgtgactgtttatgataaattgcaagaaaaagtggagctcttatcccggaagctaaacagtggagataatctgatagtggaggaagcagtgcaggagctgaactctttcctcgcacaggagaatatgaggctacaggaattgacagatcttcttcaggaaaagcatcgcaccatgtctcaggagttctccaagttgcagagtaaagtggagacagccgaatcacgagtgtctgtcctggagtccatgattgatgacctgcagtgggatattgacaaaattcgaaagagggaacagcgactcgaccgacacttagcagaagtcctagaacgggtgaattccaaaggttataaggtgtatggagcggggagcagtctgtatggcggcacaatcactatcaatgctcggaagtttgaggaaatgaatgcagagcttgaggagaacaaagagttggctcagaaccgtctctgtgagctggagaaacttcggcaagactttgaggaggtcactacacaaaatgaaaagctgaaggtggaattgcggagtgcagtggagcaagtcgttaaggaaactccagaatatcgctgcatgcagtcacagttctccgtcttgtataatgagagcctacagttgaaagcacacttggatgaggctcggaccctgcttcatggcaccagaggaacccaccagcaccaggttgagcttattgagcgagatgaggttagtcttcataagaagctgaggactgaagtaattcagctagaagatacattggcccaggtccgcaaggagtatgaaatgctgaggatagaatttgagcagacccttgctgccaatgaacaagcaggccctataaacagggagatgcgccacctcatcagtagcctccagaatcacaatcaccagctgaaaggggaggtcctgagatataagcggaaattgagagaagcccagtctgacctgaacaagacacgcctgcgtagtggtagtgccctcctgcagtcccagtctagtactgaggacccgaaggatgagcctgcggagctaaaaccagattctgaggacttatcctcccagtcctcagcttcaaaggcatctcaggaggatgccaatgaaatcaagtctaaacgggatgaagaagaacgagaacgagaaaggagggagaaggagagggaacgagaaagagaacgggagaaggagaaggagagagaacgagagaagcagaagctaaaagagtcagaaaaagagagagattctgctaaggataaagagaaaggcaaacatgatgatggacggaaaaaggaagcagaaattatcaaacaattgaagattgaactcaagaaggcacaggagagccaaaaggagatgaaactattgctggatatgtaccgttctgccccaaaggaacagagagacaaagttcagctgatggcagctgagaagaagtctaaggcagagttggaagatctaaggcaaagactcaaggatctggaagataaagagaagaaagagaacacgaaaatggctgatgaggatgccttgaggaagatccgggcagtggaggagcagatagaatacctacagaagaagctagccatggccaagcaggaagaagaagcactcctctctgaaatggatgtcacaggccaggcctttgaagacatgcaggagcaaaatatccgtttgatgcagcaattgcgggagaaggatgatgcaaatttcaagctcatgtcagagcgtatcaagtccaatcagatccataagttgcttaaagaagagaaggaggagctggcagaccaggtgttgactctgaagactcaggttgatgcccagctacaggtagtaaggaaactggaagagaaggagcatctgttacagagcaacattggcacaggggagaaggagctgggtcttaggacccaagccttagagatgaataaacgcaaggcaatggaggcagcccagcttgcagatgacctcaaagcacaactggagttggctcagaagaagctacatgattttcaggatgagatcgtggagaacagtgttaccaaagaaaaggacatgttcaatttcaaacgagcccaggaggacatctctagacttcgcaggaagctggagaccacaaagaaaccagacaatgtacccaagtgtgatgagattctgatggaagagattaaggattacaaggcacgcttgacctgtccatgctgtaacatgcgtaaaaaggatgctgttcttactaagtgttttcatgtcttctgctttgagtgtgtgaagacacgctatgacacccgccagcgcaaatgtcccaagtgtaatgctgcttttggtgccaatgattttcatcgcatctacattggttgatctaagtcaagagaagaagaggagctggctagtcaggaacttattcattaaccaccaaacctctacctcttctctccttgactgtcacctgtaggacagtttatcagtcaactacctttcctccagactttacttccaggctctcctcttcagtagctggatgactttagcagaaaggactggtaaatacaagccttgggtttcagaatgaattagaaacaaataactcttactgtcttccctcccagctttgtttattttgtgcttttagacttttcagtgttttctttttccagcccactgtataaacttggattgtccattcctcctgaagaaatcaagttggtatttttgatgtggaaaagggaacaaaagtggaaacatggctacttttggggagtgatattttaaaaaataagttgtctatgggcacaaagttttcttcatttgtgtagcaaacttcttgtgaatgtggattacaaaatggtataattgtgctactctcccctgggtggtttgcagccctaatgaaattatgtctaggatgattcagtctatttcccatttactagcagagtaacttgttaagatcagctggctttcttgttaaagttatttaagttttgaatgctctactacttcaagtctttaaatttcttgagactagaataattttaaataatatgaccctttgtcttctaatgaaataaagattgaagaggttgagtcaggactgagctggtgaagaaatcttgtgggtattctggaaatttgatacggagagaacttggtgagctatgaattactctcagtctcctttttacagggttgttgtgatccctcttttccagaaaattctgtggaatgtttctgtaggactttgttctccacaagcttgaattaaagcaggattcagtt

SEQ ID NO: 23454 - DNA, 3624 bp, Homo Sapiens
tcggccatgactgcggagctgcagcaggacgacgcggccggcgcggcagacggccacggctcgagctgccaaatgctgttaaatcaactgagagaaatcacaggcattcaggacccttcctttctccatgaagctctgaaggccagtaatggtgacattactcaggcagtcagccttctcactgatgagagagttaaggagcccagtcaagacactgttgctacagaaccatctgaagtagaggggagtgctgccaacaaggaagtattagcaaaagttatagaccttactcatgataacaaagatgatcttcaggctgccattgctttgagtctactggagtctcccaaaattcaagctgatggaagagatcttaacaggatgcatgaagcaacctctgcagaaactaaacgctcaaagagaaaacgctgtgaagtctggggagaaaaccccaatcccaatgactggaggagagttgatggttggccagttgggctgaaaaatgttggcaatacatgttggtttagtgctgttattcagtctctctttcaattgcctgaatttcgaagacttgttctcagttatagtctgccacaaaatgtacttgaaaattgtcgaagtcatacagaaaagagaaatatcatgtttatgcaagagcttcagtatttgtttgctctaatgatgggatcaaatagaaaatttgtagacccgtctgcagccctggatctattaaagggagcattccgatcatctgaggaacagcagcaagatgtgagtgaattcacacacaagctcctggattggctagaggacgcattccagctagctgttaatgttaacagtcccaggaacaaatctgaaaatccaatggtgcagctgttctatggtactttcctgactgaaggggttcgtgaaggaaaacccttttgtaacaatgagaccttcggccagtatcctcttcaggtaaacggttatcgcaacttagacgagtgtttggaaggggccatggtggagggtgatgttgagcttcttccctccgatcactcggtgaagtatggacaagagcgttggtttacaaagctacctccagtgttgacctttgaactctcaagatttgagtttaatcagtcccttgggcagccagagaaaattcacaataagctggaatttcctcagattatttatatggacaggtacatgtacaggagcaaggagcttattcgaaataagagagagtgtattcgaaagttgaaggaggaaataaaaattctgcagcaaaaattggaaaggtatgtgaaatatggctcaggcccagctcggttcccgctcccggacatgctgaaatatgttattgaatttgctagtacaaaacctgcctcagaaagctgtccacctgaaagtgacacacatatgacattaccactttcttcagtgcactgctcggtttctgaccagacatccaaggaaagtacaagtacagaaagctcttctcaggatgttgaaagtaccttttcttctcctgaagattctttacccaagtctaaaccactgacatcttctcggtcttccatggaaatgccttcacagccagctccacgaacagtcacagatgaggagataaattttgttaagacctgtcttcagagatggaggagtgagattgaacaagatatacaagatttaaagacttgtattgcaagtactactcagactattgaacagatgtactgcgatcctctccttcgtcaggtgccttatcgcttgcatgcagttcttgttcatgaaggacaagcaaatgctggacactattgggcctatatctataatcaaccccgacagagctggctcaagtacaatgacatctctgttactgaatcttcctgggaagaagttgaaagagattcctatggaggcctgagaaatgttagtgcttactgtctgatgtacattaatgacaaactaccctacttcaatgcagaggcagccccaactgaatcagatcaaatgtcagaagtggaagccctatctgtggaactcaagcattacattcaggaggataactggcggtttgagcaggaagtagaggagtgggaagaagagcagtcttgcaaaatccctcaaatggagtcctccaccaactcctcatcacaggactactctacatcacaagagccttcagtagcctcttctcatggggttcgctgcttgtcatctgagcatgctgtgattgtaaaggagcaaactgcccaggctattgcaaacacagcccgtgcctatgagaagagcggtgtagaagcggcactgagtgaggtgatgctgagccctgccatgcaaggggtcatcctggccatagctaaagcccgtcagacctttgaccgagatgggtctgaagcagggctgattaaggcattccatgaagaatactccaggctctatcagcttgccaaagagacccccacctctcacagtgatcctcgacttcagcatgtccttgtctactttttccaaaatgaagcacccaaaagggtagtagaacgaacccttctggaacagtttgcagataaaaatcttagctatgatgaaagatcaatcagcattatgaaggtggctcaagcgaaactgaaggaaattggtccagatgacatgaatatggaagagtacaagaagtggcatgaagattatagtttgttccgaaaagtgtctgtgtatctcctaacaggcctagaactctatcaaaaaggaaagtaccaagaggcactttcctacctggtatatgcctaccagagcaatgctgccctgctgatgaaggggccccgccggggggtcaaagaatccgtgattgctttataccgaagaaaatgccttctggagctgaatgccaaagcagcttctctttttgaaacaaatgatgatcactccgtaactgagggcattaatgtgatgaatgaactgatcatcccctgcattcaccttatcattaataatgacatttccaaggatgatctggatgccattgaggtcatgagaaaccattggtgctcttaccttgggcaagatattgcagaaaatctgcagctgtgcctaggggagtttctacccagacttctagatccttctgcagaaatcatcgtcttgaaagagcctccaactattcgacccaattctccctatgacctatgtagccgatttgcagctgtcatggagtcaattcagggagtttcaactgtgacagtgaaataagctcccacatgttcaaggcccattctggttcctggctgcctgcctcttgcacagaagttcgttgtcatagtgctcaccttgggaaaaggattaggtgggcacataagattccgatcagaccccaaccatgctgcatgtgtaaagaaggattgaaaataaaattgcactttttaggtacaaaatcataaaagctgtttcactagaaaaggcagaaagcagtgtattaaggtgttgaattacgccagaagacctgaaatgccttgtacctacaacaatgcttaggcttttctaagcctcttgccacttttaaaattatccttcaggcataaatatttttgacagcagaatagaagaatgattcatgagaacctgaaccagatgaac

SEQ ID NO: 23455 - DNA, 2254 bp, Homo Sapiens
gggaactgcattcaaatatcccaggcgcttactcgagagctagctgagcgaatgggccggcgactgtggagttagcgtcctcaatgtggacgccctgagctcccattaggagccgctggctgcggcagcaggggactagcgtgagagttggctaaaaaaaagaaaagaacatggaggcagatataatcacaaatcttcgatgcaggctcaaagaggctgaagaagagcgactaaaagctgcacagtatggtttacaactagtagagagtcaaaatgaattacagaatcaattggataaatgtcgtaatgaaatgatgaccatgactgagagttatgaacaagaaaaatatacccttcaaagagaagttgaactcaagagtcgaatgttagaaagtttgagctgcgaatgtgaagctattaaacaacaacaaaaaatacacctggagaaattggaagaacaactaagcagaagccatggacaggaagtgaatgaactaaaaactaagatagaaaaactgaaagtggaattagatgaagccaggcttagtgaaaagcagctgaagcaccaagtagatcatcagaaggaactcctctcttgtaaatcagaggaactgcgcgtaatgtctgaacgtgtgcaggaaagcatgtcttcagagatgctggctcttcaaattgagctgacagaaatggagagtatgaaagtcaagtatcagtcactaaagaagcaaaatgtatttaacagagaacagatgcagagaatgaagttacaaattgccacgttgctacagatgaaagggtctcaaactgaatttgagcagcaggaacggttgcttgccatgttggagcagaagaatggtgaaataaaacatcttttaggtgaaattagaaatctggagaaatttaagaatttatatgacagtatggaatctaagccttcagtcgactctggtactctggaagataacacctattatacagatttacttcagatgaagctggataacttaaacaaagaaattgaaagcactaaaggtgaattgtccatacagcgaatgaaagcattatttgagagccagcgggctctagatattgagcgaaaactttttgcaaatgaaagatgcctccagctttcagaaagtgaaaatatgaaactgagagctaaactagatgaattgaaactaaaatatgaacctgaagagacagttgaagtgcctgtactgaaaaagaggcgtgaggtgctccctgtggatataaccaccgctaaagatgcatgtgtcaacaacagtgctctcgggggagaagtttatcgattaccgcctcagaaagaggagacacagtcctgccctaacagtttagaagataacaacttgcaattagaaaaatcagtttctatacacacaccagtagtcagtctctctcctcacaaaaatctgcccgtggatatgcagctgaagaaggaaaagaaatgtgtgaaactcataggagttcccgctgacgctgaggccttaagtgaaagaagtggaaacacccctaactctcccaggttagctgctgaatcaaagcttcaaacagaagttaaagaaggaaaagaaacttcaagcaaattggaaaaagaaacttgtaagaaatcacaccctattctatatgtgtcttctaaatctactccagagacccagtgccctacagtaaagacttttctttaataagagtacggtgccacttgcctcaaaagttactatggtgcttaagattgtcttgatctgacatatatcaccttctgggttatttactcattgtgccaggacctggcattttcatgtgcctttgaccaagtgttcagaatttgcttgactctaacctggagagcttcttaagtgatgccccttcatggagcttctatgacagtgaataaactattaattgaaggaaaatgttataattaatgtatctatttgctgcattgtatatggattaaatgataaaaaacaagtaatctaccctcagagccatgtatttgagaatgcttcaatcatattttcctatgtacttttttttataaacttagttttagactatgttgtaaaaatgggaaggttgtaaactatgttgtaaaaataggaaatgtggcttaaaatatatacattatattgtttcaggattttgtcagtgtttaaagaaccaatgttcatctttgtatttatatacatgatttaaattttgtctaaaattttaaataaaactgcagtgatttatc

SEQ ID NO: 23456 - DNA, 2962 bp, Homo Sapiens
gggactgaaccgagaggtgccgaaggaaccggcgggccgcttgatcccgctgcagacgtaggagatgcctgggacaaggaggccaccttctcagggcaaaagaaaaagaaggtgacaggcgttgagaccaccgaagggaacccatggctaggatcagtttttcctacctctgcccagcctcctggtacttcactgtgcccacagtgagtccatttctccgtcagcgggtggcattcctgggactcttcttcatatcctgtctccttttacttatgttaatcatagactttcgacattggagtgcttcattaccacgagataggcaatacgaaaggtatttggctcgagtaggggagcttgaagctactgacactgaagacccaaatctgaattatggacttgttgttgactgtggcagcagtggttcccggatttttgtttatttctggccaagacataatgggaacccccatgacttgctggacatcaaacagatgagagaccgcaacagccaaccagtggttaaaaaaatcaagccaggaatctctgcaatggcagacactccagaacatgccagtgattaccttcgtcctctgctgagctttgctgctgctcatgtgcctgtgaagaagcacaaggagacccctctttacatcctctgcacagcaggcatgaggcttctccctgagaggaagcagttggctatcttggctgacctagtgaaagatttacccctggagtttgacttcctcttttcacagtctcaagcagaagtgatctctgggaagcaggaaggggtttatgcatggattggaatcaactttgttttgggaagattcgaccacgaggatgaatcagatgctgaggctacccaggaattggcagcaggacggagaaggacagtagggatactggatatgggaggagcctctctccaaattgcttatgaagttcctacctcaacctctgtccttcctgcaaagcaggaagaagctgccaagatcctgctggctgagttcaacctgggctgtgatgtgcaacacactgaacacgtgtacagggtttatgtcacaacttttctgggtttcggaggcaactttgcccggcagcgctacgaagaccttgttctgaatgaaactcttaacaaaaacagattgcttggtcagaagacaggtctgagtcccgacaatccatttctggatccctgcctgccagtgggactcacagatgtggtggagaggaacagccaagtcttacatgtccgaggaagaggagactgggtgtcttgtggggcaatgctgagccccctgctggctcgctccaacaccagccaggcctcactcaatggcatatatcaatcgcctattgacttcaacaacagcgagttctacggcttctctgagtttttttattgtacagaggatgtgttgcgcattggtggccgctaccatgggccaacatttgccaaggctgctcaggattactgtggcatggcttggtcggtactaactcagagattcaagaatggcctcttttcatcacatgcagatgagcatcgactcaaatatcagtgttttaaatcggcttggatgtaccaagtcttacatgaaggattccactttccctatgactacccaaacctgcggacagcccagctggtgtatgaccgagaggttcagtggacgctgggagccattctatataaaacacgattcttaccactcagggatcttcggcaggaaggtgtccgacaagcccatggtagctggttccgtctctcctttgtatacaaccactatctcttctttgcctgtatcctggtggtgctactggccatcttcctataccttctgcggctacgccgaattcaccaccgacaaacacgagcctcagctccattggacttgctgtggcttgaagaggtggtgcccatgatgggagtacaggtggggccgtgaggctggaccaggactagagaagcttgagcacccccgagttgctgctcattgaattcctccactttcttatatagcctcagatgctgtgataattccttctccgtacccaggtcttctctgagagaagctataatttaatctgtgaggaactaaatgacaggagattggtgctaatacgggggaccaagctttgtccaagtgaagcaggcttcgactccttctgagaggtctggtgtgttcctagaatctcaccttttcttcccttgctaaagcatgaagtttggcatttggcacactggaagcctggttgaaatgaaatttgtagcatctgatacaaagccagagacattctagcaagtgcagcagccccttctttctctgtaacagagatatcatttatgtggagatccacaacctttaacagggatccaagatctttgcagttcaatcgaccacataggaatttccaggcaccaaaatgatataacttccttgcttccttgacaaagaagccatcatgggtgtgatccaagatccctgtcgtagtgttgatgatgttagtacatgattttaaaggttagaaccccttctaaatgaatggtctgtggaagattttagtatcttatctgatgcctggtatgatgaggatagaaaatttttccatttttatgtgcctcacaggctgtttgggcattaattttgctttttgagccttaagtgtgttagtaggatggagaaactgtgatgggggactgggaacctggattgtctgattttaggtcactgttccctgggcctgtttttgtgagcccttacacaggaagatataaagagagttctttcatttccctgctaaaatcagtatgtagtatggggaatgtatttgggttgtttttaaagaaaaggggaacagaatcaggagagtgggcaaaggcaataaaatcaaagtttttattaattatttttgagaaaaaaaaaaaaaaaaaaaaaaaaaacaaaaaaaa

SEQ ID NO: 23457 - DNA, 1771 bp, Homo Sapiens
tcagctcagacaggtggttgttgttgatgaggcataatttaggtagaatttaaatgtgttttgacggttgtgtttactcatacaaccactactcagaatacagaccattttcccaggaagttccctcatgcccatctccagtgagttggcaccttcatctcccagatcagctgctattctgacttctgtcactgtaggtgagttcgttcttggacttcatacaaatggagtcattcagtattttctttccttttgtgcctggctgcttttactcaccatggctttttttgttttttgttttttgttttttttgagacggagtctcgctctgtcacccaggctggagtgcagtggtacaatctctgctcactgcaagctccgcctcccgggttcacgccattctcctgcctcagcctaccgagtagctgggactacaggcacctgccacctcgcccggctaattttttgtatttttagtagagacgggtttcaccgtgttagccaggaaggtctcgatctcctgaccttgtgatccacccaccttggcctcccaaagggctgggattacaggtgtgagccaccccgcccggcctactcaacatggttttgagattccaccatgtaattgcatatcacagctctttttttttaattgctgactgatactcaattttatgaatataacaatttgctcattcattcttataatggtggacatttggtttatttctagattttttaatctattataaggaagactgccatgaacattctagtgtaaatcttcttgtagatagatgtttcatttctcttgagtaaatacctaggagtagaactgcttttactgtataagaaagtgtcaaacagtcatcgaaagtgatcggaccatcgtttgtccacgagaggtccagtaggtctacattctcaccaacacttattttgctttttgtgggttttttagctattctagcacatgcgaaatggtttcattggtgcaatcaagcgatccttctgcctcagccaccacatagctagggctgcagcactatgcccagctgatgttttttatgtttgtagagacagattctcactgtgttgcccaggctggcctccagtgatccttccagctcggccccacagaggtttaatttttatttccctgatgactaatgatattgagcaccttctcatgtgcttattagccatttacttatttttgtgaattttatgttcaagtcttttgtccattctttaataatttttaatatttcatgatgaaaattccaaatatgcacaaccgaagagagtacgacagagccttacgtgactcttaccttgactctgtactgtagtttttcatcattccttcgtcacttgcaaattcaagtatttttcccagccattaattgagtttttgaagatgaggaattttttattttggtgaagtccagcttatgaactttttctcttacatgtagcactttctctgtccagaccgatgttatatcctgagaacctcttcacctaggaaacctaccacatatcagactcagcgtgtccataacttatcttacctcaaatccattcttcttccagtaatattacataaaggctacttgggagtgtagattctgggaaacctgaatctatgttcccgggctgcagtcttcaagcttggcccagatgaactctctatttatactaaaaatatgtaaataaataaaaataaaaagaaataaatgctactatatcgaaaaaaaaaaaaaaaaaa

SEQ ID NO: 23458 - DNA, 2922 bp, Homo Sapiens
tgaaaagaccatatatggtaccttctcccggatgggaacatacaaaggaaaaacaactgcctgatctgggaaggtgacagtactaccttcttctagaaaacaaagattgttcaaccaccaccatgagaacaggtggaaaatatctctatagacccaacctggcaatgaagtataaacatcgcaccccgcagggcttctcttggtgccctagttgggttcatttttgtttgtgactatgaatgggaagaagtcacaccctgtaaccactccaactccctaaggagtcacctcttctttaaggaatagctttcccttgtatctaaaaaacttggaactgacatgaatgaacgttggccactcttacccctccaggggtcacaatctataacgcctacgacccaagaatatcagaaataagtaagcaataaaactaattctggcaggaatcagggtggcaataggactagcagcaccctggggtggctttgcctaccatgagttaacgctaaagaacttggctcaaatcctagaatccttagccaccaacggagatcaggcattaaagagaattcaagagttccccagactctggaaaatgtagttgttgataacagactagcattggattatttactagctgaacaaggtggggtcttgtgcagttattaataaaacctgctgcacatatattaactctggacaggttgaggttaacattcaaaagatctatgagcaagctacctagttacatagatataaccagggcactgcccccaactatatctggtcaaccatcaaaagtgccttcccaagtctcacctgtttttcacctcttctaggacctttgacaactgtcttgttacaaatgtttggtccttgcttctttaacctcttagtaaagtttgtgtattctagattaccacagttccagagacaatgctggcacaaggcttccagcccatcctgtccactgacacggagaatgaaatcgtcctgcctctgggctccttagatcaggtatccagagatttttactcctccagtgccaggcagggcctacgtccataaactcagcaggaagtagttacggaaaacagatctccgcccttctgcagcccccttaagattaaggaggagtatctaatctctgaagggggaatgaggtaggaggtgggactcaactctggaagtggggctcaggcactcagaccaaactgagcactagctaaaataggtccagggcagatgctagtttccataggacacaccgacctgtgtcaagtcagttcaccatggctctggcagcacccagaagttaccaccctcaccctggaaatgtctgcataaactgccccttcatttgcatataattaaaagtggatacaaataccactgcagaactgcctctgagctgctactgtgggcgcacagcctgtagggcagccctgctttgcaaggagcagcgcctctgctgctgctgtgcacagccggccgcttcaataaaagttgctaacaccactggcttgcccttgagttccttcctgggcaaagctaagaaccctcccgggctatgcttcaatcttagggctcgcctgtcctgcatcactgggatcatctcccagtaaactagccacacttacatccatgtgtcagggacatttctggagaaagcagcccaggacactgttgaataaaacacacaatagtctctgtggtcttctccaccccaccccacaccaggcaccctcagcttgattctcctttttaattgcctgtaagcagggaagcacaatgttttcacattctttgtaaggcctttgttctactaaaatctaacctcagagcacaattttaaactagatgaaagagttgctgcgcctgaagcactgcaaacacctcctcaccacacatgtgcactcaccctggacaccctcactcaccctgacaccctcactcctcaccctggacaccctcactcaccacagacaccgtcactcctcaccctggacacctcactctgcaccctggacaccctcactcaccctggacacgttcactcaccctgacaccctcactcaccctggacaccctcactcaccctggataccctcactcctcaccctggacaccctcactcaccctggataccctcactcctcaccctggacactctcactcaccctgacaccctcaatcctcaccctggactccctcactcctcaccctggactccctcactcctcaccctggacaccctcactcctcatcctggacaccctcactcaacctggacaccctcactcctcaccctgacaccctcactcctcaccctggacaccctcactcctcaccctgacaccctcactcctcaccctggcaccctcagtcaccctgacaccctcactcctcaccctgacaccctcaagtcttcacctccctggctgcagcctgggacacgctttccctaacttctgaaggctcagtcctcctcaagccaatctcatctcaaattgcacctcctcagagaggtcttccataaccgcccttataaagcaggattctttcaccaataccccttcccacatggcactgtctcacagcactcctctaaaagtctgtttacttccttgacaatctgtcttccttataaggggaggttctgtaaaagccaagactctctctgtctagttgactgttgcataccagggcttagaccaaggccctgacatgcagtaggtgcttaatatgttttgaggcaaggtcttgctctgttgcacatgctggagtgcagtggcacaatcgtaattcattgcagccttgaactcctgagctcaagtgatcctcctgcctcagcctcctgagtagctgggactacaggcatgcaccaccaagcttggctaatttaaaaaaaaaaaaaaaaaa

SEQ ID NO: 23459 - DNA, 2189 bp, Homo Sapiens
ctagttctcgtggctacattgtgtctattgtatcccttggctggtgtatttgtacatctctcgggacgtgaaattgacagtgaaaagtatggcagatgagcaagaaatcatgtgcaaattggaaagcattaaagagatcaggaacaagaccctgcagatggagaagatcaaggctcgtttgaaggctgagtttgaggcacttgagtcagaggaaaggcacctgaaggaatacaagcaggagatggaccttctgctacaggagaagatggcccatgtggaggaactccgactgatccacgctgacatcaatgtgatggaaaacactatcaaacaatctgagaatgacctaaacaagctgctagagtctacaaggaggctgcatgatgagtataagccactgaaagaacatgtggatgccctgcgcatgactctgggcctgcagaggctccctgacttgtgtgaagaagaggagaagctttccttggattactttgagaagcagaaagcagaatggcagacagaacctcaggagccccccatccctgagtccctggccgctgcagccgctgccgcccaacagctccaagtggctaggaagcaggatactcggcagacggccaccttcaggcagcagcccccacctatgaaggcctgcttgtcatgtcaccagcaaattcaccggaatgcacctatatgccctctttgcaaggccaagagtcggtcccggaaccccaaaaagccgaaacggaagcaggatgaataaagaaagggagagcacatgaagctttgctaattataacccctcaccttgaccagagtcattgatgtcctgatgtgaaacaacccttgcccaaccccacgaagtctcctatttaatgtgatggaagcacaacccctctctcactttgctcctatttctttctgctcttgggatttctggtttaggaagagatgtggttcaggtgctaaacagtgtgtctgatgatcccttctctcccactcacatttcaacccctgcccttgtttggagctaagggaagggcaaaaggctcagatatgattctctatctcttgtgcctgaggcctggagcctaaggagctgtagggtctgaggggcaggggaggcccatatcttgtttcaggtaaaggacccagtatttcccctccttgtacttttgccttaggttctcaagggacaatagtcttcatgttggattctccaacaggctgggtgcatgtatccccctactcctaccctcatctcatccttaaggcccagaggtagcttggacaagccctccttttcataatcatttgggaggcatggctgtaattctttagctttctccacttctgtctcccacatatactaaaattcttaggtactaggctgtgtgtcttgggatcttaagatcaatgaacctttccccaatatctagtctttgcaaattctagtagaagatttccacagtgaaatcagtgagccagaccaactctacatctcctgcctaacctactgcctaagtcattagggctgagggctcggctgtaggggcttccttaggctgagagtgcccccaggctgacatctgtgttggcttttgttcagaaccattactctggcacatgctcaatggtatattgcagggaggagaggagtagatttagatttgagtaaatgccaatcactttacacatgaaggtgggtgggactttccttccattcatcccttgctctcttggatctgaactcttctggagcctcagctcaggatagctgctggccactcctgtcctgtggattgtgcaggtggcctttcctcccaaaagaaaaggcatcaggctccccaagccccacagctttcctttccaccaaagccaggtttcctggtaaggtcactcgaagataagggatggggatgggggctgactgacaaaaaattttagccccaggtctcagtacctggctggggagggggatatttttccttccttaagtagttttacattgccacagtgtgtatgtgttcactatataaaatgttcctctgctctttgaaagtaagagtgttgtgtctgtacaaatccttttaacatgcattcattggagtaaattctgagtatctactgtgtattggataatacaaaagatgtaatgtcatttaaaaaaaaaaaaaaaaaaaaaaaaa

SEQ ID NO: 23460 - DNA, 24360 bp, Homo Sapiens
cattttcatgttctccatactatgaatagttttgagtagttttgagttagaagtatatgaatgcatacaatatttagccctatgttgataattaggttattttagtttttcactgttaaagcatctgatgttctaaaagttcccaatatcttgatcatagtgctcctgatatggaagatatattgactgaatcagaaattaaattggatggtgtcagacaaaagatattccaggtagcccaagagctatcaggggaagatatgcatcagttccatcgagccattactacaggtaagtctaggtttgtttcagggtaatatatattttaaatggtgtgctacatgattaacatgtgagttgcatgaattttaagtgacacctgatgaaataataatactggcttttaaagaactgcaactttgtagtaatatagaagtaatccaaaggcaagttggctttatgttttttttaacagtgtagtgatggtcattgattgattttaataaagtatttgagaacacagatttaataggatgaactttattcttgagtatgtaggatgtgttcagacagggcacatctcagtggtggctcacgcctgtaatcccagcactttggaaggccgaggcgggtggatcaccaggtcaggagttcgagaccagcctggccaagatggtgaaaccccgactcaactaaaaaatacaaaacttagccaggtgcgttggcgggcgcctgtaatcccagctactccggaggctgaggcaggagaatcacttgaacccgggaggtggaggttgcagtgagccgagatcgcaccactgcactccagcctgggcgtcagcacaagactccgtctcaaaaaaaaaaaattttgagggtatactggatcttggtggttatcattattttcaaataaattgaataaatgtataaagtgcttggttctttcctctttcttctttttctaatgtgggttcattgataggacagatactagataattcagatacaggttcagtatcccttatccaaaatgcttgggaacagaagtgtttcagattttgagtgttgaaatattcacagtttactgcttgagcatctctaatccaggaacctgaaatgctccaatgagcatttcttttaagcatgacctttgagcatcgtgtcagcactcaaaacgttttggattttggaccatttcggatttaggatttttggattaggaatgctcaatatcagtaccctaagatttgcaggaagactgggaaatgagtttatttggtatctgcttaatacgaatacccagttttagcctaaacgtttataatttcagcacttgttttttcagaaatgttgatatgtcttctaatatgggtaagagaaagtaccagcatacattagttaaaactgagggtgcattgttggaaactgaagtgtaaaacagttctgtgaggagtcattataacatattaccaaatgaaatacagtctgccatcataatttattaatatcaggggtttatttgatttcttaataatagcacacacaataaagatgacttcatgaatttagtttgttgtaaagtggcacaacctgtaaagtgtgacagatttggctggagtgggagacaggatcagaagtactggtgggaagaagggtgaagtaaaaggtaaatcaagcttggcagaaaacatgagaatatctttataatagtagctgtgaccatactacagatagattcatagcaggaaaatatttcagacagagtagtcctgctatacataagttaggtatgcgtgtgtaatcttgagggctactgggtggtagtgttggtggtggtgggggaccaagttaggtctcttagtttctggaaagtgcttgaactgaagcagcagtacagtctaaatgtctgtattaaacagaaatccaattctacagcttttcctaagtatcctattaacctgaatgactaaaggcaagagtttgaataacttccataatctttatcattttttctatcacatcatcatgtagtatgcctatcttgcaaaaattcatgacagttaataaatgtaataaaagctgatcacagtagttctcactttggacttcagtctgcttaaaacttgtattttaataaaaattcacatattttccccaaaatgttggtgcctcatgtgtgaaaaagtttttcatgtttagacttctcaattccttattagtgcatgattaggctctactaattgtgacaacatcaagttccccaaatatctgtgggacatatgggacatttcagatttgctgtatttggcccagtagttctattttgtatgtcctcatgcatcagtgaagtataaagataaagagtttaaataagggccaaggccatatagataatgataccaaaagcaacctagaaagctgtacattgtcttacagaacagagaaatggagagaaaaaggtgaaagggaaatattcagtagattatttcctaatgcaggaaggaagtgctgtactcttggaaagataggacattaagaaaatgggaatgatagatcttcagattttcctacttcactgtatcattgaggattattataagcacagtggtctcttttaggccttcgtttatgatttgtaagtttcctttgaagataacttactcatggattaaaataatgaaggattttctgtatcttttctgtaaaaagtctttaaaatgagattctttgaattgaagcaataaagatgttttttcttaaagttaaggaataaagcagtcaagtaaagaggtgtctaggaccgaaaattttgctgacagatattttatttgataaaataaggttatttataattggattagcattaacaatatgatgcttatgaatagcttgctgcttgtaattgttaaatgcttgttttggtattactccaaatagttgttcttttgacttgaagataaaacaattctggcaatgaactaaaggagttctgtgcttttcctcattaagaatagtgctaatggcacgcagagcatttccctaagggatacttgtgtgagctcaaacattgagtatcctaataattgaacaacaacaaaacgtcaggtctgttttctacacatttcttatcagagtagattacagattgtcccaagggatggttaaacaaatgaacaaataattagctgcttgaaataagtctttaaaaaaaaatttgtgtcctgtcattttttttttccctcttgttgaaaaattaacagtttgggggaaatgtcctccatttcaaagaagaaatacatgtttttttcttaagtttagtttatatcactgataatgataagaattgtcattttttgagacatttcggtacacaaaactaagtttatatcctaattaatgttttaattcttttatccaagaatgtgaatgatgggtaaagtggatgttttgggccagttaagatatgtttttagccactattctttatattcacaatctcataggtttttgcaatacctctaaatcatagatatttttaccacttcacaggcggggagattgaggctcacaagttatgctcagggtcataagctagcacgtggtaccattggtttcttcccacatggatttcatttacctcttaactttacaacctaactcctagcaaaggctttattttgcttaccccaaatactgaggttttcctcataaacccagcacacactgtggcccttttttcatagcacttctcaacttctaatgtgtaatctctttatatattatatttcttcattatctctctttcccttactagaatgtagactctatagatctctacaaagatttcattcctgtttttcactttatatatcccagacacctaataagtctcccgaaatacaaatgttgaaaagaatgaagaacaaaactaattttaaaaggctttttgttgttgttcagccatatgctttatctgatgatttgctttcacaagtttatattttactgttttttgtttcttccgaaagaaagcaagtttccaggagctatttcttagacatactagcaggaataggatcaatattaatgtttagggaagttccaaagctactatagcagtacagagaaattcgatgtaggttcagcatattggcaaaattgtgagtgcccactggaaaaatgaactatgatgtgaatctctgtaagcttttggagtaacagtaggaagagtgtagtggatggaataatatagctaaaaattgaatttatctgttaatgagtgagattaagagagaagtaccagagatgttggttagttaaggtaaagctaagtgcagaaacagattaataaactgtgacgttgcagtgacttaacaaactagaaatcgttatctttctctcttgaagaccaggctttgtagtggtagtttgagtgtgctctgcccacttagttattcacagatccatgctctctggggctctgctgttaccagtacatgatttccaagatgagccagggcatcaacatagagctgacagattgtggaaaagggaggagtgggggatggcgcctgaggattttatgcaccagccctggaagtggcatggagcacttctgcccacattttgttggctagtcacatggccacaccagccttaaggaagaatgggaaatacggtctctgtgcgtgccaaggaaagcaaaatatgtttgatgaatagttaatttttctctgcctgatatggtaatttgatgttcttttggtgtaatagaaaattcaggtatatgtctgttgattgatttaacatttttttctgaatagatttttcttttgtttgaaagcattcatttgtctgtttgaaagtgattttataactggtgagaagacttttagttctactacctaattttgtaaatgaggtgagtgatagtattggaattggaatccgacttgtttcatctactctgatagactttctgctagactattatccatctctgatagctagtatctagtgctttaaactgttttatctaaagctaaaggctttttcttttttttttctttttttttttttttttttgagatggagtctcactctgtcgcccaggctggagtgcagtggcgtgatctcggctcactgcaagctccgcctcctgggttcacgccattctcctgcctcagcttcccgagtagctgggactataggcaaatgccaccatgcccagctaatttttgtatttttagtagaggtggggtttcactatgttgaccaggctggtctcaaactcctgacatcaactgatccacccacattggcctcccaaagtgctgggattacaggcatgagccaccgtgcccagccaatttgctgttacttcttagcaaaccaaaaagtatttgagaattgtagtacatattgacttaggataacattttagaagaataacagcccctttcaattgtaagctaataaaagggaaaagaaatccaaggaacaaaaaaccattgctttcttttttttttttttttttttgagacagtctcactttgtcgcccaggctggagtgcagtggcacgatcttggctcgctgcaagctccgcctcccaggttcatgccattctcctgcctcagcttcccgagtagctgggactacaggcgtccgctaccacgcccggctaattttttgtatttttagtagagacagggtttcaccatgttagccaggatggtcttgatctccgtgatccgcccgccttggcctcccaaagtgctgggattacaggcatgagccaccgcgcctggccaccattgctttctttaaagacattataaaatattgtctaacaaaaattaatggcagtaattcttattttattcttctcatagtttaatttagtaaacagatacaaagggcccttataccagacactgataacattattctgtataaaccctactatgtaaacagatgcctgcactttacagatgagaaaattggagcacagtaaaatgagtaaacttaactcagttcacactgcttgcaagagacttagctttagaacctaggacatcctcccttcaagtctctgctttctgttttgccattatcatattttattcagtgggaagctagaggcagagaggtgaggcagttgtagtggtccttcttggagtgaaatgaatagggcctcaagtttggtgttagcagtgggaatagagaggaatgggcatgtttttagaagacagtttatttttaaaaagcagaaagggaatagtctagggatgcctttaggtttctggtttggccaactggatgaataggaatgttatttgttaagaggagaaaacaggaaggtggaatgggttttggaaaaattaattggaaatcttaggacgtacaggttgctgcctaggaggcaatttgatacgtaggtctacagaactcaggatgcatctgcagttacagccttggagtcatgagcttataaattgtagttaattttaaagacatggataagattgtctaaggagagtgtagagtgagaataaaaccaaaggctgggaaccttaactaaaggaaatacaatataatatttaagcgaataatatccctgaataatcaagacctgaggatgggatccagagcttaagccttgtatgacaggacagctccctcttcccagatgggcagttacagatgggtagttacagatgggtatagaggtagggaattgagaaaattcttgctcagtcacttccattttcctgtcatgtgctgagaaaaggggatgtggtggggaaatggtatggaattgatgggagactggagatttaagaatgactctgatggctcacgcctgtaatcccagcactttgggaggctgaggtgggcggatcacaaggtcaggagttcgagaccagcctgaccaaagtgatgaaaccccatgtctattaaaaatacaaaaattagctggacatggtggcgtgcacctgaggcaggagaattgcttgaacccaggaggcggaggttgcaatgagccgagattgcaccactgcactccagcttgggagacagagtgagactccgtccccgcccccagcccaaaaataaaaataaaagaatgaatgtgagtgtaatggggatgggaacttaaccaggaatatttaatagttgctgttaatcatttttgaaagtttacctgagcaataaatataatcctttctgtatagcaataggaatgaatgaggcagaaagttagattaattcatggtttgggtcgtgctcattatttggcagtaggatgacagtgggagaagtaggaaaagataagcagcctgctgcattattgtggccatgtttgttgttaaaatagaaatacatccttctttgtttgttggtaagtagtatattgtcaactgtgatgagtagtaaaattaataatacaaatttcagcacatgtggtttatctcagaagccaaaggtgcaccgattccaagatactatattagtttactaggcctgtcataataaaataccacagactgggtggcttaaacagaaatttattgtcttgcagttctggaggcctcaagtctgagatcgaggtgttggcaaatttgatgtcccctgaggcctctttccatgacatgcagatggctatcttttccctgggtcttcacatggccttgtgcacacgtgcacacacatctctgttgtccctgtgtgtcctaatatttccttatgtcaccagtcatattcgataaaagtacacctcaatggactaattttaacttaatcccctctttaaagaccttgtctgcaaatacactcacattctcaggtactagaggttagggcttcaacatataatcagcatatttggggcagcccagttcagtccataacagatactttttggtttgtgcactgcagctagaggatgagctacaaatgttactttggagtggagggactggggagttgcttttaagtccaggggtgggtgggggtgttgtgttgtgcagctgagctgtggacttcttttgtaaacccccaaaaagaggtgccttaaggggagaagcaaatagtgtctgatgactctactgggaaccagggatataaacagatatttcatgcagagcatattctctcaggctgcgtttataatctcaggtaggttcaggaagcattgctttatttgaggcatggccccctggtggaaagagaagtggctgtctctgcacataagggaaagagtctgggggaagggagccttattgataaccatcacaggacagcaggcatcccagcaagtgagaacacagattttctttcttttcttcttccttccttccttttcctcttctactcctttcgtcccctattggttggaggagagagtatgatgagagaggaacagagactaaaggaatggttgggggaattggaagctgacaatgggggcaagcctgtgtgaatcccctacattggcaggaacccagttgcctgataactgtcattttaatggaggaggtcataggaagagtttgatgatactttgcatatcaaatcatggctcagacaagggaagtcaaaagccctttccaacagcatctaaaaaattaagaaatgatttgagaattattggaatgatttgaggaataatttgttatattttatatcacttggtaagcagttctataatatagtttagtgtattaagaaaataaaaatatatttaaaatttgggatttatatttatttatatagtactttatattcctgttaaaatatcttgaatatgactccaagggacaaggtagttgaaagtgcagatgagttatttaagtggctattataaggattaagcaagataagaagagaatgtggtcctttggtattaggaaagtcagttttagaagatccccagattggtcttaacttttctagtctgtgaggtctccttgtaagaggtaaggcttgctcagtgaggtgaagtagaaagagatcaactttgccatcagacctgggcttttatgttttaatattccatatcgctgtaaccttggaacaaagtgtacaacctatttgaatttcagctttctttcctttagcatgagaacattaatagctacctcctggattttttggaaattaaatacatttatggaaagcatttattttgtttggcatataaccattaacaaatgttcattcctgacctttcttgaatttagcaaaattaatctataatattgtactaaattttaacatttattttcattttggataaaaactcagtggtaccaatttgctcaatactcgttcttcagtgctgatgtaaaaaccctgcctagggctggaagtggtagctcatacctgtaatcccagcactttgggaggtcatggtgggaggatcacttgagaccagtctgtgcaacttagcaaaaccctgtctctacaaaaaagtaaaaaaaaaaaaaaaaaagtaaataaataaaaataaaaacaccattagctaggcatagttgcttgctcctgtagtcctagttactggggaggctaaggcatgaggatcgcttgagccaaggagtttgaggctgcagtgagccacgattgtgccactgcactccagcctgtgtgacagagcaagatcatgtctctttttaaaaaaagaaagacccattccaggcgcggtggcttacgcctgtaatctcagcactttgggaggccaaggtgggcgaatcacctgaggtcgggagttcgagaccagcctagacaacatgatgaaaccccgtctacaaaagttagctgggtgcgacagcaggcacttacaatcccagctactcgggaggctgaggcaggagagagaatcacttgaacccaggtggcagaggttgcagtgagccaagatcgtgccactgtactccatcctgggcaacagagccaggttgtctcagaaaaaaaaccaaaacaaacaaaaaaaccctactcagacaaaatccaaattagtggaattctatttagagtttactgttggtagtataagcacacatactttacaaagctgaggcatatagatatatttattttcagtgtgcacttcatgtatttgaaagtagatttttagcagagtggcctgtgaatccaatataaatctgatttcattttaacatttcagtgattgatttggtgacgctaacttgttttaaaaattcatgtggtactcagagaaatagttacaagtgcagtttttaaaaattgagacattacataccacataattaaattttaaattgaataattcatttgtttttactgtttccacaaggttatgtacttatcactgtctaataccagaacatttcatcacgctcaaaagaaacctcctacctattagcggtcattccccattccccgttctcctaataccagggttagcccctggtcaccactaatctacttttgtctctatggtaatttgtctattctggatatctcatataaattgaatcaaaccatgtatggcctcttgcgtctggtttcttagagcatgttttcagagttcagctatgtcatagcatgtatctgtatttcattcctttttaatagctgaattatagtctgttttatggatatactgtattttgttaatctatcatcagttggtggacttttgggttgtttatactttttggcctttgtgaataataactgctgttaatatttgcctacaagtctttgtgtgaatatatgctttcagctcttttgggtgtatatacctaggagcggaattaccgaatcatatgttaaacaatttctgaaaaagcattaaaaaccaagaaacaaagttgagtcatgtgaggttcaaatttataatgaaacctttgtcatatctgtttgcttttatatatagtttttgatggagatttggactggatgtatattgcttaaatattaaaggaatatgtaaaaataatcagaagcctttaactgggtttccctgttatatgttctaatgggagaacaaggaaaaaaataacaatttacataaaagcaacctacagacttctctcttactggcagctgattctgtaaataattctaattggatttcatccaaggctaagacagaaggggaaggcattgtttgatggaatatggcagtacgttgaaaattttcaccttggggattattcactgaaaatagcggatgtcctttttatcaggttgaaacataacttgtttaaacatcctcttacctacatgtgaccaaaaatgcttttcagtgttttgggccagatgtccttgaactttctccacattatagcatgaaacctaatttctttctttccttttttttttttttttttctttgagatggagttttgctcttgttgcccagggtggagtgcaatggcgagatctcggctcaccacaacctctgcctcccaggttcaagcgattctcttgcctcagcctcccgagtagctgggattacaggcatgtgccaccacacccggctaattttgtatttttagtagagacgaggtttctccgtgttggtcaggctggtctcgaactcccaacctcaggtgatccacccactttggcctcccaaagtgctgggattacaggcgtgagccaccacgcctggcccatgaaatctaatttctatggagcaaaaatggccacctcatctctgaagtaacttttgttaacacatttcaaggacaacttatataatgactagatatacttgaaaattaaataactgacactcacccatatttaatagagattgacaccaaagataaattttgaggactcttattccatattctctcttttccctattaaaaaataaatcaggacctcaaattctgcccttcatcagtttgaacactaaccttgttagaaagtattttaacttaagtacaactagatagttctgaataattgaataccaaattttaaaatattttttttgttgaggcacttagtttcatagaccttggtgaggagaaacagattattagaaggaatttacgggaaaaagttgagtctcttgtacatatgagttgctatctttgggagagggccaaggagcaaagtcgtctgggcattgtccccaccctcagagttctagggtgcaaaataggtgatcagacagctgtttgtaatctaaaactgactgaaacatttaattgaagtacaagttttatatagtgagaatgaagagacgagtgccgccttgattggggtgtattaaaacatttaaactattgttgtaggtagagaaagatgtgagagaaggcttcatagtcacagaatgacatggaatcatgaaagtatatagtgtgtttggaagactacagaataaggttaagcaaaacatggagaaaagctgaaccaggaatttagtgtggaaaaatgttgagaaaaatgggtatgttttatatggagatgactgtcaagaagcaggtaagatgggaagggtgtgagcttttgaattctagaaactttcactatttactgtgtgacttggctgaatttcttaacttctctatgcctcaatttgttcattaaggatagtaatagtcacataaggttatagtgagcattaaaaagatggatgtaaagttccagatccatactcttaacatgtagtagacattcaagacttagtaaactattattttatttttaaaaagtttgttgagggcttctgggtgatacccctaaataattgaaagcacgacttgaacaggtatgaatagtcatgtttacagcagcattacttagaaaagccaaaaggtggaagtgactcagttgtctctctatagatgagtgaataaacaaagtgtggtatatgcatacaatagaatattattcagccttaaacaggaaattctgacatatgttacaacgtggatgaagcttgaagacattatgcaaagtgaaataagccaatcacaaaagggcaaatactgtatttgttacttacatgaggtacccagagtagtcaaaatcatagagacaagaaagtagaatggtggttggcaggagctgaggggaggagggatggggagttagattaagaaatgctaggtccagagtttcattttggaaagattaatacaagaattctgtagatgaatggtaataatggttgtacaacattatgaatgtatttaatatgctaaactgtacacttaaaaatggctaagctggtaaatgttatgtttgttttaccacaattaaacggagaaaaaataaaaatgaaactgctaatttttaaaaaaatcaaacgaattctaaccacttcagctctttaagcaagatgccataattcattttgttgggagtaaatattgcttactgtattgcagtatttggcttacagagatgattggagtaaaagcacatcttaagagtttgctcctgctcaaggaaagactgaaattcctgttttcctaggtcctctgtgataattaaggattttgtcccagggtagatgtccatttgtagaatagagtccttaaggagtttttggacatgcaagagtagaaatggagctaagttgaggggaggaaccaaagagccttggataatgaaagatgaataattttaaatttcatagttgcacaatggaagaggggaaagaaaagcaatagacaatcaaaaagcaaagtactatttttaaaactactcctgcttctgaatgaatgttattgaacaaagatgacaattacggagacaatgatatggtaaaatatcatgcatttgtccatggaagaaaaaagtttgttcaccttcattagttgtaaaaagttgttttgtccgtgagtcaattcaaaacatggaaaatggttttagtgaatttatttttaaaaataatttgtaattagtaaaatcaactaggtacaactaaatgccaggcctgggcctcagttgtaaaagtactagatgccatgatcttgatggtacttttaaaatttggaatattttgaactattcttccactgaaatatgaaaaaaaaagtacttgaatgaaactaaactatatggcagccaaacagaaatgctatttgtttctgcaacaaggcactgctgaatgatacagaatattagtagtatgttgttgctaaagtgtttgtggtcttatcaacagctacatatgaaataatactaaatttaacaaataggatcgacagtgttacattgggcgagatggagagaataacagccccctttccatgtaaggctgcttatcctgtttgttgaatttaatattattcaaggctcaggaaaatatgtgtgtattgccttcaactgacatagttctactttttatactgtctccctacctacctattgccatgtataagacaggcaccttgccagttgtgtttgattctgaccatttaaagcagtgctattttttgctcaacatgcatacagatatatgtttatgtacccatcttggaaatgcaagcctttgtgagttatgacttaactatagcatgaattgaggctgataatgtaagtgggggtgaaattaagcatggtcttataagccacgttaatggttttgccctgtattctgagcgccatgggaagctatttgggctttaaactggggaatgatgtcgttaacatattaaaaaggcagacagtctgcagtgtgagaatggatgtgaagaggtcaagaatagatggggggagaccaggacatgcttagaattggcaaaacttgagagaaccaggtttggaaggaaggtagtgagttcattgttggaagtgttgattttgaggtatctttggtaaggatgtcagatactcatttggatgtgagtgcctgttggccagagatgtgaagtttaagggcagcaaggttacttgaaaccaagtatagatgaactggagggaacctaggactgatagaggcagagacttaagaagacatgactagagaggtggaaaagtgggaaatcaggagatgatgctgtcaaaggaatcaaaggaaaacttgttcaaagaggggaagtggcacaaaatgctgaatgctgccgagatgaagacggaaagaatgtccattagtcttatttattatggtaatcttagcaagaactattttgttttagagatgtacccaagctagattgaagtaggttgagaagtgtgagatgaagttattgaggaaatgatgtagccagctacttcaagaaacttagctctgaggaggaggagacagatggagcaatagttgagaggaaatatagggttcatggataggacagatctgagtgtgtttcagtatttctgtaagattcagtatagaacataaagtgagaacacctagtatgttaaagggagaattcatgtgaagctcccagctggtactgaatcttgatcctgaacctaatacagtgactagccacagaaaatggaacaccttctctaggtagtagggctgaaggagaagtaataccattatttattttcctaattccttattgtattcatcaggctccaaacaggaaacagaaattagatggtaatatgaacagggaaagttaaatacaacatacagacttattaaccatataggggattataagagtaaaagagaactctaaagagtactggaatctcagatagagtgagcagccactacccctagggcggaggcagagcacccaaggaactaaatttggcagaacccaaccctcacccttcacaggatgaggtccagaccatgctggagagggtgggcatgtcccatcggctggcagagacatttgctgagctgttgtgctgatggactctctgggaagctgtccatggggaaatgccatggaaaggaattccctgcccaaggaggtggcttactgggaagccattctctggagtacaaaagaagctgtccccaggcaggtgctacatgctgttggccaccttgaagtgctggctgccccatactcagggctgtgaagaggggcacagcagaaccaggcagagagctctttacagttctttaagcacctagcaccctgtactgacaaagcttaatatattgccagctggcataggagacatgctttaagtatccacctccttcttctgaaataatggaactaagagacaaaaattgacaagtgatacagctattactggtcttttaactttaaaaaattttttttgctgtagtgacaaacatccttatatgtaaatctttgtgcatatcttcttgtttagctcataagaggctaaccacattagagcatggagatgtgattatgcatctttacgttttgctgtttgcttttgtgtgcatgaagtatctttagaaggaaatgagaaatagagattttctttgggggggaactgggcggtgtcacctattcataaaactaaaaattcataaaattaaacatttaattaaaaatatttttaattataaatataaatgacatcatctgttttgttaaacttaacctcgttaatgtttaatttctcagaacattatggtttgttaaattgtcccttctgacctatatttgggcatcatttgcagctcagaatgagtcaggatattttcatttagttaagtttcctcttagtgctatcaaaaccagggtcacccattttcccttgtatcctggacctttgcctggcatttgatgtgatgatactacagctgttagcctccccaacactgttgctgccataccagaagtgtagtggcaggtgggggagacttgtgagtagcaggactctgtcataaaaaatgttagagaacttaaatatcctcttaagttctgagttttctttgcataatcagaaatgtattctcttgctatttttacaacaaacctttaaaaagtttcttaaactaacaataataattaagaaatgctttttccctgtatcacctttcagattaagacatcaaataatattgaaaattgtggctatagaatatagtttgttgttgttgttgttgttgttgtttttgagatggaatcttgctctgttgcccaggctggagtgcagtggcacaatctcggctcattacaagccccacctcccgggttcacgccattctcctgcctcagcctccaaagtagctgggactacaggcacccgccaccatgcccagctaattttttgtgtttttagtagagacggggtttcaccatgttagccaggatggtctcgatctcctgacctcgtgacccgctggccttggcctcccaaagtgctgggattacaggtgtgagccaccggcgcccggccagaaagtagttgttttaaaacacttggaaaagtatagtactgtagacatgtaacaaaattgcacttgtgccctttacatttatataaacatttttaaaagtatttaagttacattttgatctttaccaaaatttactcttcaattcaagggttgtttctgtcttgtacaaaattgtattgcatagctctcttttttttttcttaaactaccaaagcagaaaggagttatctagtcttagatccattttgaactatgaaaagataaacggtattttgacacttacctacattagttaaaagtgattttgcctattaaaactttaagaaagatccaaattattattattattattattatttttttttttttgcgacgagtctcgctctgccgcctaggccgcagtgcagtggcatgatcttggctcactgcaagctctgcttcccgggttcacgccattctcctgcctcagcctcctgtgtagctgggactacaggcgcccgccaccacgcccggctaagtttttttatttttagtagaaatgtggtttcaccatgttagccaggatggtctggatctcctgacctcgtgatccacccgcctgggcctcccaaagtgctgggattacaggcgtgagccatcgtgaacggcccaaatgattcttaattttatgtctcatttgtttgaatcattgcttcgttacccagcaaaataaaacaaattaatttatataatttttattaaagcctatcaaaattatggaataggcttttcttttctccccccccccccccttttttttttttgagatgaagtctcgctcttgtcccccaggctggagtgcaatggtgcggtcttggctcactgcaaccttcggctcctgggttcaagcgattctcctgcctcagcctcccgagtagctgggattacgggctcctgccaccacacccggctaatattttttgtatttttagtagagatggggtttcgccatgttggccaggatggtctcaaactcctgacctcaggtgatccgcccacctcagcctcccaaagtgctgggattacaggcgtgagccaccgtgcccggccagaataagcttttcttaaatcctaattacttaaactcttaaaaaaattttttttctggctgggcacagtggcccagagattacaggcgcccgccaccatgtccagctaatttttgtatttttagtagagttggggttttactgtgttggccaggctggtctccatctcctgacctgaagtgatccacccgccttggccttttaaagtgctgggattacaggcgtgagccaccgcgcctggtccccaggccattctttctattctaagtgtctagtctagtactggcattgtagtaggcatccattaagcttttttttgaactagatgatgatcaatatgaagtttttttattatgacattcttactaattaagtgcttattcttagtaattttctttgtcacgctttcaggactacaggaatatgtggaagctgtctcttttcaacacttcatcaaaacacgatcattaattagtatggatgaaattaataaacaattgatatttacgactgaagacaatgggaaagaaaataaaactgtgagaatttaaaatttatttcacatttgttatataatttatgtaacagtatgacgattctagtagatttactggcttatgctaagattgagatgggaatgttctttctaaagtatggttttgtagagtctcaactaggaaatggtctttttaaatatttcagttagtggatagaacaagaacaactctgggcatattgggaaagtaatgctctttacctaaagcattatggagtgcttactgtaagtcctcttttggttttactctctatttttcacttgccctttgtaagcactgtcttatttaatccttttattaaccatatgtggtaagcattattactctcattttacagagaaagaaacagacttttagagaggttaagtaacttgccagaagccacaactaaaaagtgtggcagagctaagatttgaagttaggtattttgaatccaagcctgtgcccttgtccactctgccagcgcttctcacagtgtgctacagggatcccttgcatcaggtacctacctcaaagggttgttttaaaggatttgacttaaaggttattaattaggcaatatacagcagcacctgacacgtaatatacattatatacagcacctgacacggaagtgctcagtagtttgccattataaagtagtttttatatagtgagagctgttaatcatttactcaattcataatgcttatatctgaaatttatgtagcttttctgaattaagaaaaactttgcagtttgacttttaaacaaatactatttttttccttctgggtttcaagatataacaggcagtaaggtaagctgtattgactatttgatactttctgagataccagtacacttaaaattaaatattttaaaataatttatattatttaaataattgtttaaatattaaattattaaattattaatttaatttactaaatattaaatatttaattattttaaaaattttctttattttttcttttaaaaattatttttaaaaacaccatatattaaggataggtaggcaggagatggaagacactgtagaaataatattttcttgaatatcaactaaaatattaatacaaatgagactaatttggcatgacaggtataacttactttaaggaagccatgtattaactttaagttatatgaagtgtattaaggaggaaatttattttgagaagtaaaatttcttcatattttttattcatatagtgtagactgaattacacaaagaagtaaagtaggtctatttgaccctgcttctcacgtgatattagggaagttaccacactttcctttaaagttctctgtgtatcaaaatgaaaatattggggaaaaggccagaaaattgagagtcaaagtactgttttcaggacttaggtaccagattattttaagattatggggctataatattcatatacatgtttcaaattgtataagactatgttcataaataagttttagtgctaaagatgcttggtgctgaaatttctgggaatttgattgggaaaggtattttgctctgacttgcctgttgagaatattgtcaaaactatttaatttttattttaaaaagttttgtgaaaaatttcaaacatgcagaaaaatagaatggaaacattagtgccactaactagctatcatattcccatagctcaacgtcatattacctgtgatgtttctcggacctcatttctcatgctaaatgatgaggacgttgcaccaaatggtctctgcagagtccaaacagtgctaggattcaagtattagatacatagcaaagagtgatcttaataaagctgtctcccttgtctcagcttatatttatgtaacttcctttaaactttactcaaaagaattatctcattagttcctcaaatgcacaattcttacctgtatgcctttgtagttcccactacctaaaatgtcctttgatgtaactgcaacttcacctacccttttatacataccgtcttttaataacaatttaggcatcgtctctaccagaaagaattcagtagagggaaattgatgtggagagagatttcatgatgatatcatgatagcagctagcatttgttgaatatttactttgtgttgggcattatgccaagaacttggtaaatgttctcatttaacccttaaaataaacctctgaggtaggtactgttatcccattttacagatgaggaaactgaggtttagagagatgaaataacttgcccaagggcatacaccttatgaagcaaggtcctggaagaggtgggaggagatgggtcaaggtcatttggaagagttaacctcaaacaagaggagggacaactcatcatctgagactggaggatagaaggtaaagatgggtgtggatataaattttttttttttttttttttggtagggataaaggcagttgtgagaaattgtgctaggtaagctggcaaatgaccaggtcactgaaattgggcaaggttgtctactgaaagtgaagaggtttgggatttgagtagagccctgaggagagtggtgaaaggtttgaaattgtgtttgaagaggctggaaagagaaccatctaatgataagtaaaaggattggagagtaatttgtagcggtacagactctgcagttgtgattaccatttttttttaactcagtgagtggtactcagccacctgaataaaggactaatgagtatattttagtattgattgaggattctgtttttgctgggtaggtgcagtagaaaatatagcagtctaagggaattgaggatgcagtgagagaataataaattgtgatggtgagtgctgaatagggaaagacaagaagccagaaaaagactgagcttcttaggaaaacattaatggatcacaaacttggagggctgtatggtttttcatttaagaaagtaattgtcgtgcaataaagttattaagccttgttcaagaatatttttattttgtacatcaagtggagttggaaatagttggtttcataatgatatatttcaaaagtatcttgaagtcatctggttcatttcactacccagggcacacattcctcctgtaacatcccaagtggttattaagcaaaacagatttattttatttagaaaaaattagtatgactgatttgctattgattttgtacttctataataaatgtgatacatgctatattcactctttttcacagtgttctttcttgtgtgtgtgtgtgtgtgtttttgttttgttttgtttttttaccagccctcctctgatgcacaggataagcagtttggtacttggagactgagagtcacacctgtcgattaccttctgggagtggctgacttaactggagaattgatgcggatgtgtattaacagtgtggggaatggggacattgataccccctttgaagtgagccagtttttacgtcaggtttatgatgggttttcattcattggcaacactggaccttacgaggtttctaagaagctgtataccttgaaacaaagtttggccaaagtggagaatgcttgttatgccttgaaagtcagagggtcagaaattccaaaacatatgttggcagatgtgttttcagttaaaacagaaatgatagatcaagaagagggcatttcttagaatctaacgttactcagttactaattcttttgagaactcctaagagaccaatttgtaagacttatttagtatttcatttaactttattgtggcttttacatagaaacatattcagttgtacttgttttaaattgtatacaagctgtacataaaattagccaaatgaatcatttcttatatcttattcatgaaagtttgcatacagatgtttgcatatatgcctttttgaatttttgctggttaacctttatcatttatctttgtaatgtgaacatgcttcagagtgtaccttttgccataacctattttaatttactttttctgaagtttggagtgataatttttagtggaagcaatttgtaatttaagttggtagttatattatatatagaaaagattttttagttaaacttctggacatgagcgtcctgtttaaatttcttgttaatatcgtgccaagcctcaaaaataggcttattccatggaacaagaattaaaaatgaataagctatcaatatataatttaagtacaagtttaggctgggcgtggtggctcacgcctgtaatcccagcactttgggaggccgaggtaggcagatcacgaggtcaagagatcaagaccagcctgaccaacgtggcgaaacctcgtctctactagaaatacaaaaattagctggatatggtggtatgtgcctgtaatcccagctacttgggaggctgaggcaggagactcgcttgaacctgggaggcagaggttgcagtgagccgagattgcgccactgcactccagcctgggtaacagagcaagactccatctcaaaaaaagaaagaaagaaaaaagaaagtacaagtttataaagtattatagtgaaaaattcgcattctggctgattttaagccatttaaaatttatataaaacaaccttccataaaaatttgacaggtgcccagatgttgctttctccatttattttttgtttttttttaatcacagtaggtctgatagagaattggagctaaattataatatttttgttggtaaagttgagttatatacttgtacatacaatggaaatgcttttagtagtgattatttagcaatttttgtttttgttatattaggcatgtttggaggctttcctattctagcatttaaatttaaattttattaaaattaaataatttaaatctagcatttaaatttaaataatttaagtctagcatttacttttaaataattataatgaagttttgaaatactaagttaatccagacctttagttgtcccatggtgttaataaagttgccaaagaagatgtattatgaacaattcagcaataagacaattgtcaacacagttgagaataacaatggtaatcgttagtaatatttagaattggaatttgcctactgaaatagttatagatgattacttgtgatgtgaaactgaattgagcatgacaaccagacatttccagttggttttgtaagttttgagaatctagatactgggttttattttttgaaagattagctctgtttgtaagggctgattccttgaaaatgtaattttccagaaaaacacctaaagaaaataaaacatggacatgcctagtaaattctgtttttttgtttgttcgtgttagtgatggtgggttttttggttttgcaactcacctgtagtcaactcactacaggtgagttggtgccattgctactgatatatctccacagttcatgtcatactaatactgtgggtgttacgccaact

SEQ ID NO: 23461 - DNA, 1357 bp, Homo Sapiens
ggaattcggcacgaggagaggtcgggtcacagccagcagctatgtctgacataaatcttgactgggttgacaggcgtcagttgcagcgcttggaggaaatgctgattgttgtggatgagaatgataaggttattggtgccgacaccaagaggaattgccatctgaacgaaaacattgagaaagggctgctgcaccgagccttcagcgttgtcttgtttaacaccaagaatcgaatcctgatacagcagaggtcggacacgaaagtcacgtttcctgggtattttaccgactcctgtagtagccacccattatacaacccagcagaactggaagaaaaggatgccatcggagtgaggagggcagcccagaggcgtctgcaagcagagctgggaattcctggggaacagatttctccagaggacattgtgttcatgacaatctatcaccacaaggcaaaatcagacagaatttggggagagcatgaaatttgttaccttctgcttgtgaggaaaaacgtcactctgaacccggatcccagtgaaacgaaaagcatcctctacctgtcccaggaggagctgtgggagctgctggagagggaggcgaggggtgaagtcaaagtcaccccctggctaagaaccattgccgagaggtttctgtaccggtggtggcctcacctggatgacgtgaccccgtttgtggagcttcacaaaatacacagagtgtgagaggccagggaggtcggagtcagccatgtgtaatgccctcagtgcaggcagacgcaccattgaggcaatgatacacccttctccaaaaaacagggcaaaaggggcacttgattgcccatcatgtataaatcacttatttcaacccttttcatcaactttgtcatatcttcattttcccttttccttatttccatatttctcatctgcctggttgcagggaggaaatttaacatttcctttgtcccaatttccattttataagcacttgtttgattaacagcagctgatcctgaaagtcttggggagatcttgagagtcctgaagcaggcagactagcctggctggaccatgaggctgtctccccacagctttatccaagcctccaaggtcaggatgggatctctgtatcatgtttttctttttaaatcacttatttcagagtgcaacacaaggctgcatttttaaaaaaaaagacacattcaatcttgcatcctaatacaagcagtacggaagatgcgtatgatctcagccaagtgactcgacgtttatccacttctgttcatttgatcgtttcagtaatatgcttacaaataaagacatacttgctttaaaacaaaaaaaaaaaaaaaaaa

SEQ ID NO: 23462 - DNA, 1171 bp, Homo Sapiens
gacactaagtgaagcttctccattctgtaagctttccgggaacatccaaggcaagactggcacccagcacagcagtgactgaccacataccccactctccaggacccatggagtccttcagctcaaagagcctggcactgcaagcagagaagaagctactgagtaagatggcgggtcgctctgtggctcatctcttcatagatgagacaagcagtgaggtgctagatgagctctaccgtgtgtccaaggagtacacgcacagccggccccaggcccagcgcgtgatcaaggacctgatcaaagtggccatcaaggtggctgtgctgcaccgcaatggctcctttggccccagtgagctggccctggctacccgctttcgccagaagctgcggcagggtgccatgacggcacttagctttggtgaggtagacttcaccttcgaggctgctgttctgctggcctgctgaccgagtgccgggatgtgctgctagagttggtggaacaccacctcacgcccaagtcacatggccgcatccgccacgtgtttgatcacttctctgacccaggtctgctcacggccctctatgggcctgacttcactcagcaccttggcaagatctgtgacggactcaggaagctgctagacgaagggaagctctgagagccctgagcctagcacattccaccttgacaaaatggttgactgagaaaacacagataatgggcttcctaaccctgctcacctggcactaacacttttcaatcttcaggcttcattccttcccaagagtgcttttgactctgagaccagcccacccccaaacagctagtggagaaggagcaatgctgaggggtgaggcctctctcccactccagccccaggacaggaaacagaactgcctgaaaaaggtgaagtgaaacttggatctctatttctcccataagggacttctgaaacagggaagccccctcccatgtgaaccaaggaaaggagcacagcccagagaacccctttggggatactaaagacagaagaggggaaggtggcccttagagacagagcttggacagatccagaggctctgttccagagtgcaggaagaaggggctagggcaggggagattctcataggggaaataaaactactaaaatatgaaaaaaaaaaaaaaa

SEQ ID NO: 23463 - DNA, 1903 bp, Homo Sapiens
aagccctgaagggtcaaaagaaatacaaaagcaaaggctattttctttttttttttctttctttcattccttccttcctctgtttctttctttcttcctttcatttttttttcttttttaagagcgagcggctctgcggtggcggtttggggtgggcgccgcgaggtgaggtcgtctcgcctcccgcgcgccggtagattggttgtttcattatggatggaggggatgatggtaaccttattatcaaaaagaggtttgtgtctgaggcagaactagatgaacggcgcaaaaggaggcaagaagaatgggagaaagttcgaaaacctgaagatccagaagaatgtccagaggaggtttatgaccctcgatctctatatgaaaggctacaggaacagaaggacaggaagcagcaggagtacgaggaacagttcaaattcaaaaacatggtaagaggcttagatgaagatgagaccaacttccttgatgaggtttctcgacagcaggaactaatagaaaagcaacgaagagaagaagaactgaaagaactgaaggaatacagaaataacctcaagaaggttggaatttctcaagagaacaagaaggaagtggaaaagaaactgactgtgaagcctatagaaaccaagaacaagttctcccaggcgaagctgttggcaggagctgtgaagcataagagctcagagagtggcaacagtgtgaaaagactgaaaccggaccctgagccagatgacaagaatcaagagccctcatcctgcaagtctctcggaaacacctccctgagtggcccctccatccactgcccctctgctgcagtatgtatcggcatcctcccaggcctgggtgcctactctgggagcagcgactccgagtccagctcagacagcgaaggcaccatcaatgccaccggaaagattgtctcctccatcttccgaaccaacaccttcctcgaggccccctagtttctccgtccctacacagggagctcctccccaagggtagatcggaccgttcatgctgcctataggcattatgtccctcaaaaaaaaactcctttgcctgcatcctgtgtacaacatgacatttttaaccaatccaatctaaaaatgtgccagaatccacctgtggcccgaatcgtgtttggttcctctttctactccactgcagatgaccaaacctgtcccgctgccactttcctcactgatattgggaggagggcaaggcccagccgaagttccactaaaaatgccccaggagaataggcaccggctggcttgccaaagggtttgggttttattgctttctgttttttcttttcccgacagcacaaagaagtaagggcagttattggacaggtgttatttaaacattctattgtaaatgaatgtgttgtttggttctactgcattgtggagcatgcgggggaagagaactgacccaggtaatgaaatggagcccttccctggaactaaccagtccttgatgttgtgtgactaagtaaagatgataaaccccatctgctgggggtgtcacttcacactcggcatgcattgtgaaagctttccatacccttggccattccctctctcctctctctccaaccccatttatgcaggaagggactgctaacaagaacgcttccatctcaaaccttttctctgcctgggaaattattttatgtttgtttttgaaataaaggatttagtttaagattctaaattttagagaaacaaacgtaggccttgtttactaatagccagacatcagaactgcaggtagggtatgttaatgaggatgactttatttctgggcagctcctgggggatcctcaattattgttaaatggaggtgggggccacactttgccattatttgttggaccctttct

SEQ ID NO: 23464 - DNA, 6839 bp, Homo Sapiens
gccccggcccctcctgcccatggcggtggccgagctgtacacgcagtacaacagggtctggattcccgatcctgaagaagtttggaagtctgctgaaatagccaaggactacagagttggtgacaaggtcctgcgactcctgctggaggatggaacggagctggattattctgtcaatccagaatctctgcctccacttcggaatcctgacatcctcgtgggcgagaatgacctcacggctctcagctatcttcacgagcccgcggtgctccacaacctcagaatccgctttgcagaatccaaactcatttacacctacagtggaatcattttggtggccatgaatccttacaagcagttgccaatatacggagatgccatcatccacgcctacagcgggcagaacatgggcgatatggacccacacatatttgccgtggcagaagaggcatacaagcagatggccagaaacaacagaaaccagtccataattgtaagtggggagtcaggtgctggaaagacagtgtcggctcgctatgccatgaggtactttgccaccgtcagcaaatcgggcagcaacgctcacgtggaagacaaggtcctggcatccaatcccatcaccgaggccgttggaaatgccaagaccacccgcaatgacaatagtagtcggtttgggaaatacacagaaatcagttttgatgaacaaaatcaaattataggagccaacatgagcacttacctcctggagaaatccagagttgtctttcaatcggaaaatgaacgaaattaccacattttctatcagctttgtgcatctgcacagcagtcggaatttaaacatcttaaattggggagtgccgaagaatttaattatacaagaatgggaggcaatactgtcattgagggtgtgaatgatcgagctgaaatggtagagactcaaaagaccttcacgcttctgggtttcaaggaggattttcagatggacgtttttaaaatcctggcagccatcctacatctgggcaacgtgcagatcaccgcggtgggcaacgagaggtcctcagttagtgaggatgacagtcacctgaaggtgttctgtgagctcctgggcctggagagtggcagagttgctcagtggctgtgcaatcgcaaaatcgtcacaagctctgagacggtggtaaaacccatgaccaggcctcaggctgtcaacgccagggatgcactggccaaaaagatctatgctcacctgttcgacttcattgtggagagaattaaccaagcgttgcagttttcaggcaagcagcacacttttattggtgttttggacatttatggttttgaaacctttgatgtgaacagctttgaacaattttgcatcaattacgctaatgaaaaactgcaacaacagtttaacatgcatgtcttcaaactggaacaagaagaatacatgaaggaagatataccttggacgctgatagatttttatgacaatcaaccagttattgacctgattgaagcaaaaatgggaattctggagttactggatgaagaatgtttgttaccacatggaactgatgaaaactggcctcaaaagctgtataataattttgtcaacaggaaccctttgtttgaaaagcctagaatgtcaaacacatcctttgtcatccagcactttgctgataaggtagagtataaatgtgaaggtttcctggagaaaaacagagacaccgtctatgacatgctggttgaaatcctgagagcaagcaagtttcatctctgtgccaacttttttcaagaaaatccaactcctccttctccttttggttcaatgattacagttaaatctgcaaagcaagtcatcaagccaaacagcaagcatttccgaaccacagttgggagcaagttccgcagctctctgtacttgctcatggagaccctcaatgcgacgacgccccactacgttcgatgcatcaagccaaatgatgagaagttaccctttgaatttgactccaaaagaattgttcagcagctgcgagcctgcggcgttttagaaacgattcgcattagtgcacagagctacccttccaggtggacatacatcgagttctacagtcgctacggcattctcatgaccaagcaagagctttccttcagcgataaaaaggaggtgtgcaaggtggttttacacagactcatccaggattctaatcagtaccagtttggtaaaaccaaaattttcttcagagcaggacaagtggcttatttagagaaacttcgattggataaactgaggcagagttgtgttatggtacaaaagcacatgcgtggctggctccagaggaaaaaattcctccgagagagacgagccgccctgataatccagcagtacttccggggtcagcaaactgtgaggaaagctattactgcagtggccttaaaagaagcttgggcagccataatcattcagaagcactgccgtgggtatcttgttcgcagcctgtatcagttgattcgcatggccaccatcacaatgcaggcctacagccgaggattcctggcaaggaggaggtatcgaaagatgctggaggaacataaggctgtgatcctacagaaatacgcacgggcgtggctggccagacgcagattccagagtatccgacgattcgtgcttaatattcagcttacttacagggtccagcgtttgcagaaaaagctggaagatcagaacaaagaaaaccatgggctggtggagaagctgactagcctggctgctcttcgagctggggatgtggaaaagattcagaagctggaagcagaactagaaaaagcagccactcacaggcgaaattacgaggagaaggggaagagatacagggatgctgtggaagagaaattggcaaagcttcagaagcataattcagaactggaaacacagaaagaacaaatacagctgaagcttcaagagaagactgaagagttaaaagaaaaaatggacaacctcaccaagcagctctttgatgatgtacaaaaggaagaacggcaaagaatgcttcttgaaaaaagttttgaactgaaaacacaagactatgagaagcagattcagtctttgaaagaagaaattaaagctctcaaggatgagaagatgcaactccaacacctggtggagggggagcacgtcacttctgatggcttgaaggcggaagtggcccgcctgagcaagcaggtcaagacaatctctgagttcgaaaaagagatagaactacttcaggcacagaagatagatgtggagaaacatgtgcagtcacaaaaacgggaaatgagagaaaagatgtcagagatcaccaaacaacttctcgaaagctatgacattgaagatgtaagaagcaggctctctgtggaagatctggaacatttaaatgaggatggagaactttggtttgcttatgaaggactaaagaaagcaacacgtgttttggagagccatttccagtctcagaaggattgctatgaaaaggagattgaagctttgaacttcaaagtggtgcatctcagtcaagaaatcaaccacctgcagaagttattcagagaagaaaatgacatcaatgaaagcatccgtcatgaagttaccaggctaacatcagagaacatgatgatcccagactttaaacagcaaatttcagaattggagaaacagaagcaagatcttgaaatccgcctgaatgaacaagctgagaaaatgaaaggaaaactagaagaattgtctaatcagttacatcgcagtcaagaggaggaaggaacacaaagaaaggccttggaagcccaaaatgaaatacataccaaagagaaggagaagctgattgataagattcaagaaatgcaggaggccagtgaccacttgaagaaacaatttgaaactgaaagtgaagtcaagtgtaacttccggcaggaagcatcccggctcactttggaaaacagggatcttgaagaagaattagacatgaaagacagagtgattaaaaagctacaagatcaagtcaagacactaagcaagacaattggaaaagccaatgatgtgcactcgtcctcaggacccaaggagtaccttggaatgctgcaatacaagagagaagacgaggccaagctcattcagaacctcattcttgacttgaagccccgtggcgtggtggtgaacatgatccccgggctgccggctcatatcctgttcatgtgtgtgcgctacgcagactctctgaatgatgccaacatgctgaagtccctcatgaacagcaccattaatggcatcaagcaggtggttaaggaacatttagaagactttgaaatgctgtccttttggctttccaacacttgtcattttctcaattgcctgaagcagtacagcggagaagaggaattcatgaagcataatagtccacagcagaataagaattgcttgaacaattttgacctttcagaatacagacagattctcagtgatgtggctatacgaatatatcatcaatttattatcataatggaaaagaatatccaaccgataatagttccgggaatgctggagtatgagagcctgcagggcatttccggcctgaagcccacaggcttccggaagcgctcctctagcatagacgacacggacggctacaccatgacctccgtcctgcaacagctgagctacttttacaccaccatgtgccagaacggcctggaccccgagcttgtgaggcaggcggtgaagcagctcttcttcttgatcggggcggtcacgctgaacagcctcttcctgcgcaaggacatgtgctcctgcagaaaagggatgcagatcaggtgcaatatcagctacttagaagaatggcttaaagataagaacttgcagaacagcttagcaaaggaaactttggagcccctctctcaggcagcctggttgcttcaggtcaagaagaccacagacagtgatgccaaggagatctacgaacgctgcacctcactgtctgctgtgcagatcataaagatccttaattcatacacacctatagatgactttgagaagagagtgactccatcctttgttcgcaaagtacaggctctcctaaatagccgggaggattcatcacagctgatgttggataccaaatatctctttcaagtcacatttccttttaccccctctccacatgctctggaaatgattcagatccccagcagtttcaagctaggctttctgaataggttatagcaggagaaaaagtcaatgcactttttcttcaaaagctaagtgaaggttcaatatgagggatgtgttttattaattggcagtggaaattgggaatgtgatttaaggaagaaaacagacttttgctcaaatggaccacatcatctctcactcacagtgacaatgctgctcctgtaattttgtaagaattcacacacaccagctgtatttggaaaagccatgtctcactctcgaatctcagctggttttcactgaaattcctggagggctcatattttcttccacgtgcctcttgatctgttctgtcttgtggcagggctctaccaggagggagtgagatctggggacacagtggcttccaagttttctaaggttcatgtgaaacctgagtacatttacaaagctgcaagtggattctagtgctgagtcttccaggaaaaaatcccgtttggccaccgtgacctgccaaaagttctcttgccccatgcctgctggggacagaaggttttcatgaactctttttactgaaaatgccctgcatttaaaaatgtttattttagacccttctaaatttttttttttttttgagactccggagtctcgctctatcgccaggctggagtgtagtggcatgatctcggcttattgcaacctccgcttcctgggttcaaacaattctcctgcctcagcctcctgagtagctgggactacaggcacctgccaccacgcccagctaatttttgtatttttagtggagacaggtttcaccatgttggccaggatggcctcgatctcttgacctcgtgatccgcccacctcagcctcccaaagtgctaggattacaggcgtgtgccaccgcgcctggctgacccttttaatttttaagagtgttcaatccgagatgaatcatttgaagtatttttatatgtatatctatttaaaactaatatattattaaagcttaattgccatgccgtttatcttctctgaaagaacttcaaatcttacctgccaacatattcaccataatttttttattttttaatacctttcatacaataacttttttaaaacaacctcagattgaaaaagcaacctaaattactttcgctctctaatcagcatttcaatgtatttatttttaaattttctcaaaaagtaactaaaaaattgtgtcggaccctacttttgagaaatttacgtttcccaagttttatgggaactggctattccttgtcccggcacaccttctcattccttcctttcagagcctaaaacctcatttgataagcactcctagtctctggcctgtggatccagtgctattctgtcaccaacctaagaatcccaattgcaccttctgtttctgacagtcacaggtgacagctgtgattctataatacagactggtgtcttagaggtaggaataatacatgattatgaagcatcaccctgctaatacataataatgtctttttatattataagtgattgagtttagttcatttcaatacattgtacatgaaaaaatgaaaagtagaactttgtaatactttaatcaataaaattaattaccaaaaaaaaaaaaaaaaaa

SEQ ID NO: 23465 - DNA, 2427 bp, Homo Sapiens
tgtttcatctttattcattatcctttgttctttaaaatctgatatattggcataaaagtaattgtacatatatatatgaatgtgatttattttcctttacatctttttgttgtgtacagcagggcatatacttctcttgtcttggttggatgcacaaatctgtgtgcagtgctttttgcccgttgcctagacgatcacttggtttctctgaggatgtctggttctcgtaaagagtttgatgtgaaacagattttgaaaatcagatggaggtggtttggtcatcaagcatcatctcctaattctacagttgacagccagcagggagaattttggaaccgaggacagactggagcaaacggtgggagaaagtttttagatccatgtagcctacaattgcctttggcttcaattggttaccgaaggtccagccaactggattttcagaattcaccttcttggccaatggcatccacctctgaagtccctgcatttgagtttacagcagaagattgtggcggtgcacattggctggatagaccagaagtggatgatggcactagtgaagaagaaaatgaatctgattccagttcatgcaggacttccaatagtagtcagacattatcatcctgtcatactatggagccatgtacatcagatgaatttttccaagcccttaatcatgccgagcaaacatttaaaaaaatggaaaactatttgagacataaacagttgtgtgatgtaattttagtcgctggtgatcgcagaattccagctcacagattggtgctctcctctgtctcagactattttgctgccatgtttactaatgatgtcagagaggcaagacaagaagaaataaaaatggaaggtgtagaaccaaattcgttgtggtccttgatccagtatgcttatacaggccgccttgaattaaaagaagataatattgagtgcctgttatctacagcttgccttcttcagctttcacaggttgtagaagcatgctgtaagtttttaatgaaacagcttcatccatccaactgtcttggaattcgttcttttgctgatgcccaaggttgtacagatttgcataaagtggctcacaattatactatggagcatttcatggaagtaatcagaaaccaggaatttgtattattaccagccagcgaaattgcaaagctcttggctagtgatgacatgaacattcctaatgaggagacaatattgaatgcacttcttacttgggtccgtcatgatttggaacagagacggaaagatctaagtaaacttttggcttatattaggctacctcttcttgcaccacagttcctggcagacatggaaaataatgtactttttcgggatgatatagaatgtcggaaactcattatggaagcaatgaagtaccatttattaccagagagacgacccatgttacaaagtcctcggacaaaacctaggaagtcaactgttggtacattatttgcagttgggggaatggattcaacaaaaggagcaacaagcattgaaaagtatgatctccgtacaaatatgtggactccagtagcaaatatgaatgggaggaggctacagttcggtgttgcagtgctagatgacaaactgtatgtggttggaggaagagatggactgaagactttgaatactgtagagtgctacaaccccaaaacaaaaacttggagtgtgatgccacctatgtccacacatagacatggccttggtgtggctgtactggaaggtcccatgtatgccgtaggaggacatgatggctggagctatctgaacacagtggaaagatgggaccctcaggctcgccagtggaattttgttgccactatgtctacccctaggagtacagtaggtgtggcagtactaagtggaaaactttatgcagttggtggtcgtgatggaagttcttgtctcaaatcagtagaatgttttgatcctcatactaataagtggacactgtgtgcacagatgtcaaaaaggagaggtggcgtaggagtgacgacctggaatggactgctgtatgctataggggggcacgatgctcccgcatccaacttgacttccagactctcagactgtgtggaaagatatgatcccaaaacagacatgtggactgcagtagcatccatgagcatcagcagagatgcagtgggggtctgtttacttggtgataagttatatgctgttggggggtatgatggacaggcataccttaataccgtggaggcttatgatccccagacaaatgagtagacccaggtatggcattcatgtttcattattacactgactctctttttattaaaacaattcttatggtacaaaaaaaaaaaaaacatgtcggccgcctcggcctatgtgcggccgccaccgcggtggagggccagcttttgttccaat

SEQ ID NO: 23466 - DNA, 1735 bp, Homo Sapiens
ctggtggaccagctggctcctaaagaggagaggggactaaatcatgtatgcttggttctttcttcccagcttctctcagagcccacccacctttgggttcctgttggacatcgatggagtgcttgtgcggggccacagagtgatccctgctgctctgaaagccttccgaaggctggtgaactcccaggggcagctgcgggtgcccgtggtttttgttacaaatgctgggaacatcttacaacacagcaaagcccaggagctgtcagccctgctggggtgcgaggtggatgcagaccaagttatcctctctcacagccccatgaagctcttctccgagtaccatgagaagcggatgctggtgtctggacaggggcccgtgatggaaaatgcccagggactgggcttccgaaatgtcgtcaccgtggatgagctgcggatggcctttcctctgcttgacatggtggacctggagcggcggctaaagaccacgcccctcccgaggaatgacttcccccgcattgaaggggtgctcctcctaggggagccggtccgctgggagaccagcctgcagctgatcatggatgtcctcctcagcaatgggagccctggggctggcctggcaacacccccctacccccacctccccgtcctagccagcaacatggatctcctgtggatggctgaagccaagatgcccaggtttggacatggcacctttctgctgtgcctggaaaccatttaccagaaagtgacgggcaaggagctgagatacgagggcctgatgggcaaacccagcatcctcacttaccagtatgccgaggacctgatcaggcgacaggcggagaggcggggctgggccgcccccatccggaagctctatgctgtgggtgataaccctatgtctgacgtatacggcgccaacctgttccaccagtacctgcagaaggcaacgcatgatggggcgccagaactaggggccgggggcacacggcagcaacagccctcagcaagccagagctgcatctccatcctggtgtgtacaggcgtctacaatcccaggaacccacagtccacggagcctgtccttggaggaggggagcctccattccacgggcaccgagacttatgcttcagtccagggctcatggaggcctcccacgtggtgaatgacgtgaatgaggctgtgcagctggtcttccgcaaggagggctgggctttggagtgagggcagtgcggtggaggtgagggggtgagcctggacctgtgggcgagtcccattggctgggctctggcctgatcactgggctcaggtcagggcttggttcccttgccacccttcttgctgccccatgagtgtggcattactggtcacttggaagaagacagtgactctttttccctgctgggtagcattttgtatggaacggttggaattttctgggcccagttcccacgtgcctttcgtggcagtctaacctcaggccattctcttcccctgtgtgcctcagtgtccttctcatttcagtagggacttctgaaatgggggaggcagtgtggaatactgtggatgtctgtgcagagcctttgccggcactgaaggcatgcagcctgtcggcagagtgtcttaacaccagatgctactttttactgtattgtagtttattgcccggagatgtggggctttttttttaaataaaataatcataataaatgttcatgatgctgactcttgtga

SEQ ID NO: 23467 - DNA, 3828 bp, Homo Sapiens
cgactccttagagcatggcatggctcagaggtgctggtaaaactgatgggggtttttgctgtccctcccctcagcgccgacaccatgtggatccaggttcggaccatggacgggaggcagacccacacggtggactcgctgtccaggctgaccaaggtggaggagctgaggcggaagatccaggagctgttccacgtggagccaggcctgcagaggctgttctacaggggcaaacagatggaggacggccataccctcttcgactacgaggtccgcctgaatgacaccatccagctcctggtccgccagagcctcgtgctcccccacagcaccaaggagcgggactccgagctctccgacaccgactccggctgctgcctgggccagagtgagtcagacaagtcctccacccacggcgaggcggccgccgagactgacagcaggccagccgatgaggacatgtgggatgagacggaattggggctgtacaaggtcaatgagtacgtcgatgctcgggacacgaacatgggggcgtggtttgaggcgcaggtggtcagggtgacgcggaaggccccctcccgggacgagccctgcagctccacgtccaggccggcgctggaggaggacgtcatttaccacgtgaaatacgacgactacccggagaacggcgtggtccagatgaactccagggacgtccgagcgcgcgcccgcaccatcatcaagtggcaggacctggaggtgggccaggtggtcatgctcaactacaaccccgacaaccccaaggagcggggcttctggtacgacgcggagatctccaggaagcgcgagaccaggacggcgcgggaactctacgccaacgtggtgctgggggatgattctctgaacgactgtcggatcatcttcgtggacgaagtcttcaagattgagcggccgggtgaagggagccccatggttgacaaccccatgagacggaagagcgggccgtcctgcaagcactgcaaggacgacgtgaacagactctgccgggtctgcgcctgccacctgtgcgggggccggcaggaccccgacaagcagctcatgtgcgatgagtgcgacatggccttccacatctactgcctggacccgcccctcagcagtgttcccagcgaggacgagtggtactgccctgagtgccggaatgatgccagcgaggtggtactggcgggagagcggctgagagagagcaagaagaaggcgaagatggcctcggccacatcgtcctcacagcgggactggggcaagggcatggcctgtgtgggccgcaccaaggaatgtaccatcgtcccgtccaaccactacggacccatcccggggatccccgtgggcaccatgtggcggttccgagtccaggtcagcgagtcgggtgtccatcggccccacgtggctggcatacacggccggagcaacgacggagcgtactccctagtcctggcggggggctatgaggatgacgtggaccatgggaattttttcacatacacgggtagtggtggtcgagatctttccggcaacaagaggaccgcggaacagtcttgtgatcagaaactcaccaacaccaacagggcgctggctctcaactgctttgctcccatcaatgaccaagaaggggccgaggccaaggactggcggtcggggaagccggtcagggtggtgcgcaatgtcaagggtggcaagaatagcaagtacgcccccgctgagggcaaccgctacgatggcatctacaaggttgtgaaatactggcccgagaaggggaagtccgggtttctcgtgtggcgctaccttctgcggagggacgatgatgagcctggcccttggacgaaggaggggaaggaccggatcaagaagctggggctgaccatgcagtatccagaaggctacctggaagccctggccaaccgagagcgagagaaggagaacagcaagagggaggaggaggagcagcaggaggggggcttcgcgtcccccaggacgggcaagggcaagtggaagcggaagtcggcaggaggtggcccgagcagggccgggtccccgcgccggacatccaagaaaaccaaggtggagccctacagtctcacggcccagcagagcagcctcatcagagaggacaagagcaacgccaagctgtggaatgaggtcctggcgtcactcaaggaccggccggcgagcggcagcccgttccagttgttcctgagtaaagtggaggagacgttccagtgtatctgctgtcaggagctggtgttccggcccatcacgaccgtgtgccagcacaacgtgtgcaaggactgcctggacagatcctttcgggcacaggtgttcagctgccctgcctgccgctacgacctgggccgcagctatgccatgcaggtgaaccagcctctgcagaccgtcctcaaccagctcttccccggctacggcaatggccggtgatctccaagcacttctcgacaggcgttttgctgaaaacgtgtcggagggctcgttcatcggcactgattttgttcttagtgggcttaacttaaacaggtagtgtttcctccgttccctaaaaaggtttgtcttcctttttttttatttttatttttcaaatctatacattttcaggaatttatgtattctggctaaaagttggacttctcagtattgtgtttagttctttgaaaacataaaagcctgcaatttctcgacaaaacaacacaagattttttaaagatggaatcagaaactacgtggtgtggaggctgttgatgtttctggtgtcaagttctcagaagttgctgccaccaactctttaagaaggcgacaggatcagtccttctctagggttctggcccccaaggtcagagcaagcatcttcctgacagcattttgtcatctaaagtccagtgacatggttccccgtggtggcccgtggcagcccgtggcatggcgtggctcagctgtctgttgaagttgttgcaaggaaaagaggaaacatctcgggcctagttcaaacctttgcctcaaagccatcccccaccagactgcttagcgtctgagatccgcgtgaaaagtcctctgcccacgagagcagggagttggggccacgcagaaatggcctcaaggggactctgctccacgtggggccaggcgtgtgactgacgctgtccgacgaaggcggccacggacggacgccagcacacgaagtcacgtgcaagtgcctttgattcgttccttctttctaaagacgacagtctttgttgttagcactgaattattgaaaatgtcaaccagattctagaaactgcggtcatccagttcttcctgacaccggatgggtgcttgggaaccgtttgagccttatagatcatttacattcaatttttttaactcagcaagtgagaacttacaagagggtttttttttaatttttttttctcttaatgaacacattttctaaatgaattttttttgtagttactgtatatgtaccaagaaagatataacgttagggtttggttgtttttgtttttgtattttttttcttttgaaagggtttgttaatttttctaattttaccaaagtttgcagcctatacctcaataaaacagggatattttaaatcacatacctgcagacaaactggagcaatgttatttttaaagggtttttttcacctccttattcttagattattaatgtattagggaagaatgagacaattttgtgtaggctttttctaaagtccagtactttgtccagattttagattctcagaataaatgtttttcacagattgaaaaaaaaaaaaaa

SEQ ID NO: 23468 - DNA, 2190 bp, Homo Sapiens
atgcctcctcagcttcaagaaactagaatgaaccgaagcattcctgtggaggttgatgaatcagaaccatacccaagtcagttgctgaaaccaatcccagaatattccccggaagaggaatcagaaccacctgctccaaatataaggaacatggcacccaacagcttgtctgcacccacaatgcttcacaattcctccggagacttttctcaagctcactcaaccctgaaacttgcaaatcaccagcggcctgtatcccggcaggtcacctgcctgcgcactcaagttctggaggacagtgaagacagtttctgcaggagacacccaggcctgggcaaagctttcccttctgggtgctctgcagtcagcgagcctgcgtctgagtctgtggttggagccctccctgcagagcatcagttttcatttatggaaaaacgtaatcaatggctggtatctcagctttcagcggcttctcctgacactggccatgactcagacaaatcagaccaaagtttacctaatgcctcagcagactccttgggcggtagccaggagatggtgcaacggccccagcctcacaggaaccgagcaggcctggatctgccaaccatagacacgggatatgattcccagccccaggatgtcctgggcatcaggcagctggaaaggcccctgcccctcacctccgtgtgttacccccaggacctccccagacctctcaggtccagggagttccctcagtttgaacctcagaggtatccagcatgtgcacagatgctgcctcccaatctttccccacatgctccatggaactatcattaccattgtcctggaagtcccgatcaccaggtgccatatggccatgactaccctcgagcagcctaccagcaagtgatccagccggctctgcctgggcagcccctgcctggagccagtgtgagaggcctgcaccctgtgcagaaggttatcctgaattatcccagcccctgggaccacgaagagaggcccgcacagagagactgctcctttccggggcttccaaggcaccaggaccagccacatcaccagccacctaatagagctggtgctcctggggagtccttggagtgccctgcagagctgagaccacaggttccccagcctccgtccccagctgctgtgcctagaccccctagcaaccctccagccagaggaactctaaaaacaagcaatttgccagaagaattgcggaaagtctttatcacttattcgatggacacagctatggaggtggtgaaattcgtgaactttttgttggtaaatggcttccaaactgcaattgacatatttgaggatagaatccgaggcattgatatcattaaatggatggagcgctaccttagggataagaccgtgatgataatcgtagcaatcagccccaaatacaaacaggacgtggaaggcgctgagtcgcagctggacgaggatgagcatggcttacatactaagtacattcatcgaatgatgcagattgagttcataaaacaaggaagcatgaatttcagattcatccctgtgctcttcccaaatgctaagaaggagcatgtgcccacctggcttcagaacactcatgtctacagctggcccaagaataaaaaaaacatcctgctgcggctgctgagagaggaagagtatgtggctcctccacgggggcctctgcccacccttcaggtggttcccttgtgacaccgttcatccccagatcactgaggccaggccatgtttggggccttgttctgacagcattctggctgaggctggtcggtagcactcctggctggtttttttctgttcctccccgagaggccctctggcccccaggaaacctgttgtgcagagctcttccccggagacctccacacaccctggctttgaagtggagtctgtgactgctctgcattctctgcttttaaaaaaaccattgcaggtgccagtgtcccatatgttcctcctgacagtttgatgtgtccattctgggcctctcagtgcttagcaagtagataatgtaagggatgtggcagcaaatggaaatgactacaaacactctcctatcaatcacttcaggctacttttatgagttagccagatgcttgtgtatcctcagaccaaactgattcatgtacaaataataaaatgtttactcttttgtaa

SEQ ID NO: 23469 - DNA, 3337 bp, Homo Sapiens
ccagggccggtgtctccaggagagggccgagcgcacagcagctctaggacctcgcaggcgcctcggcgcggcactcacgtagagcccaaggagcagtccccgacctctcctcggagggccgtgcaggcttccccggcggtccctacctgcgcctccgcccgccagcggcgctggggaaggggaggagcggcccggacgctgcccgccgcgcgcagggagccgcccgccgcaggccttgccgccgcccgcccgcgctctccccgcgagccccggagggcgggtctgcggccgagccagcggcggcggaggggcagcgcagacctctgcggcccgggcgggcgcggcgcgggagtcctgggccgctggcgggcaacgcctctgcccgacctcgctggggaaggctggcgctgctgcccggccggagccaggggcaggctgcgcaaaggtgacttagggagaccttgcgggccgccctgggtcgcgcctcccggatcggctcgcctcggctcgactggaggggaggaggaggagcaggccgagcgcattcgcgctggagcttgcgaggagcgcagggtggagcgcgccagccggggtcctcggatctggcccaggtgaggaattttaaattggaacaagagcaagaaaaaaacaaaatcttgtcagaagcactggagacgctggccactgaacatcatgaattagagcagtctctggtgaaaggctctccacccgccagcatccttagcgaggacgagttctatgatgcgctgtcagattccgagtccgaaaggtccctgagtagattggaagcagtgacagcacgctcctttgaagaggaaggagagcatttgggcagtagaaaacacagaatgtccgaagaaaaagactgtggtggcggagatgctctctccaatggcatcaagaaacacagaacaagtttgccttctcctatgttttccagaaatgacttcagtatctggagcatcctcagaaaatgtattggaatggaactatccaagatcacgatgccagttatatttaatgagcctctgagcttcctacagcgcctaactgaatacatggagcatacttacctcatccacaaggccagttcactctctgatcctgtggaaaggatgcagtgtgtagctgcgtttgctgtatctgctgttgcttctcagtgggaacggactggaaaacctttcaacccactgctgggagagacttatgaattagtgcgagatgaccttggatttagactcatctccgaacaggtcagccatcacccaccaatcagtgcatttcatgctgaaggattaaacaatgacttcatctttcatggctctatctatcccaaactgaaattctgggggaagagtgtagaagcagaacccaaaggaaccatcaccttggagctccttgaacacaatgaggcatatacatggacaaatcccacctgctgtgtgcataatatcattgtgggtaaactgtggatcgaacagtatggcaatgtggaaattataaaccacaagactggggacaaatgtgtgttgaattttaagccatgtggcctttttggtaaggaattacacaaagttgaaggctacattcaagataaaagcaaaaagaagctctgtgccctctatgggaagtggactgaatgtttatacagtgttgaccctgccacgtttgacgcttacaaaaaaaatgataagaaaaatacagaagagaagaagaacagcaaacagatgagcacctctgaggagttggatgaaatgccagtgccggattctgaaagtgtattcattatccctggaagcgttcttctatggcgaatagccccacggcctccaaattctgcccagatgtataattttactagttttgcaatggttttgaatgaagtagacaaagacatggagagtgtgattcccaagacagactgcaggttacggcctgacatcagagccatggaaaatggagagatagatcaagctagtgaagaaaaaaaacgacttgaggaaaaacaaagagcagcccgcaaaaacaggtccaagtcagaagaggactggaagacgaggtggttccatcaaggtcctaatccctacaatggagcacaggactggatttactctggcagctactgggacagaaattacttcaatttgcctgacatttattaaaatgcatacaagtcagggtgtttggctaatctacaaataagtcttaaacctatgtttttaaatttttttcccttggtttctacttatcttttaaaaaaaaaaatgaaaaaacactcatgagataactgcatttcacccaacaaaagcagggtataaggcgatattggtgatgaaagtcttaggaaaaatgcataattttgctataaaatgtacttatttggaatactattttatatagaggtaagagaacactgctggggaatatgctttttatggttgctgttgccatatttactgaaggtttatacctaaatgtaactttagctttatggaactatatagtaatcccaaatcaagttattttgaatatttttatgctgtcatgcttgaatgttttagatgtaacctttgacatatttagaactctcctcctatacaatgtttattctcagatatagaggttatgtcattttataaagacttcattgataagatggcttttattcatactaatcctcccaatgttaccccttccatcttccaagaagaaaaaaaatgcctgaatattcagaatagatatttctgatttgaaaattctaaagaattaaactggaaaagtatttcatttacttagtgctctgaatttacttttacagttttctgcagtcagtatcattaaaatggttaagtttacatttgaactgaaaatatgtataaaatctagcaattcacaaaaatgccctagaaatatagattttaatcaccattacataatgacaaaccttgttaaatgcttccacttccagtggcaaatgccactagggaaagtaagttgcactcatgtaagtatcaaactatataaaaggaggccttgtgcatttcaagtttgcaaagtacctgtgtacttaaaatatgtgtggagacctactgtacagtagttttgcccctttaattggggcacattcatcttaaatcttatagtatttatccacccaaaccccagactgagatactgctcccaggggcctaggtagctgccagtccgtgattttaattgctgtcttgaagttaacaagtgttataatgaaataatctacctgatgctaaataaaggctttagaatgttccccaaaaaaaaaaaaaaaaaaaaaaaa

SEQ ID NO: 23470 - DNA, 5821 bp, Homo Sapiens
tggatccaaagtgactgatgaagggaaggaaatcatgtcaagcgaagccttgaaaaagctgccctgagacggtgtcccgccgaaagaatgttggctcaattaagaaacatcagggagataaattcaacccagtgtgtctaaaaatgactacaaaacgaagtttgtttgtgcggttggtaccatgtcgctgtctacgaggggaagaggagactgtcactactcttgattattctcattgcagcttagaacaagttccgaaagagatttttacttttgaaaaaaccttggaggaactctatttagatgctaatcagattgaagagcttccaaagcaactttttaactgtcagtctttacacaaactgagtttgccagacaatgatttaacaacgttaccagcatccattgcaaaccttattaatctcagggaactggatgtcagcaagaatggaatacaggagtttccagaaaatataaaaaattgtaaagttttgacaattgtggaggccagtgtaaaccctatttccaagctccctgatggattttctcagctgttaaacctaacccagttgtatctgaatgatgcttttcttgagttcttgccagcaaattttggcagattaactaaactccaaatattagagcttagagaaaaccagttaaaaatgttgcctaaaactatgaatagactgacccagctggaaagattggatttgggaagtaacgaattcacggaagtgcctgaagtacttgagcaactaagtggattgaaagagttttggatggatgctaatagactgacttttattccagggtttattggtagtttgaaacagctcacatatttggatgtttctaaaaataatattgaaatggttgaagaaggaatttcaacatgtgaaaaccttcaagacctcctattatcaagcaattcacttcagcagcttcctgagactattggttcgttgaagaatataacaacgcttaaaatagatgaaaaccagttaatgtatctgccagactctataggagggttaatatcagtagaagaactggattgtagtttcaatgaagttgaagctttgccttcatctattgggcagcttactaacttaagaacttttgctgctgatcataattacttacagcagttgcccccagagattggaagctggaaaaatataactgtgctgtttctccattccaataaacttgagacacttccagaggagatgggtgatatgcaaaaattaaaagtcattaatttaagtgataatagattaaagaatttaccctttagctttacaaagctacagcaattgacagctatgtggctctcagataatcagtccaaacccctgatacctcttcaaaaagaaactgattcagagacccagaaaatggtgcttaccaactacatgttccctcaacagccaaggactgaggatgttatgtttatatcagataatgaaagttttaacccttcattgtgggaggaacagaggaaacagcgggctcaagttgcatttgaatgtgatgaagacaaagatgaaagggaggcacctcccagggagggaaatttaaaaagatatccaacaccatacccagatgagcttaagaatatggtcaaaactgttcaaaccattgtacatagattaaaagatgaagagaccaatgaagactcaggaagagatttgaaaccacatgaagatcaacaagatataaataaagatgtgggtgtgaagacctcagaaagtactactacagtaaaaagcaaagttgatgaaagagaaaaatatatgataggaaactctgtacagaagatcagtgaacctgaagctgagattagtcctgggagtttaccagtgactgcaaatatgaaagcctctgagaacttgaagcatattgttaaccatgatgatgtttttgaggaatctgaagaactttcttctgatgaagagatgaaaatggcggagatgcgaccaccattaattgaaacctctattaaccagccaaaagtcgtagcacttagtaataacaaaaaagatgatacaaaggaaacagattctttatcagatgaagttacacacaatagcaatcagaataacagcaattgttcttctccatctcggatgtctgattcagtttctcttaatactgatagtagtcaagacacctcactctgctctccagtgaaacaaactcatattgatattaattccaaaatcaggcaagaagatgaaaattttaacagccttttacaaaatggagatattttaaacagttcaacagaggaaaagttcaaagctcatgataagaaagattttaacctacctgaatatgatttgaatgttgaagagcgattagttctaattgagaaaagtgttgactcaacagccacagctgatgacactcacaaattagatcatatcaatatgaatcttaataaacttataactaatgatacatttcaaccagagatcatggaaagatcaaaaacacaggatattgtgcttggaacaagctttttaagcattaattctaaagaggaaactgagcacttggaaaatggaaacaagtgtcctaatttggaatccgtaaataaggtaaatggacattctgaggaaacttcccagtctcctaataggactgaaccacatgacagtgattgttctgttgacttaggtatttccaaaagcactgaagatctctcccctcagaaaagtggtccagttggatctgttgtgaaatctcatagcataactaatatggagattggagggctaaaaatctatgatattcttagtgataatggacctcagcagccaagtacaaccgttaaaatcacatctgctgttgatggaaaaaatatagtcaggagcaagtctgccacactgttgtatgatcaaccattgcaggtatttactggttcttcctcatcttctgatttaatatcaggaacaaaggcaattttcaagtttgattcaaatcataatcccgaagagccaaatataataagaggccccacaagtggcccacaatctgcacctcaaatatatggtcctccacagtataatatccaatacagtagcagtgctgcagtcaaagacactttgtggcactccaaacaaaatccccaaatagaccatgccagttttcctcctcagctccttcctagatcagagagcacagaaaatcaaagttatgctaaacattctgccaatatgaatttctctaatcataacaatgttcgagctaatactgcataccatttacatcagagacttggcccagcaagacatggggaaatgtgggccatctcaccaaacgaccgacttattcctgcagtaactcgaagtacaatccagcgacaaagtagtgtgtcctccacagcctctgttaatcttggtgatccaggctctacaaggcgggctcagattcctgaaggagattatttatcatacagagagttccactcagcgggaagaactcctccaatgatgccaggatcacagagacccctttctgcacgaacatacagcatagatggtccaaatgcatcaagacctcagagtgctcgaccctctattaatgaaataccagagagaactatgtcagttagtgatttcaattattcacggactagtccttcaaaaagaccaaatgcaagggttggttctgagcattctttattagatcctccaggaaaaagtaaagttcctcgtgactggagagaacaagtacttcgacatattgaagccaaaaagttagaaaagaagcatccccagacatccagttcaggagatccttgtcaagatggtatattcatttcaggacagcagaactactcatcagccacacttagtcacaaagatgttcctccagacagcttgatgaaaatgcctttgagtaatggacagatgggccagcctctcaggcctcaggcaaattatagtcaaatacatcacccccctcaggcatctgtggcaaggcatccctctagagaacaactaattgattacttgatgctgaaagtggcccaccagcctccatatacacagccccattgttctcctagacaaggccatgaactggcaaaacaagagattcgagtgagggttgaaaaggatccagaacttggatttagcatatcaggtggtgtcgggggtagaggaaacccattcagacctgatgatgatggtatatttgttacaagggtacaacctgaaggaccagcatcaaaattactgcagccaggtgataaaattattcaggctaatggctacagttttataaatattgaacatggacaagcagtgtccttgctaaaaactttccagaatacagttgaactcatcattgtacgagaagtttcctcataagcactgtggacaaaaaaagcggggaagacagcaagatttattggaagatacttacaggggaaattaatattttgactatttttatatataaagaagaactcaaaaaattatgttcaaatttgtacattaatgaaataatggaacttgtggttagagggaaagaaccactgtacagaatataaaggagactgttgaattcataccatataaaacttgttaggtttttaaacatagcaatcaaggctacaaaaacaaacctgtgttgtttttgtatagattgtaggtttatttttggatttcatatacatgactgaactgtgtgcaaggcaatagttagccttgattttagcccagagacagatggcagagctatctctctcatagcttttatgcccttatttttattcaactggtattaatgtttttctcctgaaactactttttttgatgtgggcaagagatttgaagtgttggcttttgctatgtgcatattgaattgaagagtgagtaggtgaaggtggtgctggtgggttcactttccaaggccagactaaaacagttattttctataaaaatctggaagcaaagaatggggatggggagagctacgtggtagtatgtttttattaggagaataatgcaataaaatatgtaatgtcttttttataaagcaaaaaagacaataattgcatttatgagctcggcaggatctgttccttgtcatagccattgactatacatttgctactggtgattcagtttttaattttttagtcacaggaaatttttaactctactgtagatgcatgtccatgcattttctgtgttatggaaatccactgatttttttttttttttcaaatggtggtacttgcaatctgttttataattagtgctccatttaaatctaatttataatttttattttaagcagcaaatgaaacaaaaatggccagttttaagattgtgttgcctgtaacacaaaatgttacgaaggtttaggaaagcctctttgatttttgtttggccttgcattgccttggtaaagtaaaaggaaacagtacacttggagctaggaaaccaaagcaagctttgtgaaactggcacagtgatagagaattgctgtggagagttatagagcaaagggatgggtccttgaggcctgccagtgtgtaaaggtgttcaaataaagggctgtttctacaggtaacattaaatgtgaactcaacacttcctgtgtctttaaagggtttctatgtgtatcagtgtaatagtgttttacccccaactgcctttttttgttcctagttactgtaacaaatatttgatgatagaggtttattaattttgtttatccagaccattaattttatttgtttttgttctatgtaatcaaataaaatttgagtaacatgtaaaaaaaaaaaaaaaaaaaaaaa

SEQ ID NO: 23471 - DNA, 708 bp, Homo Sapiens
gcatttaagttgtttgaaggcatgtattttgaaaaatatctgttacaaatttataatttcaagacaaattgaatcttattttataatacttttggaatttcattaataaggctaaaatttgaggaatataactaattttcagccttaagacatttaagtttggaagtccttgctattcaacagaataacaagaaaacttcagaatgtatcactctcctgaaaagaagatattaataagcccttttatttatggttatagttttatttatagtctcaaaattcctaaagcaatgctacaaccattgaatttgccatattttgtatcagtgctgttaatttgctgttgcctcaagaaaaagtgctttttctccatggatgaggctagaccctaagaagtaattaagtcaatgtaaatcaaatggaagttttcccatgaactaagaatttattagttccctgattagactggaagaagaaaccactatttcatgaaaagcatggaatattatatttattgtcataattaatgaataaaatgatatgaatgaatgtagtgttctttgaattaataaacagtacatctgtgacaatcattttaaccaagctctacttgtgttttttataaaagtggggattttcagaaagcaaccacacaattaccaggttgaatcttgagaaaataatccttgtgccataaaagtatttacg

SEQ ID NO: 23472 - DNA, 8546 bp, Homo Sapiens
acacctgcgcgccggaataattcatgaagaaggggctggatccgtgggtcagagaacacaggaccagtttgccatcccaaggccgaaggcctccctccaacacagttctccaagctctagaaatctctgacacatcttgaccatgagaccacggctggtttttggcaggattcgaggcacaaacccagcagcctcaacctagttcatggaggagcctcgcggggtcctggccaagcaagcccgcccctctggtgggaagagcggcgcctaggtggagggtggctgccgtaggagtggacatgaatgctggctttcagagagaacagcgtttcagttttggtcatcggaagtggtgccttcagcacagaagaagagcgtgatttctcctccaaggccgttgatctccaacccagaactaaaggggagaagagccacccccagcatccagcgtggcatctcttgtgccaggaccagggatgactgggccatggacacagatgtctccaaccttcaaccgtttgcatagcacacgggggactcgtgggggccacctgccactgccagctgaaataatacaatggcaatactgacatccttcatgacgttttcccgacagacattcaggcagaaagtgctggtgcgttttctgtctgcaaagtagagggccatcgctcaccaatagaatagcgtgggccctgatgacctgctccgagtccactcacagccagtgacacttgcaaaaaactcccaaagccgtcttgggtttggctcccacagctcttgaccaatgtggccaaagctggacacctccttgggacactgggattattcataaatgcagcccgccctgactctccctgaatagcatctgaagtctttgtgaaggtcatggatcctgaacaaagtgtcaagggcaccaagaaggctgagggaagtccccggaagcggctgaccaaaggagaggccattcagaccagtgtttcttccagcgtcccatacccaggcagcggcacagctccgacccaagagagccccgcccaagagctcttagccccgcagcccttcccgggcccctcatcagttcttagggaaggctctcaggagaaaacgggccagcagcagaagccccccaaaaggccccccatcgaagcatccgtccacatctcacacgttccgcagcaccctctgacaccagcattcatgtcgcctggcaaacctgagcatctcctggaggggtccacatggcaactggttagccccatgagactcggaccctctggctccttgctggcccctgggctccatcctcagagccagctccttccttcccacgcttccatcattccccccgaggaccttcctggagtccccaaagtcttcgtgcctcgtccttcccaggtctccttgaagcccacagaagaggcacacaagaaggagaggaagccccagaagccaggcaagtacatctgccagtactgcagccggccctgtgccaagcccagcgtgctccagaagcacattcgctcacacacaggtgagaggccctacccctgcggcccctgtggcttctccttcaagaccaagagtaatctctacaagcacaggaagtcccatgcccaccgcatcaaagcaggcctggcctcaggcatgggtggcgagatgtacccacatgggctggagatggagcggatccctggggaagagtttgaggagcccactgagggagaaagcacagattctgaagaggagactagtgccacctctggtcaccctgcagagctctccccaagacccaagcagccccttctctccagcgggctatacagctctgggagccacagttccagccacgaacgctgttccctgtcccagtccagcacagcccagtcactcgaagacccccctccatttgtggaaccctcatctgagcaccccctgagccataaacctgaagacacccacacgattaagcagaagctggccctccgcttaagcgagaggaagaaggtgatcgatgagcaggcgtttctgagcccaggcagcaaagggagtactgagtctgggtatttctctcgctccgagagtgcagagcagcaggtcagccccccaaacaccaacgccaagtcctacgctgagatcatctttggcaagtgtgggcgaataggacagcggaccgccatgctgacagccacctccacccagcccctcctgcccctctccaccgaagacaagcccagcctggtgcctttgtctgtaccccggacgcaggtgatcgagcacatcacgaagctcatcaccatcaacgaggccgtggtggacaccagtgagatcgacagcgtgaagccaaggcggagctcactgtccaggcgcagcagcatggagtccccaaaatccagcctctaccgggagcccctgtcatcccacagtgagaaaaccaagcctgaacaatcactgctgagcctccagcacccgcccagtaccgccccccctgtgcctctcctgagaagccactcaatgccttctgccgcctgcactatcagcaccccccaccaccccttccgaggtagctactccttcgatgaccatatcaccgactccgaagccctgagccgcagcagtcacgtgtttacctcccacccccggatgctgaagccgcagccggcaatcgaattacctttgggaggggaatacagttctgaggagcctggcccaagcagcaaagacacagcctccaagccctcggacgaagtggaacccaaggaaagcgagcttaccaaaaagaccaagaagggtttgaaaacaaaaggggtgatctacgaatgtaacatatgtggtgctcggtacaagaaaagggataactacgaagcccacaaaaaatactactgctcagagcttcagatcgcaaagcccatctctgcaggcacccacacatctccagaagctgaaaagagtcagattgagcatgagccgtggtcccaaatgatgcattacaaactgggaaccaccctggaactcactccactgaggaagaggaggaaagagaagagccttggggacgaggaagagccacctgcctttgagtccacaaaaagtcagtttggcagccccgggccatctgatgctgctcggaaccttcccctggagtccaccaagtcaccagcagaaccaagtaaatcagtgccctccttggagggacccacgggcttccagccaaggactcccaagccagggtccggttcagaatcagggaaggagaggagaacaacgtccaaagaaatttctgtcatccagcacaccagctcctttgagaaatctgattctctcgagcagccgagtggcttggaaggggaagacaaacctctggcccagttcccatcacccccacctgccccacacggacgctctgctcactccctgcagcctaagttggtccgccagcccaacattcaggttcctgagatcctagtaactgaggagcctgaccggccggacacagagccagagccgccccctaaggaacctgagaagactgaggagttccaatggccccagcgcagccagacacttgcccagctcccagctgagaaggctccacccaaaaagaagaggttgcgcctggcagagatggcccaatcatcaggggagtccagcttcgagtcctctgtgcctctgtctcgcagcccgagccaggaaagcaatgtctctttgagtgggtccagccgctcagcctcgtttgagagggatgaccatgggaaagccgaggcccccgatccctcatctgacatgcgccccaaacccctgggcacccacatgttgactgtccccagccaccacccacatgcccgagagatgcggaggtcagcctcagagcagagccccaacgtttcccattctgcccacatgaccgagacacgcagcaaatcctttgactatggcagcttgtccttgacaggcccttctgctccagccccagtggctccaccagccggggaggccccgccagagagaagaaaatgcttcttggtgagaagcccctctctgagcaggcctccagaatctgagttggaggttgcccccaagggaagacaggagagcgaagaaccacagccctcatccagtaaaccctctgccaaaagctcattgtcccagatttcctctgcggccacctcacatggtggacccccgggaggcaagggcccagggcaggacaggcccgcattggggcccactgtgccctacacagaagcactgcaagtgttccaccaccccgttgcccagacacccctgcatgagaagccatacctgcccccaccagtctcccttttctccttccagcatctcgtgcagcatgagccaggacagtctccagaattcttctccacccaggccatgtccagcctcctgtcctcaccatactccatgcccccacttcctccctccttatttcaagccccaccgcttcctctccagcctactgttctgcacccaggccaactccatctcccccagctcatgcctcacccagccaacatccccttcaggcaacccccttccttcctccccatgccatacccgacctcctcagcactgtcttctgggtttttcctgcctctgcaatcccagtttgcacttcagctccctggtgatgtggaaagccatctgccccagatcaaaaccagcctggccccactggcaacaggaagtgctggcctctcccccagccaagagtacagcagtgacatccggctaccccctgtggctcccccagccagctcctcagcacctacatcagctcctccactggccctgcctgcctgtccagacaccatggtgtccctggttgtgcctgtccgtgttcagaccaatatgccgtcctatgggagcgcaatgtacaccaccctttcccagatcttggtcacccagtcccaaggcagctcagcaactgtggcacttcccaagtttgaggaacccccatcaaaggggacgactgtatgtggtgcagatgtgcatgaggttgggcccggcccttctgggttaagtgaagagcaaagcagagctttcccaactccatacctgagagtgcctgtgacattacctgaaagaaaaggcacttccctgtcatcagagagtatcttgagcctggaggggagttcatcaacagcagggggaagcaaacgtgtcctttcaccagctggcagccttgaacttaccatggaaacccagcagcaaaaaagagtgaaggaggaggaggcttccaaggcagatgaaaaacttgagctggtaaaaccatgcagtgtggtccttaccagcaccgaggatgggaagaggccagagaaatcccacttaggcaaccagggccaaggcaggagggagctagaaatgctgtccagcctgtcctcagatccatctgacacaaaggaaattcctcccctccctcaccctgcattgtcccatgggcaagccccaggctcagaagctttgaaggaatatccccagccatctggcaaacctcaccgaagagggttgaccccactgagcgtgaagaaagaagattccaaggaacaacctgatctcccctccttggcacctccgagctctctgcctctgtcagaaacgtcctccagaccagccaagtcacaagaaggtacggactcaaagaaggtactgcagttccccagcctccacacaaccactaatgtcagttggtgctatttaaactacattaagccaaatcacatccagcatgcagataggaggtcctctgtttacgctggttggtgcataagtttgtacaaccccaaccttccgggggtttccactaaagctgctttgtccctcctgaggtctaagcagaaagtgagcaaagagacatacaccatggccacagctccgcatcctgaggcaggaaggcttgtgccatccagctcccgcaagccccgcatgacagaggttcacctcccttcactggtttccccggaaggccagaaagatctagctagagtggagaaggaagaagagaggagaggggagccggaggaggatgctcctgcctcccagagaggggagccggcgaggatcaaaatcttcgaaggagggtacaaatcaaacgaagagtatgtatatgtgcgaggccgcggccgagggaaatatgtttgtgaggagtgtggaattcgctgcaagaagcccagcatgctgaagaaacacatccgcacccacactgacgtccggccctatgtgtgcaagcactgtcactttgcttttaaaaccaaagggaatctgactaagcacatgaagtcgaaggcccacagcaaaaagtgccaagagacaggggtgctggaggagctggaagccgaagaaggaaccagtgacgacctgttccaggactcggaaggacgagagggttcagaggctgtggaggagcaccagttttcggacctggaggactcggactcagactcagacctggacgaagacgaggatgaggatgaggaggagagccaggatgagctgtccagaccatcctcagaggcgcccccgcctggcccaccacatgcactgcgggcagactcctcacccatcctgggccctcagcccccagatgcccccgcctctggcacggaggccacacgaggcagctcggtctcggaagctgagcgcctgacagccagcagctgctccatgtccagccagagcatgccgggcctcccctggctgggaccggcccctctgggctctgtggagaaagacacaggctcagccttgagctacaagcctgtgtccccaagaagaccgtggtccccaagcaaagaagcaggcagccgtccaccactagcccgcaaacactcgctaaccaaaaacgactcatctccccagcgatgctccccggcccgagaaccacaggcctcagccccaagcccacctggcctgcacgtggacccaggaaggggcatgggccctctcccttgtgggtctccaagacttcagctgtctcctctcaccctctgccccctgggaagagaactggcccctcgagcacatgtgctctccaaactcgagggtaccaccgacccaggcctccccagatactcgcccaccaggagatggtctccaggtcaggccgagtcaccaccacggtcagcgccgccagggaagtgggccttggctgggccgggcagcccctcagcgggggagcatggcccaggcttggggctggccccacgggttctcttcccgcccgcgcctctacctcacaagctcctcagcagaagcccagagacctgcgcctccccgtggcagaaggccgagtcccgaagtccctcctgctcacccggccctgctcatcctctctcctcccgacccttctccgccctccatgacttccacggccacatcctggcccggacagaggagaacatcttcagccacctgcctctgcactcccagcacttgacccgtgccccatgtcccttgattcccatcggtgggatccagatggtgcaggcccggccaggagcccaccccaccctgctgccagggcccaccgcagcctgggtcagtggcttctccgggggtggcagcgacctgacaggggcccgggaggcccaggagcgaggccgctggagtcccactgagagctcgtcagcctccgtgtcgcctgtggctaaggtctccaaattcacactctcctcagagctggagggcagggactaccccaaggagagggagaggaccggcggaggcccgggcaggcctcctgactggacaccccatgggaccggggcacctgcagagcccacacccacgcacagcccctgcaccccacccgacaccttgccccggccgccccagggacgccgggcagcgcagtcctggagcccccgcttggagtccccgcgtgcaccggccaaccccgagccttctgccaccccgccgctggaccgcagcagctctgtgggctgcctggcagaggcctctgcccgcttcccagcccggacgaggaacctctccggggaatccaggaccaggcaggactcccccaagccctcaggaagtggggagcccagggcacatccacatcagcctgaggacagggttccccccaacgcttagcctctctccaactgcttcagcatctggcttccagtgtccagcaacagacgtttccagccactttcctcgaatcatcccacttcctcagccccatctgtccctccatccaggagctctcacggccccatctgttgtaccttcccatgtatgcagttacctgtgcctttttctacaccttttgttgcttaaaaagaaacaaaacaaatcacatacatacatttaaaaaaaaaacaacaacccacgaggagtctgaggctgtgaatagtttatggttttggggaaaggctgatggtgaagcctcctgaccctccccgctgtggttggcagccacccaccccagaggctggcagagggaaaggggtacactgagggagaaaggaaaaggaaacttcaaacaatatagaattaaatgtaaaaggcagcactcctgtgtacag

SEQ ID NO: 23473 - DNA, 2832 bp, Homo Sapiens
atgcctgcttctctcgctttgttgcagccccgagccatgatgaagactttgtccagcgggaactgcacgctcagtgtgcccgccaaaaactcataccgcatggtggtgctgggtgcctctcgggtgggcaagagctccatcgtgtctcgcttcctcaatggccgctttgaggaccagtacacacccaccatcgaggacttccaccgtaaggtatacaacatccgcggcgacatgtaccagctcgacatcctggatacctctggcaaccaccccttccccgccatgcgcaggctgtccatcctcacaggggatgtcttcatcctggtgttcagcctggataaccgggagtccttcgatgaggtcaagcgccttcagaagcagatcctggaggtcaagtcctgcctgaagaacaagaccaaggaggcggcggagctgcccatggtcatctgtggcaacaagaacgaccacggcgagctgtgccgccaggtgcccaccaccgaggccgagctgctggtgtcgggcgacgagaactgcgcctacttcgaggtgtcggccaagaagaacaccaacgtggacgagatgttctacgtgctcttcagcatggccaagctgccacacgagatgagccccgccctgcatcgcaagatctccgtgcagtacggtgacgccttccaccccaggcccttctgcatgcgccgcgtcaaggagatggacgcctatggcatggtctcgcccttcgcccgccgccccagcgtcaacagtgacctcaagtacatcaaggccaaggtccttcgggaaggccaggcccgtgagagggacaagtgcaccatccagtgagcgagggatgctggggcggggcttggccagtgccttcagggaggtggccccagatgcccactgtgcgcatctccccaccgaggccccggcagcagtcttgttcacagaccttaggcaccagactggaggcccccgggcgctggcctccgcacattcgtctgccttctcacagctttcctgagtccgcttgtccacagctccttggtggtttcatctcctctgtgggaggacacatctctgcagcctcaagagttaggcagagactcaagttacaccttcctctcctggggttggaagaaatgttgatgccagaggggtgaggattgctgcgtcatatggagcctcctgggacaagcctcaggatgaaaaggacacagaaggccagatgagaaaggtctcctctctcctggcataacacccagcttggtttgggtggcagctgggagaacttctctcccagccctgcaactcttacgctctggttcagctgcctctgcaccccctcccacccccagcacacacacaagttggcccccagctgcgcctgacattgagccagtggactctgtgtctgaagggggcgtggccacacctcctagaccacgcccaccacttagaccacgcccacctcctgaccgcgttcctcagcctcctctcctaggtccctccgcccgacagttgtgctttgttgtggttgcagctgttttcgtgtcatgtatagtagtagaaatggaaatcattgtactgtaaaagcctagtgactccctccttggccaggccctcacccagttcagatccacggcctccacccgggacgccttcctcctctgctcccaaacagggtttccgtggcctgtttgcagctagacattgacctccgccattgagctccacggtttacagacaattgcacaagcgtggggtgggcaggccaggactgcttttttttaatgctcccatttcacagaggataccaccgagactcggaggggacacgatgagcaccaggccccacctttgtcccctagcaaattcagggtacagctccacctagaaccaggctgccctctactgtgctcgttcctcaagcatttattaagcacctactgggtgctgggttcactgtgtcctaggaaaccaagagggtccccagtcctggcctctgcccgcccctgctgccccaccaccttctgcacacacagcggtggggaggcggggaggagcagctgggacccagaactgagcctgggagggatccgacagaaaagctcagggcgggtcttctccttgtgcccgggattgggctatgctgggtaccaccatgtactcaggcatggtgggttttgaacccataaaccaaaggcccttgtcatcagctcttaacaagtatattttgtattttaatctctctaaacatattgaagttttagggccctaaggaaccttagtgatcttctattgggtctttctgaggttcagagagggtaagtaacttcctccaggtcacacagcaagtctgtgggtggcagaagcaagctagcgctgggcattcagtacataccacgatgtgctccctctcttgatgcttggcccctggggccttcagggctttgggacatcttgtcctcaaccctctccctagatcagtctgtgagggtccctgtagatattgtgtacaccatgcccatgtatatacaagtacacacagatgtacacacagatgtacacatgctccagccccagctctgcatacctgcacctgcaccccagccttggcccctgcctgcgtctgtgctcaaagcagcagctccaaccctgcctctgtccccttccccacccactgcctgagccttctgagcagaccaggtaccttggctgcaccggtgtgtggcccgctctcacccaggcacagccccgccaccatggatctccgtgtacactatcaataaaagtgggtttgttacaaaaaaaaaaaaaaaaaaaaaaaaaaaaaaa

SEQ ID NO: 23474 - DNA, 347503 bp, Homo Sapiens
atttttgtctagcttagagtcccgtataattttttccaaataacatgttggtgatgtgatagcacctctttcacaattaacctaaattacctcaattcttcgtgaactgggaagggacgggagggaagggggaggggaaggggaagcgggagagggaagggggcggagctagccggagccgcgagtccattttggggctgtgcttggcgcgtaccgtgcggtccctgtagttggaggacgggcggtcgcgcggcctttcccactagccggaggtcggagataagtacccgccgcccggctcctctcgggaaagcggggtggtcctcgaaccttcagcgagggtggggagttgcccaggtcagcagggatctgcgtgggttgggggggctggcgaaggccgtctgagctccagtccggcagcgcggcagaaaccagcggggcactgtcatgggcctggggaggagcggcctgcggagggcgccggggcagtgtgtctgtggtccagaaaacctgctccgtccggagccttcctggccccgctaccagcgtctccacatcccctagaaaagaaaagacgggtgtgggccttaggttacagcgcgccgccagcgtttggttgcatggcgccgggggagggcgccctaaccgagaagctgcttaatacaaagagctccaggctcctggcggttcaccaggtctaaacagccgggctttatttgtgggggcgattgaaaaaattgagggtcaagattggggtgctgtgcaaataaatgcgttaatactgttctttttcttctttctttgcagtagcctctagttcgttagtcaaaacgtgaaaaaaaagacctgctttgccctgggaaatagtaaccctgccaaatacatcagcttgtaggagacagaggtaaactacaataattttcctgtgttatctttttttttttaaacacccaatttcaataggccctagaaccttccaaaatggaactgtgtgtagaatacgtatgttcccatccactttcattggtggtctttgttctttgcatattttgttaaaacttagaaaaacagaattcacgtttagcaattatttatgtggtatttatcttaaatatagccaaacattcatattacaaaggaagaaaggggcttccacacttttttcctacttttttttcccttctcctatgcttagtgaattgtcaggctgctagggcttgtagaacagggcttgagttttctagagacctttatataataggcactttaaaagcagaatttcatttacataggcactccttctagtagaacttgatggagctgttaaccggctatacttccttcttgcacaatgggagcgtccctatccctccctaaaaatacgttttttttcctttctcccagctggcttactaaacctccctgggaagtcctttcctaaaaccgggctgttctgttcattctatacatttatgataggttatctggccttaattctgtcacagcttttgttcagatatgctcattttcatgacactgctttgtacctgataccttatgtaatatttgttttgccttgccttgaaatcacagttcaagtttagaaccttttcttgcttgatacactgatgctccaaaataacaccttaaatgtgtagagtttgccatatgtaattaaaccttatttatgtttgtatagtttcgtagtttatggaattctcacacatcacacaggagttgagaaattacttttaggcagctagaaagggtaaaagagttctcggtggaattttcctttaataaaaagcagctcctggccggtgactttgggaggctgaggtgggtggatcacttgaggtcaggagttcaagaccagcctgaccaatatggtgaaatcccatctttactaacaatacaaaaattagctgggcgtgggggtgcgtgcacctgtaatcccagctactcgggaggctgaggcagaagaaccacttgaaccgggacgcagaggttgcagtgagccaagatcgcgccactgcactccagactgggcaacagagcgagactctaccaaaaaaaaaaaaaaagcccccaaaccatttattttctaacagaaagcctgaaaagtcaagctgcaagcaaaaatatgcaggctagaagcttttatatgtaaatgtagcctgctgtatctggaagccaggtacattcaatatggggtttctcactcccttttccttgtcaccctatgtgggcgtcttggcgatcactaggtaaaaccacgggtgcaggtgtcatggcggccccaggtagaagctacatttgcataacaaaaaattagggtgggagggccagtctttagacgggctatgtaaatgattcacctggtcaaaccagtcccctgggccctatgtaaatcaccgcctcctcaagcctctgtacaaaatcgattgcgtttcaccccaaacccggagaccctctcttgggtgatatttctcagcgtgaggaacctttccctattaaattttccgctcctaaacccactccttgtgtgtgtccatgtcctgaattctttcttggctcgagacaaccacgggtgtatcccccaggcaatggagccatttcattatgaggtaaatactataaaaatcatttttaaatttttttccaagagatgggattctcaactgtgttccccaggctggtcttgaactgggctcaagtgatcctcctgcttcagccttcagagtagctgggactacaagtgtgtggcaccattcccagatataaaaatcctaattttatgaaggataaaactggtgcttgaacacaggtactcaaaagcaggttctgtgctttccccttcactagagagcctgttaaacctagttggtaaaaactgcaaaattttagaagggattttagagagcttatgattaaaccccttcattttatgaataagaatactgagttcttgagtccctttctagatattgctaaggtctaagaattagaaaactcaggctgtgatgcctagtttgctgtgtacaactgatgagtctccacttcttgagtgctgggggtgtcttagtttttttgactcctaaaattaggtgtttagatgatttctaagatgcttttaagcccagtatttctattcctaccccataacttttattaccatttattgcctatacatatatattggtaagacacagatgcagactaatgttaactgccttaaacttttatattttaaactcgggtaggtatggtaacaagtgtgtcttattgttttttactaagtcctataaaactatggttttatttaaggttaggaactgcatagagaggtggaccactctaatacatcattggttagagttcataaagtgatataaaccctttctagagagaaacctagtcatcttttcaacagccttaaaaatgtccttactgtttgacccagaagtacatttaaaggaattgtctaaggaagtaattagagctgtggagcaagacttttctctataaggtgtttacctaaatgttacaataccaaaaaaacacaacaacccacaaacaaaacaacacagcaacaagaacaaacccataaatgagcaataagaaagcatatccacaacatggactgtcatgtttttctagaacatatcatgatgggggaaaggcatgtaataaaataaggggataggatacaaaattgtattatgctaccagttctgttaaaatgtgtgcacatgcacggacacatgggattggaataaagacaccaaaataatagtagtggtgatttcttgctgatgtgattatgggtggctttttctctctattttctgaattttctataataaaaactaattttataatttaagaagacacaaaagctagttgcatggataacttcggtttcagtatggtgtcaatattttatggttttaattgtggtaagaacatttaacatgagacctatcctctacacagatttctaagtgtacagtacagtggtgttaactatagacatgagcagatctctgaaacttacttttatgtgtcttttataaactatttatcataccttctagaataacagcacctggccgggtgcagtggctcaggcctgtaatcgcagcactttgggaggctgaggtgggcggatcacctgaggtcaggagctcgagaccagcctggccaaaatggtaaaaccctgtctctactaaaaatacaaaaaattagctgggcatggtggcaagtgcctgtaataccagctacttgggaggctaaggcaggagaatcacttgaacccaggaggcggaggttccagtgagccaagatcacaccattgcactccagcctgggtgacaagagcaaaactctgtcccaaaaaaaaaaaaaaaaaaggcaggaaagagtccaggctaaactatggtatggagaagagaatgaaggaaaaggaaaaagtttttcttagtgctctgaactagcgaggtaatgagtgacctggtttatatttctgagaatttcaccttagtctgacaaccctttgtgaactttctgagtaagtgaactttccaagctagtgaacattctgtactagctctattttgccttgtcaggatctctgctagaaatatcttggaaattttaactactgtttattctaggataatgccagaaaaggttggttacttactgtcttatatggacacataggtaacttttatattgtttgcaagagccacataacaattattttagatactatatgtaatatattaattttcatttttagaggtattgaaatctgatatttcttactttgtcctgttttgatcatatatatgccagaggtgctatgtgtaatacattaattttcatttttagagattatatctgaaatctgatctctgtatcttactttgtcctgttttgatcatataagtcaccgggacagtctctaaaagaatgaagagtaataacacattgatacagagtatttaaaataaaaactttgtaaatacttttcatataccttttaaaatagctatacaaatgaggagagaaactagtatgtataagtggtttgtcagaggttacagactgagagccagacaagtatgtcagtctcctcacaggtctggattcagagacttccagtaatacattaaaaaaaaaaatttatgaaagatgaaaccataggctgggcatgatggcttatgcttgtaatcccagcactttgggaggccaaggcaggaagatacttgtggccaggagtttgagtccagcctggccaacatggcgaaaccccgtctctattaaaaacataaaaatgagcctgacgtggtggcaggcacctgtaatctcagctacttgggaggatgaggcaggagaattgcttgaacccaggaagaggaggctgcagtgagacgagatcgcaccattgcactccagcctgggtgacagagcaagactctcaaaaaaacaaaaacaaaaacaaaccatactacagcagattaaacttcttatgaggcttatatttagctaatgttttcaaagttttactttctaaactcaatatggttttttaataattggctctttagtttttccacccattttattgtgaaaatgttcaaacagagaaaactcaagaagaatattaaagtattcttacatcctctacctagattttaatagttgttaattagacccttacttagtttcaagaaaacatttattaatggatctctcttttttttttttctttttgagatggagtctcactctgtcatctaggctggagtgcagtggtgcgatcttgactcactgcaacctctgccgcctgggttcaagtgattttcctgcctcagcctcccgagtagctgggattacaggtgtctgccactgctcccggctaatttttgtatttttagtagagacagggtttcaccatcttggccaggctgatcttgaactcctgacctcatgatccacctggctcagccttccaaagtgctgggattacatgcatgagccaatgcacctggcctaatggatctcatactacagtatagtaaggtgcagtggctcatgcctgtagtcccagctactctggaggctgagatgggagaatatagtacactatttgaaaataagattaactagtgtgctgagaggaaatgattttttttaatgagccattttattataggaattatttcaaagtaacatttgtggctgtctcagttcagtaaagcttagcataatttaatgtctatgaagtgagtttcaatgtttgctgtctagccacctgatagatacttaggtactgttttgaaattcttgccttcaaagatgcctcaaaacaggatggaaatttgagttaaatccttaagataaaagcgtgatatatttattggcttttctttttgttccctaatgggaaatgaaaaaaaacaaaaaacatgggtaatattttgaacaactttatattgctaacagccagtggaatttaaaaccttagtaggaaagtttcttttactaataggttttataaggagaaaatgaacttttgtttcagagtgaatgaatgagtactttctgcagtataatcattttgggttgatctcttaaaagaattctagaaggaagaagtccaatacatatatataaactctattatgacacgtttactttgtaagtattggcttttccatttttattattttagtggttgtgttatggttctcatttatagaagctgttgttgccagatactaattgaggtaggattcataaagcactttttgtaatccttcttctttgtggatagcttgacaatttgttcaaaaaaataaactcatagtggtggtatgcaactttgttaaaaataaaactgtaaatcaaaaagtgaatttcattgtatgtaaatttaaaagtatgttagaaaacatcaatatggcaggagaacaagtttgacttttttccgcaactagtgtctactaccacctttctggatactttaaaaagttgtcagcttttaaaattgttggtataaaacatttgggaagtttttaattggtatttgtgcttcaaaatttaagacttttctaagtattcagaaatattcaaaggaagagatgaattttggaaaacttgtttgcctttatgtgcttaatctgactttaagttgaaatttgaacagtgaataataattttgtttacataaagttttttgacttctatattaggaaaaaaactagcttgaggccaagtgcagtggctcttgcctgtataatcagcactttgggaggctgagtcccgactgcttgagctcaggagtttgagaccagcctgggcaacatgctgaaacatcatctatacaaaaaaagtacaaaaattaactgggaatggtagcatgtacctgtagtaccttacagctactcatgaggctgaggtgggaggatcacctgagcctggggaggtcaaagctacagtgagctgtgttagggtcactgcattccagcctgggcaacagagtgatactccctcaaaaaaaacaacaaaacagactgggcacactggctcacgcctgtaatcccagcactttaggaggctgaggcaggtgaatcatttgaggtgaggagttcaagaccagcccggccaacataatgaaaccctgtctctactaaaaacacaaaaattagccaggtggtagtggtgcatgcctgtaatccgagctacacgggaggctgacgcaagagaattgcttgagcctaggaggcagaggttgctggtggggaggttgccagtgagccaagatggcgccactgcacttcagtctgggtgacagcccgagaccctgtcttaaaaaaaaaaaaagggccaggtgcggtggctcacgcctgtaatcccaacacttagggaggccaaggagggcggattacctgaggtcaggagtttgagaccagcctgaccaacatggtgaaaccctgtctctactaaaaatacaaaaattagccgggtgtggtggcgggcacctgtaatcccagctactcaggaggctgaggcaggagaatcgcttgaacccaggaggcagaggttgcagtgagccgagatggtgccattgcactccagcctgggtaacaagagcgagactccctctcaaaagaaaaaaaaacaaccagaaaccccgaaaaagaggtggaggggatgtatccttttttgttcatgtcaaaggagtaagctgggttgattacttcagattttgtgttagccatactttaagattttgtaagttattttgctgtgaagagtaccttttatttatgatattaaaggctttaacttaaattatccttcaaaactttggaggcaacaaagatgtctaccatggtttcttggatcaggtattagtcacttgtggaagtggtcacatagttttgtcttagagaaagttttgattataaagagaaggcataggcagggcatggtggctcacaactataatcccagaactttgggaggccgaggcgggtggatcacctgaggtcaggagttcgagatcagcctggccaacatggcgaaaccctgtctctactaaaaatacaaaaattagcctggcatggttgtaggcgcgtgtaatcccagctactcggggagactaaggcaggagaatcacttgaacccaggaggcggaggttgcagtgagttgtgattacaccactgcactccagcatgggcaacagtgcaagactccatctctaaaaaaaaaagagagaaggcataaaactaaaggaagaaaggaagaagagaaaaggaaatatttagttttttttttttttttgtgatggagtttcactcttgtgcgatcatggctcacggcaacctctggcctcacgggttcaagcgattctcctgcctctgcctcctgagtagctgggattacaggcatgcgccaccacgcctggctaattttgtatttttagtagagacggggtttctccatgtgggccaggctggtctcgaactcccgacctcatctgcccacctcggcggcctcccaaagtgctgggattacaggcgtaaaccaccgcgcttggccagaaatatgtagattttaaagtgaatgaaaataagaatctttaaattatcaaccaaaatttgtaagttaagtcactaaaaatgaaattagaggatctattgtaattttgatgcaatttttttgaagatactttccaaatagtattttttcccctctggttcattttaagagctgtatgttgatcatgaccttgggatgactgtttattatttctaagttttcctgtgtgtgacattttccttttcacttttgatcacatttgtttgcctgaaaattcttcttggcccctgtcgttgtatcctcaattttcttcatagtttctctttgcctttggtgccctttttctcctcctcatcccacccaatcacttggtatattctttgttttcttcttatttaatatgcttggatagtattctctggaagtattaacattgcaaggatgagtaaattaggtttcttttattgagtgttgcccttaccactttcctgtttctattgccttctcaaaaatctggcctttgtgtagaattcttaggcaaaagatgatagtaatggaagtgaaaagtgtggagcaggactggggttggcagatcatcaaaagtttgacttcattgttctgaaagtttgtgtgtcttacagctgtgtggtaatctctttcagaagacaaactaagttgagtctttatagccattctctttccaatgcttttcagaggttatatgatttgtcatatcacaaaggatttttcagaaaaatcagctaattacacctttttttgcaatatgacactaaatttgagacagaataatctttgctttagttctccctatgttatgtattataaatacatgtatcttacaatctactataaaaccataaactggctgggcgtggtggctcacacctgtaatcccagcactctgggaggctgaggtgggcggatcacccgaggtcaggaggttgagaccagcctgggcaacatggtgaaaccctgtctccagcaaaaaatacaaaagttagctgggcatggtggtgggcgcctgtagttcccagctactcaggaggctgaggcagaggaaccgcttgaacccgggaggcagaggttgcagtgagccgagattgtgccactgcactccagcctgggtgacaaagtgagactctgtctcaaaaaaaaaaaaacccaaaaaaatagggcccagcgtggtggctcacgcctataatcccagcactttgggaggctgaggcaggtggatcatgaggtcaggagttcaagaccagcctgtccaagatggtgaaaccccgtgtctattaaaaatacaacaaaattagccgggcgtggtggccggtgcctgtaatcccagctactcgggaggctgaggcaggagaattgcttgaacctgggcagcagagattgcagtgagccgagattgcaccactgcaccccagcctgggcaacagtgagactctgtctcaaaaaaaaaaaaaaaacgccaggcacggtggctcacccctgtaatcccagcagtttgggaggcgggtggattgcctggggtcaggagtttgagaccagcttggccaacatggtgaaaccccgtttctactaaaaatacaaaaattagctgggcgtggtggcaggtgcctgtaaatcccagctactctggaggctgaggcaggagaattgcttgaacccgggaggcggaggttgcagtgagccaagatcacaccattgcactccagcctgggtgacaagagtgagacttagtctcaacaaaaaaaaaaaagccataaactaattaaccctgcaagctcagcttgtcctttaaatactgtttaccttctagatatagtccagtcatgtatggctgttgaaattactgttaaaaaagtattcgcttttttttttttgagacagagtattgctgtgttgcccaggctggagtgcagtggcgctgtctcggctaactgcaagctctgcctcctggggtcacaccattctcctgcctcagcctcccaagtagctggaactacaggtgcctgccaccacgcccagctaatttttttgtatttttagtagagacggggttttactgtgttagccaggatggtcttgatctcctgacctcgtgatccgcctgcctcggcctcccaaagtgctgggattacaggcatgagccacccgtgcccggccaagtattcactttttatcatagatggcctaccgattaagtcatatgttattgttgataatgtgatattgttgataatgtgatatgtgcatatatccctgagtaaactgaatgtagaaatatgtagtactctttggttttacaactatagagatgaatgtatatttaaaataaacttgtggcctgatgcagtggctcacacctgtgatctcagtgctttgcgaggctgaggcaggaggattgcttgaggccagctagtaagacctggtctctacaaaaaaaaaagtagccaggcgtggtggtgcatgcctgtagtcttagctacttaggaatctgaggcaggaggattgcttgagcccagaagtttgaggctgcagtaagctataattaggccactgtagtccagcctggacaacagagcaagaccctgtctctcaaaataagaattaaaaataataaacctgcattgagaaatggtattgcctgtattagggatctcaaatcttttggtcttaggacacttttacactcttaaaaattgagaatcctggcctgtaatctcagtgttttggcagtctgaggtgggaggatcacttgagcccagcaatttgagactagcctaggcaatatggtgagacctcatctctacaaaaaaaaactacaaagaaaaaaaaaattagctgagtgtgatggtgcgtgcctgtagtcccagctacttggaggttgaggcaggaggatggcttgagtccaagaggcagaagttgcaggggactgagattgcactgctgtactccagcctgggtgaaaaagctgtctcaaaaaaaaaaaaaaaaaaaaaaaagagaatcccaagaactttatgtttgtactgtcgatatttactctattagaaattaaaacaatttttaaaaaatactcacgtaaaataacaatgataaacccattacaagttaacaaataatttaggaaaataactattttccaaaacaaaattaagagaagcatggcattgcaatagaggcctgtaatgaatggctatttaatagaagacagctggagtcttttgtctgcttctgtatttaacctgttggaatatattattttggttgaaataaacgaagaaggctgggtgtggtggctcatgcctgtaattccagcactttgggaggtggaggtgggacgattgcctgagggctggatttctagacctgcctgggcaacatagtgagaccctgtctataaaaaaatccacggccaggcgcggtggctcacgcctgtaatcccagcactttgggaggctgaggcggatggatcacctgaggtcaggagttcaagaccagcctggccaacgtggtgaaaccccgtttctactaaaaatacaaaaattacctgcgtgtggtggtatgtgcctgtaggcccagctacttgggaggctgaggcaggagaatcacttgaactcgggaggtggaggttgcagtgagccaagatagcaccactgcactccagcctgggtgacagagtcagactccgtctcaaaaaaaaaaaaaaacaaaaaaacaacaacaacaaaaaacactaaaactaaaaattagcaaggcatggtggtgcacacctgcagtctgtagttacttgggaggatctcacttgagcccagtatttcaaggctgcagtgagctatgatcatgccagtgcactccagcttgggtgacagagtgagacaccccatctcttaagaaaaaaagaaaagaaaaggaaatacacaaaaatctaggcttacacagatatgtagttggtaaaggaaggaatattatttaaatagccttttcaggtaatttaatctttttttttttttttttttttttcctgaggcaaggtctctctctgttgcccaggctggagtgcagtggtgctatctcggctcactgcagcctctgcctcctgggctcaagggattctcatacctcagcctcccgagtagttgggactacaggcgcatgccaccatggctggctaatttttttggtattttttttgtagaggtggagttttgctatgttgcccgtactggtcgtgaactcctgaggtcaagcggtccactctctgcagccttccagagtgttaggattacaggcgtgagccactgctcccagcctgaatcttcttgtgatactatacaaaaactcagcaagtgctagtttctttgttggagtatggaatctgaaattgtttatgaacctgttggtctttcgtgaacttcaaatggatcttttacccatgcctgatttgtaacatgcattagtgacttgaaatagtattcactgtgttttgcagatctccaaatattgacacatttcattatacagtactcctttcccctcagaaaatcctcacattcattaatatcactgcccatctcatcataaaagtctttaattaatgggaagctgtcaggctcataaatatcaaatgttttccaaaattctaatttttacataaaacccagccttttcattagcaagagatactgtcaattgttttctttgaagtagcaagctcattttttttccccagaaaatgtcaggtagctaagtctgaatagccatagtttatcatttgttctttcagaaggtaaaaatggtgttccatgaaaaaaagcagctggtttaacttgccgctcttcacttaagtgctttttctccagacaacatctgccggtatgcagaagtgctttgtgcgtactgcctattttgtcacgcaatatattaaaaaactgtacacaggctcaagacttaataaaatgaataatttttactgctgcatcaagaacattcttaagtgaaaccggtactccaaccccaatttgggtggtgatgaagaatacaattcagcgcttcttacagctttgctcgatccctcctaaggcttcagcagtgtctacacaccattgcttttacaccattggtacaaatgttgacatggtgcaaaaagcaagtaacatcttagtgtcattacgaaaatagttttgatctcacagatgccctgaaagagggacatccaggtttctgcccaccacattgtgaaaattgatgattctagataatacaaaatggcttctgttactgttctggtggtttaaaaacaacaaaaaacctcatttagttctctacctagaagagtgaattgcaactctcatcttgtgcttttacctgtgattttaaaaattgtaatcttgcctttgaaacaaaaatatgccaattcataataaagtctacatgagagtacatgtttggatttatatttctgtgcttctttcttttatataacataccatttcatatttgtgggcccagagtaaagagctcattctgttacagacactgaatagccttgtttttgtcagtagtcagctctgttttaaaacaattgcttgggtcctgctggctcaacttgcagttgtcctagtcctgagtcttgtcttagccaaagactgttgttggaaagcccacacaaaggccttgtgtataggatgccctactattaaaggagcatgttctagtctcagcggattaaatttgctttggtgtgcattcccttaccaaatttctcactactttgtttggctggttatttcagtgaaaaatcattttaacgtgaaggcagatttcttctaattattacatagtcctagtggtgacggttattggagtaaaataattttttttttttctggtaggatgtgatggagctgcttgaagaagatctcacatgccctatttgttgtagtctgtttgatgatccacgggttttgccttgctcccacaacttctgcaaaaaatgcttagaaggtatcttagaagggagtgtgcggaattccttgtggagaccagctccattcaagtgtcctacatgccgtaaggaaacttcagctactggaattaatagcctgcaggttaattactccctgaagggtattgtggaaaagtataacaagatcaagatctctcccaaaatgccagtatgcaaaggacacttggggcagcctctcaacattttctgcctgactgatatgcagctgatttgtgggatctgtgctactcgtggggagcacaccaaacatgtcttctgttctattgaagatgcctatgctcaggaaagggatgcctttgagtccctcttccagagctttgagacctggcgtcggggagatgctctttctcgcttggataccttggaaactagtaagaggaaatccctacagttactgactaaagattcagataaagtgaaggaattttttgagaagttacaacacacactggatcaaaagaagaatgaaattctgtctgactttgagaccatgaaacttgctgttatgcaagcatatgacccagagatcaacaaactcaacaccatcttgcaggagcaacggatggcctttaacattgctgaggctttcaaagatgtgtcagaacccattgtatttctgcaacagatgcaggagtttagagagaaaatcaaagtaatcaaggaaactcctttacctccctctaatttgcctgcaagccctttaatgaagaactttgataccagtcagtgggaagacataaaactagtcgatgtggataaactttctttgcctcaagacactggcacattcattagcaagattccctggagcttttataagttatttttgctaatccttctgcttggccttgtcattgtctttggtcctaccatgttcctagaatggtcattatttgatgacctggcaacttggaaaggctgtctttcaaacttcagttcctatctgactaaaacagccgatttcatagaacaatcagttttttactgggaacaggtgacagatgggtttttcattttcaatgaaagattcaagaattttactttggtggtactgaacaatgtggcagaatttgtgtgcaaatataaactattataaaatctgtttcaagtatgcagttttcttttgttagaaattgttagagaatagagagtggtaattcagatttggtcaacgattctagtcacatattttcctccaaaagtattccttccaaaaataatctatacatgttcaaattaggtagcataaagataaaagtgaaatttagtagtataggcctgaacctttttttgtttaaaagagtgcttttgaaataagcatccaccccaaatgttggttgtatttatgctgtgataaaaataggtgagagatcatatgatctaatattgtattgatggaagtataggtagtatagtagtgattgttcttcaagcatgcagtaaagatcactttttttttttttttttttttgagatggagtcttgctctgtcgcccaggctggagtgcagtggtgcaatcttggctcactgcagcctctacctcccaggttcaagtgattatcctgccttagcctcctgagtagctgggattacaggcgcgtgccaccacgcccagctaattttttgtatttttagttgagacaggggttcactgtcccttaagaccatcctgttagccaagatggtcttgatctcctgacctcgtgatccgcctgcctcggcctcccaaagtgctgggattacaggtgtgagccaccgtgcccagccaaagactgctcttaaagcacctttttgacagtgaacatggtctaaaaaagggaagatattgtagaagatttcacacacacacgcgtgtgtgggagacaactaaaggtattgaaggtactaattaattagatttccaaaattttctacagagagttaattatcaccaaaatgtgaatggtacatacaaaacctggcattttcttgtgataagtttacatttttaggagagtggagctttcaatctgcccttttctcctttgtttttgtagttttcaccaaagatgatcaactagaaatgttaagtggctatgcaagcaaaagcatagataggttaaaaaaaaggatcagctggctgggcagggtggctcatgtctataatctcagcattctaggacagtgatgtgggaggattatttgaggctaggagttccagttcgaaaccagcttcgtaaacatagcaagacccagtctctaccaaaaaaaaaaaaaaaaaaaaaaaaaaaaaaaatatatatatatatatatatatatatacacacacacacacacatatgtacacatacatatatatacatatatatgtatatatagaacacatggcaagagcaggaaatgggaagactaccttttttctggcagctatgtgttgttttgttcgaaagatggcaagtgtacaaccaaaccaatccacttgcttacagaaagaatgtttagtgtagttaagactaatttgacaacagataaaacagtctgtcagctattacaaagtaatcagctgaacactaatgctgttctgtctgctcacaagagataaagataccctctcatggaataaacaccttgcttagaattcatataacaaagaagtaaccttataactgctctctagtctgccttatttgtgtcatagagtaagatattccttgaaagcccattaagtggaatagactttctgaaaataagagttctttacctcagtcctcctctaatttggttgagaggaggtaatgaaaatggggacaggataaaaggtggcaactaaatttaaagcacagaagaaatgatttccttctagctatgagaatagtcaaattgagcttgccaggctgtctcattcctaacatgtaattcatgatttagccactaaatttctaaggagatcataagaaattaagaaaaacgtttaagtctagcctctgcgtggtagacaggtatggggagggagaatgcttttcccctcccagtaataaaaaaaaaaaaaaaaaattatatatatatatatatatatagttttactaggttttcatggataagtttttaaatgtaagacaggaaagggatctatttgatgtctatcttcagatatattggcagttttccttaagctatttagttcctcatctgttgctttttcattttgtatactgcaagttcccaggcaactcgaatttgcaaacacagccatggatacactatttaccttacagtagtttcctgggaatctaagtctggtttttgttattcttccctcccctccactgcataatcatgtataactagcaacatttatggttataggttgatttcctaagtgtggctgatggtagcctctagtttgaagtgagggaagaatgagtagtcaggaactggtcactttgaatgtgggagggaagatattcacgacaaggttttctacgataaagcagtttcctgcttctcgtttggcacgcatgttagatggcagagaccaagaattcaagatggttggtggccagatttttgtagacagagatggtgatttgtttagtttcatcttagattttttgagaactcaccagcttttattacccactgaattttcagactatcttaggcttcagagagaggctcttttctatgaacttcgttctctagttgatctcttaaacccatacctgctacagccaagacctgctcttgtggaggtacatttcctaagccggaacactcaagcttttttcagggtgtttggctcttgcagcaaaacaattgagatgctaacagggaggattacagtgtttacagaacaaccttcagcgccgacctggaatggtaactttttccctcctcagatgaccttacttccactgcctccacaaagaccttcttaccatgacctggttttccagtgtggttctgacagcactactgataaccaaactggagtcaggtattttgtactttgcagtatttctcttgtataccagtttgtgatgttttctctaaaaacttgaagttcctcaggcctgtaacttctggaaaagatgattattcaaaataatgttttggggtaaccagtggagttgggtagaatgaccaaataattattttccaaactgggatactttttagagtgaaaggggctattattaggtgggacaaaagcaataaatgaagactgcccagaaaaaactgagactatggacattcaaatcatgggagaaaataattttgtagattatgttccattgctaatgaatttgacttagaaaagaattgccttatttttaagagattgtttcagtggttcacataaaggctcgctcactggtttctcttgagttccttacacactatataagttgttctttcagttttatgattcaactactgtttttccttcagctgactttatttttaaacacccttaaagacagatatatctcatggcaaatttggtatcctgttacagccttggctcttaaacaactcaaaatattgggataggctgtcagtatgttaaggatagttgctcctgagtcaattcttcacttactccctctgttgttcttggctggatcctaacgctgatttccactctgctgtcacaaacatttttccccccgtaaaatgtcttaatgctgtcctaccattattttaccaactgtgaaagctggctttaatttttaggaggaaaagaaaagcctgcatgtgttctttattggtatcatttaaaatatacttttttttttttttttggtaaaggtaggcgtattttaagatattttcttaacttgagcagtagccaacaggaaggataccagtgtctctctctcttagcgacacactccttggtcttgcttaccaactggaggacactaggtagaataaccgagtatgacaattcttaattgtttacattttataacttcctgtccttcaaaagagtttgaaatgtcattttgggaaaagagagccagtcaagctagtaggctgattgtgaagaaaatctaataccttatctttatctcaaacctctgtacaactttattttcattgatgggatactttaacaaaaatgaaattttttttggtttttaaaatatgagtgattatgacctctttggggatcatgcttcaaaaagtcagaaacctagagacaaaactgtcattgatttttaagaagaaacacactaggtcaaaagaagatgtcctggaaatacgaagtactctttaaaaaccatgcatttggagaaagtaattgtttccttgaaaaacatgattaaaaactaaaactgggatgttcctgtgtgtacacagtgccaaatggttttccctttttatgttgtgttttagaaacagcacgaaagttttttccattttaaagtgagaaaacattatatttagacttccataattccaaaatcagaagctatttttaaaattagcattttcttgcatcaccaaatggtattcaattgtttgaagctcaaaatttttaccattccataaatgtttgtgaatttttagacagtgccaatttaaaagtagagatagccaatctgaatacggtgaaattatggggatctctggtgattgggatgaaaactctggccttaaaaggtccacttttagtatataattgcctaattagcaatcatttttattttttgctcactccctggtctgaatctatctgtctattcagatattttttggtaggtttggaaaatggagaagtgagcctaattggtgcctaattgtctggtgtatcattcactttattcagtttgttctatcaatatgatttacccctcaaggttaacctagcaggttgctcagttattatctctcaaggtcacagtactagaaatacttggcttgcatctttcagatgccattcatgttatcaagctcaaattatagttggtcacaggattctaaagtctttatttgacttctcctttttgaactggctcaaatggaaaagtgtagttgcttttaaatgttaaaaataagtttaaactttatatttcccattggtttcccctattttgtcctttctttgtgtgcttgaaatattttatttttcagtttgtcctcatagggaatcaagtattttagctaggtgatgtcttgcaagtacgttccactttgttacaatctactatctgtatatactatttgtatcttaattcttttatgagatgttctgtaacatttttctcactttgacaaatgtttttagactgtacagtcaagatctggcgcttgggggtaagtggaatgatttgctaatattgagaatctgttgtatcaaacataataaactttttttgagatgtgctttgtagtttggtaattcttagattttactattggtttctttgcttagaatgagtttctaaatgtgaactacaaaaaccactctacttcaagcatgatcattagaagaaggttagggatgtccccaagcatcattttatcccttaaaactacagatagtttaggtttctgcctgaactaatctaagttagctttttcttcacatctcataaactaatggtgggaggacacaaagagctttatgaaaacatttttgatggcagataaggacggagtcataaagctgtatccatgcagatgtgttatgctgacattattgttattattgagatggagtttcactcttgttgcccaggctggtatgcaatggcgtgatctcggctcaccacaacctccgcctctggggttcaagtgattctcctgcctcagcctcccgagtagctgggattacaggtatgcaccaccacacctagctaatttttgtatttttagtagagacggagtttcaccatgttggtcaggctggtctcaaactcccgagctcaggtgatccaccagcctcggcttcccaaaatgctgggattacaggcatgaggcactacgcccagcctatgctgacattattaaagccaacagatagctaatctgaaaagttcatgtgcatttttttctttttttcttttgttttttttttgagacggagtctcgctctgtcacccaggctggagtgcaatggcgccatcttggctcactgcaagctccgcctcctcatgtgcatttttcttgaattggttctgtgtactgcatttgttctgtggagcacctcagtgaatagaagattttgccctttccactctccagaggcttttgaccccaagttgtgctctttgacaatggagagttattgcgtaaaaagtgacaataaaatcttgacatttcatatctgcaaaatttcacttaaaaaaaggtaaatttcataggagtaagtcgcaaaggaaaatccataatgtcagtgctaataattgataagattagatctggaggggaaattgtaagtgcacagcattcattaaaatatttgattcaatcaactaattaatagcaaattcaaaacaaaattggaaatagttatataaaaattaatacaatttgtttgatcaaatgttttctttagaaagtgatctctcaaaaattgatgagtgttggtttacttctaaatatggaattcaaatgactttcagaatcacagcaaggtctcgattttcagcacctgattactgatttggtagcctagcacggtggctcatgcatgtaatcccagcactttgggaggccgagatgggtggatcacttgaggtcaggagtttgagaccagcctggccaacatggtgaaactcaatctttactaaaaatacaaaaattagccgggcatggtggtgtgcgcctgtaatcccacctgcttaggaggctgaggcaagagaatagcctaaacctgggaggcagaggttgctgagagccaagatcacaccactacacaccagtctgggtgacagagtaagactccatctcaaaagaaaaaaaaaaaaatcactcatttggatttgtaaagtaaatgaaatttcaaaaaaaaaatctgtcttgagaaggtatgatgcctttgaggttgtaagtcaaatttatgtgtatagttttgctagttattaaagggatgctttataattaagcttctttttgtgtgtcctaggtatgtttctataaaacctgataaccgaaaattggccaacggaacaaatgtcctcggcttactgattgacactttattaaaggaaggctttcatttggtcagcactagaacagtatcttctgaagacaaaactgaatgctatagctttgaaaggataaaaagccctgaagtgctcatcacgaatgaaacaccaaaaccagagactatcatcataccagagcaatctcagataaagaaatgaagttgtctatcctcttttaaagagaaattgccatttttcttgtttcattacgtatttagggcatacatgttagccaaatctacactcagcctaactcttggcttcatctgctgccatgccgtctctgggcaaccaggccccaactgtgcttaagccataatgcctgctgctctctagacaactccatgtacttggtgctttggtatatgttctaccttcaatacatctttccctttctcttcttcatgaatgcttatgagccgagattgcgccactgcacactagcttgggtgacagaggaagactgtctcaaaaaaaaaaaaattgatcaaactgatggataccctaagtaccctgacttgatcattacaccttctatgcatgcaacaaaatgccacgtgtaccccataaatatgtagaaatattatatgtaaataaatagttgggccttccgtattttcccacttatgtttgtttcagcatttatttatttatttatttttttagacggagtttcgctcttgttgcccaagctggagtgcaaaggtgcgatctcggctcactgcaacccccacctcctgggtacaagtgattctcctacctcagcctcccgagtagctgggattacaggcaggcgaaaccgcgcccagctaatttttgtatttttagtagagatggggtttcatcatgttggccaggatggtctcaatctcttgacctcgtgatcagcccgcctcggcctcccaaagtgctgagattacaggcgtgagccaccgtgcctggccccagcatgtttttatcaatcacagtttcatttctgacaaggcaccaaatattttatttatttatttaatactctttatataatactctgtcaccaggctggagtgcaggagttggaagctgtagtgaattctggtgtaatcataactcatgcagcctcaaactcttgggctcaagtgatcctcccacctcagtctcccaagtagctgggactacaggcgcataccaccatgccagggtaattgttttttattttttgtagagacgaggtctcacatgttgtccaggctggtctcgaactcctggccttaagtgattctcccactttggcctcccagagcactgggattacaagtgtgagccaccatgcctagccaaggcaccaagattttagcttatgattcttgaacctcaataatttaccttataagtgattagaagttctccctacaaatcttttctgaaaaacagctctaatgcttaattttactcttggatttaatatacaagttgtaattacaaagagttcttagggtatggtaaagtcaagattaatttaggctgcttttttttttttttgagacagggtctcactctgttacccaggttggagtgcagtggtgcgatttcagctcactgcaacctccatctcccaggctcaagcgatcctcccatctcagcctcctgagtagctgggactacaggcatgtgccatcacgcccacctaattttttgtatttttggtagagatggtgtttcaccatgttgcctaggctggcctcgaactcctgacctcaggtgatccgcccgcctcagtctcccaaagtgctgggattacaggtgtgagccactatgcctggcctatttaggtgctttaaaaatgtatttgaaatcaggagcctgaagtagtataaaatggtcacaagaaagcagcttgagaaatacatggtttaggaaatcaaaatctgtttctaatttgtcctttataccatttacaagtgacaaacttcagctttgctttataaacttttgtactgattctctatcataagtaatagaaatgttcacatcaatagagaattacaccactagagactatgctggggtaataaaagatttgctaagagcactcaatctcttatattctactgctatttttcctctgtgctagggaagttgactgtaatggcaagtttagcaacgtagaagctaccgtgaggaaatcttcaaaaataaatttatgaaattgtattaccttcctggaaccaaaggacccatgggagacagcaatgtggcatcagacttagcatttttaaacaaatgctcagaaataaagataggacattttaaaattactaaaaatacttagctttctggaatatcaatgacctagtaaaaaacgtaagtactgggctggcctggtggttataatcccagcattttgagaggtcaaggcggaaggatccttgagcccaggagttcgagatcagcctgagcaacagtgagacccccatctgtctatgatttaaaaacaacatcaacaacaaaaaaccccaaaaatcacaattaccggctttgctgtagaactatatacctcaagacttactaggatttctggctgggtgaggtggctcacgtctgtaatcctagcactctgggaggctgcggtaggcggatcacctgaggtcaggagaccagcctggccaacatggtgaaaccccgtctccaccaaaaattacaaaaattggctgggcatggtggcacgtgcctgtagtccccagttacttggaaggctgaggcaggagaactgcttgagtctggaaggcggaggttgcagcctccgccgagatcatgccattgcactccagcctaggtgacagagtgggactctgtctcaaaaaaaaaaaaaaaaaaaaaaggatttcttttgggcctattataaatgaaaagtacaaattttatcaaaacacttcatcatcgaaaataccttaatatttaactaaactatgagatccaatcacaaaaatattttcatggataaaaagctaaaatcttacatgggtgaaaatggaaaatgatattacgcatggcacagaataaaaacagaactaaacatgtagcaaaataaataggaccttgctcccaaaactaaaatgtgtttaagacttgcctaaccacacaaggcttttaggtaggtagtcttctgtaccttcagatttcacaccaacacctcaaaatccagaaatcattaaagcaaatggctttttattaaacaaatggctttttatcagtagggtaaaacataccaaataagtgtttcatttcatattattcttcatcatctcacaacacttctggaaagaatgtgaatttcttcaggttcatgagtatgaggccaaataggagagatttgttttaccctttttttttttttaagcaggatttcaccctgtcacccagctagagtgcagtggtgctaccatggctcactgtaacctcaaaatccagagcccaagctatcctctagcctcagcctcctgagtacctgggactgcaagtgcatgccaccatgcctggctaatttttaattttttttgtaaagatgaagtcttactatgttgcccaggctggtcttaaacttctgggctcaagcaatccttccacctcaccctcccaaagtgttgggattacaggcgtgtgccactgcacatggtctacgctttctgtaataagagacctccaaggaaatctggctgcaatgtttaaggttccatgagttcttttaagatgaggactgagactgctatagtggtctatgtcatactcccccatagtgctgggcatctaacaagctcaagtgaactgaactgaaacatttggaaactatagtctcagtgaatagatgcttggaaaaacaagatttatagtagattcaaagatggaagaggataatttaaataatacaatctgaaagagttgactcaagttacagattacagaaactaccccagagtattttcaattagtttacttggggccaggcgcagtggctcgcgcctgtaatcccagcactttgggaggccgaggtgggaggatcacttgaggtcaagagttcgagaccaacctgaccaacatggtgaaaccccgtctctactaaaaatacaaaaattagccaggtttggtgggaggcacctgcaatttcagctactggggaggctgaggcaggagaatcgcttgaatctgggaggcagaggttgtagtaagctgagattgcaccattgccctccagcctgggcaaagaagtgagactccattaaagaaaaaaaagaagtttatttgggtaatgccatatggaaaggagatgaaaatatagatgtatatggggatataaacttgttgcagattacacaaaattatatgtttaagcagagaatagtccagttaaaattgggatatacttaatttgctaagaacaatgtaatgctaccagcatgcttaaaattaaaaaaactaagagaatgtaagttcaaaatgagtgtcacatgactataattgatagtaaatcttcacttacctccataacttaggagtcatgaaaagaaagaagttagcagaccaggcatgtaaatcagatgtaagtaggatggaatacagaaatattcctagttctgggtaacccaatttgaggtcattttaagtttactgaatttggattaatcaattggttcaataatcaaggtaaaatggtccaaaagatcctgatatatccagaagacatattactgaggttttacaaggctaatttgaaatgcagattaacattctaggtttccttacatatcattaaaatagaccatattaaaaatcaatttcagaagctgctttatgactggaataaaaaacaattaaagatgtagagtaacattgtatttctgtctgatgctgggaggctattttttcatggcaagtaataactgggtaaacagagagatactttaactttacaaataggaatcctagaaaacaaggttttgctcctagaaaacaaaaatagttcctttcaattaattttctaaaaatggttgcattggtcactttttaaactcctacaatctaagcagcactgaattcctatttgatttttttttttgctaatagttttcttcagaagcaaacctgctttagggtgaaaaaaagtttcagaccttagacagaaccttcatttcctcttaagtatgtttctccatcaaaaacaagtattcaaataaagaatctcaattatctaaacctatttttggccatcttccggaatttcttgttaaatctcctttgaaatgccacagttgcactcttggaaaacttgtcttcctggttttcaaatttctgtttattattacagctcttcagctagaatgccaggtctttgtgctgtactgtttcttgaaactggagactagcacacttcccccaattcaattacttgctttccatttgagaaattaaagccaggtcaattttataaagttttaactgactgaattatttggactttaagttctcaatttcattcccttagcctaatactgggaaagatcttggttttattgagagaaggtaaggtttaagagtattaacacatttcagtcattgactattataattgatataagcgtagggattttctaacaggcacacgcttgagatatgacactctaaggaaaaaagggagagttcttattcaattctagaaatgtttaagattacatactaatgatatagtttatttacataaatgtgtgttcatattttttctaaaagaaagggaccgactgtccttcataaagagcttcagtcagcttttctacccttatcagccttatgtaactgccaaatttacctctccagcctgacttttacatagaattccagttctgtatatccagccaccttaaatgaagacatttcaagctgaacgcctaaatatcaccttaaatacattgcagaaatggaacatattttccccctcttaaactagtttcttttcttttttttttgacagagtcactctgtcacccaggctggagtgcagtggcatgatctcggctcactgcagcctccactgcccaggttcaagcgattctcctgcctcagcctcctgagtagctgggattacaggcatgagccaccacgtctgactgatttttgtatttttagtagaggtggggtttcaccatgtttgccaggctggtctcgaactcctgacctcaagggatccacccacctctgcttcccaaagtgttaagattacaggcatgagccatcgcacccggccttaaactagtttcttaactatctcctttctttcattggtaactccattgtcttccagtatagaaaatgtataatcttttacacctcccttttatccaacccatcatgatattcaacaactttttcctttgaaatatcttaaatttattctttcacctccattctcctgccactattgctgttcaggtttcttcacccctagattactacagtagtcacatgcccagtttccttgctaccatattttatttcttagacatttctatatatagtattgccacatttaattccaaacaaatcaataggctataatgcctccctattccctgctatatcaagaccaaaatcctctaattggttttctaggcaaaggctcaatagcctagttctaacctagtaatacaaattcatgtaacctttgccttaggttttatggcacagatcccaggttacttctgggggaatgttgcattcaattttggcttaaattcctacctacaaaccagacaagtccattacttgacaactcaatgcattttaatttacaagcatgcaggccacaaattataaaatgaagactttttactgagtcagcagaaacaactgttcaattctcctgtaagtccccagttacttacagttttctgctgaggtgatcatctcatgtggcatttattgccctctactaaaatgagctattatctgacactctgctctgtacagacgtgtttctgtttccattttcagttccttctccacatggtctaagtaccagtagtttagtcagttctcaccttttttgaggggaaggcggcaatggtggtatcaaaatttacacctggaaaacaggtcataaagaaaatcaatatagaagggaaagtgctttaccacaggaattattatttaattgctggttgaattcttgacttttggttaaaaggtagatataacaaatatgtaaaccaccctcaaagccaaaccaaaaccaacagcaacaggcttttcaatcaatgtaatttatacattgggttctggaaaacagaaatgtcctataaattttatataaatgctatataagggtacataaaaatgaatccttattataaatatgacttaaatgtcatagcagtaaacaaatggtacttatttgatccacaaatttctttgccttcttagatttttttgaaagttttggtgtggcttggtttctttttgaagggccgagctgggagaaggaggaaaggcatttggtctcctataaaattgtccaagaaagtttatgagaaagcctatatcactcaataaggtggctccagtaagtttaggcattcaaaaacattccattaattttagagttaccttaaagaattacagcagatcctcaatgcttttgtttctgtgattacggtaatggcatttcttgaaaagtatttttaaatgtaaggattctttattctactaccacctcctatctcctcagagatacacaaataaaggcccaaaaataacagttaaactttatagaatttcacacttcattggaaaggttagaaatgatcatttagatcactaatgaccccccaaaagataacaaaatttcacaggcctgattattcatacccctacccacactttgctggttttgctgaaaaaaaaaaaaaatgacattttaaggtacctgagacctgaggaatgaatgttaatagctcacacagaatgagaagagctctgatcagtgaagtagtaaaaggtagagggcactcctaaattatcagaaaataacctgcatatttctgtatttatctagcaggtatgcagcctttctaccactttaccataaaggtattactcctgattttcagcaatcaatggtcacttattttacacctactatgtttaagacactagactaggcttgcagaatatacgataaagaataagatggccccttcccataagacagcatgcatttgttctaagtcaggtatggaagcttaaatgagagaaatggtatttttggctgaggaggaaaagtgaactggaaaaatttcatgtagggggtaaatagcttaagttttagacaattgaagatgaaggaaaggacattctaggagtaaataacttgagttaaggcttggatgaaaatctgagtgaggtttgaaaaagtattatttctctttggcttaacaacagttattatggtattcattgacaattactcccatagtggtaaagtcaatcttacttaaggcaaaaaatatcctagatatagcattttgcctaggcaactctttcctctcaagatttctcacctgatttgctgagttaaaagccacagactcccaattatttagggtaaacttatttatgcctaggtttccttccagtatttcttacaagttttttgtttttttttcttcaaagcaacacaccatggctcttgaagggctgcaggcaatctgaatacccttgttttctttgattagaaatgagggtaaattatgcaaaggaaggaaaacaatctcaaacatgattatactcatttccctaccaattccctagtatctactctttgccttcattatactgtatctactttactccttgctacttcatcatgtcttggttcatgttgttttctgcactcgcaagttatcattccttcatttcacataatcaatcttaaccactttttcagcccagctcacctttcatatcctcttataagtcttctctgataagtttaagtccacatttccttcaagcttctaccacacttaagttagcaagccagagtttacattccattattctctacttgtttcttgtatgttagtataatattctcatacaggttacagttctttgctgacagggaccatcttttataaactatagtgaagtaccgcacctagagtaggcccttaataataaagataatgtcactttaaaaatgcaagcaggaaacgcttcaggcatttaaaagtagtattttaacaataactatttttgattaaataaaactatattcattcttcttttcagaacttgaagcctcaaattatcacctcagatcatcatgctattaaaaagtagatgtgcatatgaataaaactgtccaactctatcacttatacacaacacagccatgaacaaaagcagcagccattcttgataatccaatcccctctgaaacaaacaatttctggcagtaggagacatttacaaatacatagccttgctaacaaccactaggttataacggaaaaggtttgtaatttgaatcctttagagtgtgcatctttcaaatgtgtagtgaaatcataaatacaatgtaattttgttcagtttggaatgaagtgaaattttgcttaaaggaaatgaagattattcaagttgaagctttagttaacctgcattagtcactagcattctacttccaaaaaaaaaaaaaaaagtcaatcttaggaaaaattgcaatcaaacatcaaacatccttggcttaaaacacattcagcacaatttttaaaacctctatacctacattacagaatatagtagttcacccttattcacaggagataccttccaagacccctagtaaatgcctgaaactgtggatagtatgtaactttatatatatatactatgtgctttcctaaaaatatatatgataaagttttatttgtaaattaggtacagtaagattaacaagaataatagtaaaataaaacaatttaacaaaatgcaagcatcactactcttgtggtttggggccattatgaattaaataaggattatgaattaaataaggattatatgaacacaagcactgtaatcctggggcagtgggtctgataaccatgatggctactaagtaactaacaggcagatagtatctacggcatagatacaatggacaaagggatgactgcgatcctaggcaagatggtgcaagatttcatcatgctactcagaatgacacacaatttgaaacttaaacgttgtttatttctggagttttccatttaatatttccagacttcagttgactgtgtgtaactacatggaaaatgggagacactactgtattacataagacttgataataaggtatgtctttatttataaaatgtaatgatattcagcatatactttattaaggcaagaaaatatattgaaatattaccatttttattaatgttttagaaaatattcaaacaaggtttaaaatgattatactccagaagctttacaggtgttaaataaaatttttttaaaaactaggccaggtgcagtggctgatgcctgtaatcccagcactttggagggccgaggcgggcgggtcacctgaggtcaggagttcgagaccagcctggccaacatggtgaaaccccgtctctataaaaataacaaaaaaacggccgggcgcggtggttcatgcctgtaatcccagcactttgggaggttgagacgggcagatcacaaggtcaggatggtctcaaggtcaggagattgagaccatcttggctaacacggtgaaaccccgtctctactaaaaatacaaaaaattagccaggtgtggtaatgggtgcctgtagttccaggtactcgggaggctgaagcaggagaatggcgtgaacccaggagacggagcttgcagtgagccaagatcacgccactgcactccagcctgggcgacagagcaagactctgtctcaaaaagaaaaaaaaaaaaaaaaatcagctgggtgtggtggtgcacgcatgtaatcccagctactcaggaagctgagacatgagaatcgcttggtccagggaggcggaggttgcagtaagctgagatcgcgccactgcattccagcctggtaacagagtgagactctgtctcaaaataagtaaataaataaaaataaaataaaagtgattgtaaacttcaattaacagaatcatccagaactccagattgccccattgattcaattaaatttttgtctgataaaacttttagaaattctttttcttttttttcatttgcattgcctttcctttaacaacttccagtgggggtagttttcctttttgttaatcacgtctcacacagtcaaggtgtcgatctgacaaagagtaagagaaatgaaatctaacatagtttctataaatggtaaagttaaacacaatttccagaactctaagatgatgttgaattttccacataaatctatgagattatatttaatttttcccatctgctattttaagtaatatgtcagtatactaaatatctctaaaatgaatatattgaaggctgactctcttctaggattataaaaatttgggacaagacagagccaagttcaatatcttatttaaaatttaaaggcttagagaaagacagtaacttaaggtctttcaactaagcaatgacagagccaattctcaagtatttgaatatgaccacaattaacttctctgggacaggaacagtttaagcttctgtttacactgtcatttctcgggcaaagttaccaagctacctaaatacttctttagcataatcacaaatatgaattttattataacacattataatcttttattctgtttcatttcatggccttctaaacgtgtgggtaagctttagcttcttgtacatgctcaactgttatcttaataaaatgcatcctgatgaaactgaagagactagcaacagaggcaagtgcctctgaacaaagagacatgttggatgaatgaatagctatacacacataattgaccagtttgagactttaaaaatgagggcaatgcagaaaataacttatagattctcaacataagaatcatcaaattaatctaatgaacattttcacttctaatttatatttttactttttgcatattattcttaattcttgtatgaattcttcaatgaattctaagttatttctttagacattcctatggttaaagcattttcccccataacagcaagtaagataattgaaagattagaaaaaggattatttaatctaaaaaattcactttactatttctatgagaacttttatcttttcaactgagagaagctaaatacaaaaatactgaatatgaaaagtaaatactttgaaaaacagagaaggccctaagattaagattgtttattggaaataggattcttaagatttatcttttaaaactgccatgctaaataagtcagattgaatcattattaattcaaatagatatcatctactgtgtcagatgttttcattttgttttctttatatatggaagaaaactgtttagctaaaatatagtagataccacaaattgtaaaattatacattctaaatgaatacattaaaatgaaaaataagcagcacaattttatataaaagattataatactaggctgggcacagtggctcatgcctgtaatcccagcactttgggaggccgaggcaggtggatcacaaggtcaggagttcgaggccagcctggccaacatggcgaaacccgtctctactaaatgtacaaaaattagctgggcgcggtggtgtgtgtctgtaatcccagctacttgggaggctgacgcaggagaattgtttgaacccgggaggcagagattgcagcgagccaagatcaggccactgcactctagcctgagtgacagagcaagactgtctaaaaaaaaaaaaaaaaaaaaaagggaattctcaactacttttttaaaaaggagttctctctatggaaggcctaatttggaaatgtacttgggtccctatacaaagtcgtccagaagccagatgatttcccagtgtagtccaaaagccagatgatttcagggcaaagcatttgaatgctatggatttaggtaggcaagatccagaagcagagtactgtgggtctgggtgggcaggtagaattcagatgctgggaaaaacacaaacgcaatgctaggaaaaagggtcatgccttacaattcaggtgggacagatacaaatgaaatagtttcttaatgaggtagaaagaggaagttattaattcctgttcttgttggattctaacatacaagctaatttgaattcatcagcctaagcaaggttgccttggattttgaagttttcttaaggaataaactgtagagaaaccatagggccaaccagatggatgatgaaatggaaaaaacagcaattaaatacttttagaaagtattacaaattaataccttaaaaaccctgtatcttgagctagtagcaaaactaactggaattcctgacctctgcagtgccttcttgcaacatctcagaaaaaacatctgggaatccattttagtctgctaagagacttaagatttacatcagatatattgtcaaggtttctcttgtccttgttaccaaggaggtaaaagaagtgttgtaaaatttattcctcagctggcacattatctcagtgagaaatagagcccttacaaagacttatcttagacacaaaactacattattgtacttggcaagtaccatttcatgcttctcatttttttcctctgatcctttaatgaaactgtgatgttgatgatctataaatttgatctaattgaggctagaattctactgaaaagataatttctgagtagccataccaatactgatatcaatgtattttttaatcagagaattaacatattactgaatgtatatgaggttaccagcctatttactagtcaccaaatgacctgagttcaataagacagcctctgggctcaagcttattagccttacaggctaatagcagggaaatatagaagcatgtaaatcatgtgatgatttaacataagcaataatgagactgttttaagggtgatagtacagaaaaggcagttatttatttattttttttgagatggacttccgctcttgttgcccaggtgaagtgcaatggcatggtttcagctcactgcaacctccgcctcctgggttcaagtgattctcatgcctcagcctcccaagtagctgggattacaggcatgcaccaccatgcctggctaatttttgtatttttagtagagatggggtttcaccatgttggccaggctggtctcgaactccagacctcaggtgatcctcctgccttggcctcccaaagggctgcgattacaggcgtgagccactgtgcccagccagcagttattaatttttaacacaagtgtatatatgtgggagatggggttgcccttttgaggtaatacctaaaaaactgaaggatgaataggaatttgctacactaccattattgctctagaagagatagaatgaaattagtgattgttattaagccttgtcataagtccagatctttaaattgacatgaaatattaagaaaattctatgtctagaatttggattatttagtttgcagccttttagttgcaaaaggtgtattttctcttctagattttggtaaacatccagagggacagtgtccttaagtgacatttggtgtgcgcatatatatatatacacgtatatatacgtgtatatatatacgtgtatatatacacgtatatatatatatatatttttttttgagacagattcccactctgttgccaaggctggagtgcggtggcatgatcttggctcactgcaacctctacctccccagttcaagcgattctctggcctcagcctcctgagtagctgggattacaggcatgcaccaccataaccggctaatttttttatttttagtggagacagggtttcaccatgttggtcaggctagtctcgaactcccaacctcagatgatccacccacctcagactcccaaagtgctgggattacaggtgtgagccacggtgtctggcctggtgctttaatgctttaaaaacgaccaagtatgacctgtacattgtgtagacttactctggacagtagggtgaaggtagttttctcagggaactatgccattacattaaggactctaattaaattcatttgtctgtatgtatatccatgtaccacaaatacacacatgacatgaacacatatacacctcatctccaatgttactcaaatatatttctcattgcatgactccctggcggtgggaccagtggagaatgagaagataacttgtacttagtattttcacatacaaacctatctttaagacattacaaaaaataagttgtaaaaatgtcagtgtgttattagtctctaattttttttcccttctaaaacaagttctcaaaagcctatcatactatctctgatttctatttcaatggaagcagtcagtacaatgtgtgaagacctgggcataaaagcagcattaaactagtattaaacaagacaccagcattaaacgagacaataaagtaagactaaaagtactttggaaactaaaagtactacctaaaaggaaggtatcactatcattttgagcatttatttatgtagttttgtctcctctgcctcttgttggctacaggatagaagctgtagatataattcctaaaagcgtaaacttcaaagtcaaaccatctgagcttgaatctggactcgctggcctgctggttacgtgacatgaggcatgctatttctctgtgacttggtttccttacccatatggataacaacggacctctctgagggtggctgtgaggactaaatgagtttataaatgtgaaagttgctggcaaaggataaacactaaatgtgttagcagttactatttctaccgctaataatagcatgtaaaccttgagttttccatatacactttagaaaaatcaacaaccctttcaggtaaccattaaaatgtttttatttgatggtttgggtccttttcactataataatcacataaaataataaaaatttactggcctatgttccagaggggcaaataaatattaacaaatgtgtcagggctgatgttcatttacaattctttctcatatcaataatcttataatttggaagagaaccagggtagtctaaaaagtacttgaaaactgaagagcctgcattaaaggatgaattaaaaacaatcttttcaaccaagtgatattgtttaatcaactctcaacaataatttaggttcaaaagactggcaaagacagtacagaatgagtattttctgcatatatgatgccagaatcaactgacccactgccaatttcagagaagactgaagaaattaaagacatttcttttaatcaataactgaacacctattatgtgcctggtagtgggaaacacacacacacacacacacctctaattgaagctaaattcctatttactacagaacaagaattccaagggtagtatttctaaacctaagctatggctccgtagtctcattaatgtctaagcgtcctagaatataaacatcaaaaaatcctcctttgatactactaactcaattctccccaaaagtatatggttatatatccttgtggaattgattccttcctgtttatccagattcttcacctttatttgcttttatggtcttaaaagggaaatgactacttaataatccagttctacactgggtttcctactgcctccaagaaatcttcttaagacaagcgctaacttacaaaagctttaaatatctctaaagatatttaaaaattatgtctctactcctagtattttcattgcatatatatatttgagacagtctcgctctgtcacccaggctggagtgcagtggcgcgatctctgctcactgcaacctccgcctcctgggttcaagctattctcctgtctcagcctcctgattacctgggattataggcgtgagccaccacacccggctaattttttgtatttttagtagagactgagtttcactatgttggtcaggctggtctcaaactcctgacctcctgatccgcccctcggcctcccaaaatgctgatattacaggcgtttgagccaccgtgcgtggctctgccttacatttttaaagctaggatttgttcaagctgatatggtgatttgcttcacttcaaaaaatgccttattatcttgattaagagtgtttttcccattttacccattttaaggtcctgtaaggcagtcatttctataatgtacacatccactactagtagaaaacccttgctttggagtttatatttgcctccctgaaacttgatttgcccagttttgtcctcttgtgcaataaagaataaacaagtctcaagattattattttttttctttttcaagcaggcttctcagtacctctagccactcctcatgacattcaaacacctcatatggtttccattctctgagttcactctagttggttcacattcatctacatactctacatgtggcctgatatgagctacataccaagactgccaattaacaatggtctgggggaacaaatgtttatcagcaaataacagtttagccaaaataaataatttgcatgctagctttgaaatttgctgaacccttacctataaactcttaattaaattctccaacttgagtatacagacaccaagaccatctggtatcattgaaaataaagaaacatcaaagggatttggtttcttaatgaatagaatatagggagtattttaaaagcattacaatttcttcctgaagttatacctatgtagaactttctagaaagaacaagttacccattcttaaagctccaaattcaggccaggcatggtgcctcatgccgtaatctcagcaccttgggagactgaggcgggaggactgcttgaacccagaagcagacatgcctgggcgacaaagtgagaccatatcactaacaaaaaattctaaaaattagccgggtgtgggtggtgcatgcctgtagtcccaactactcaggaggctgggtggggaaaatcacttgagcccaggagatcgaggctgtagtgagccatgattgtgccactgcactcccaatacagcaagaccctgtcacaaaacaaaacaaaaaaccaaaacaaaacccaaaaccgaaacaaacaaacaaacaaaaagctccaaattcctccggttttggaggttatctaaacacatctaaaaatcattaattcaaaaatggcacaacagcttaactactatggacctgaggctttgagtcattttattttgagacggagtttcgcttttgcccagcacccattaaaatgctgacaaaagtggtcataacagagggtttgacttcaaatctgaaccataggcctgttttggcagcaaacatccttcttccaaaatagccagacttttagacttccaaaataatatagtttattctgttagcccagctgtttctctggttctaaacttttttttttttttttttttttttttgaaacggagtctcactctgtcgcgcaggctggagtgcagtggtgggatctcgattcactgcaacctccgccccccgggttcaagcgattctcctgtctcagcctcccaagtagatgggattacacgcgcctgccacgtttgtatttttagtagagacggggtttcaccaccttggccaggctggtcttgaactcctgacctcaggtgatccaaaatgctgggattatgggtgtgagccactgcacctggccttaaacctgtctttctgaatgaaactactattgctcttttaaattataaaattagtgtgtgagacaaatggattaagacatatcatttttgcttacatcataaatgggtcaaattctgacaaaaacatatttattatactagacaggccaaacatttattgagcttattagtgtcatgtttacattttataaccatgtttaaaatgaaatatccataactattggttgtcattaatagtaagaaatgtttttgaatatccaatgtgaattccacaattttacagctcagctttttgataaatgtaactattgaggtacaaaagaagaaacaaactcaaaatttgatatacaggtcttagattttttttttttttttttctgaggcagggtcttgctctctcacccaggctggagtgcagtggtgccatcttagcccactgcaacctccacctcccaggttcaagcaattctcctgcctcagccccccaccacgtagcagggactacaggcgtgcaccaccatgcacggctaatttttgtatttttagtagagatggggtctcgccatgttgcccaggctggtcttgaactcttgaactctggtgattcgccagcctcagcctcccaaagtgctgggattacaggtgtgagccaccatggccagatttctctctttaagcaaattctgaccagtacacgtatttcagaagttatttttcttactctcctgctcagaatacttcatgacctcccttgcctcaaattgttttcactatgaaaaggtatccttggggatgacatgcggatatggtagaggaggaatccagagtaaacaagatgcatcttcctgtatcctcaatcttgaggaaaaattctaatcctaggcatttttacattacaatactatggaatagatataaagttagtggtaatttttagataaaactcaaatctaaagaaaatatttctgagccagaagcatagcactaaacctcttctctagaggaaatataatctttctagtccctggcacagtaacgaattggattgagaaataaattcactaatccaaatatgcaactagaagggtgtatatataaggctaataacaactgcttttggatgataaaaatgatttttaaataatttttttttgctcttcctgaggtttctatgtctatatagtacttttatgctacgaaaaattaaacttaacagaaaaatgcttaatttttgtatatgaaagtttcattgcattatcaaatctttatcactataaaataaaccagatttgtatttctttagtttgtttactaatatagtttcaaattaaaagagatttaaatatcccttttcttacacttacctttttttgaggtctgggggggcttgaagagtggggaaatgacagtgaaatctctcaaccacgaactcaagaagtaattcttgaattccttttcaatattactttgagaacttaaagcacgctgttcctctgaagctgattttaaacttatctgattttgaaatttttcttccatgacagttaattcattatcatgtctaaagttcctcaacacagtaggattcccttttataggtttccaaaagtaaatcattatatggatgtaaggttgcttcaaataatcacttttatttttcaaggatttctctctctccttttcaaaaaacaaagtttgcccatcacagaaatcatacatgcttatttataatcaagaagattcctcccacccctataagatttatctctcacccagagtaaaccagtaaaacagtttagcatatgaattattctggtgaatctattcaactatttgataatcttttacttattcaataatgaacagctttttagctcattaaatattcacttgctattttaagtagctgcacagtatcctactgaacatgttatttcatcagccttttattattgaatgctttataaacaataccataacaaacatatggattacttctttaaaaagtgtatctgttaattgcttttacaatattggaaaactgagataattattcttttaatgtttataaatcttaaggatatattgtaactggttcatacataactatttgaagaatttaaaaagtcaactatataacttgtcagcataaaattaatatctgaaccttgggacctgatgtttaggctactgttttgaagtttcttaaatttaacttttttttcatattgctaatacatttaaaaggttaacctatatgaataaatgagaaacaatgatagaaacgttatatacctcaggtgtgcgaaagtagagaaaaaggttatgagctacaggtatcatatgttcattccattggaaggatggttaatattagactgttaaggtcaagaaacagtgcacatgagaaattctgccttactaaaaaaaatgtacaggcattagttgggggagaactggagtgatgaaatggcataaataaaggcaaagagaaagaaaaatggattaggactagttcatttgaagaaaaattaaacaacatagaaaatgttgggacaagaccacaagacatcaaagaaagaaatttaaattgtatactataggaaaaaaaaagttaggaagattaaaaaagtagtgtatactatatagaagatgaaattgttagtttaaaacagctagaggtgacccgggcacggtggctcacgcctgtaatcccagcagtttgggagccgaggtgggtggatcacgaggtcaggagtttgagatcagcctggctaacacagtgaaacaccgtctctactaaaaatacaaaaattagctgggtgtggtggcagatgcctgtaatcccagctatgcaggagactgaggcaggagaatcgcttgaacccgggaggcagaggttgcggtgagctgagatggtaccactgcactccagtttgagcaaccgagtgagactctcaaaaacaacaacaaaaacagctagaggcaaagaactagttaaaatgctgctaaatagaaataagtgaaaaacaacgaagtacttaattatagtagaaatttcaaggatgaagtaatcaaaaacactgtggttcatttgggtatatgacaaacatgagcaaattcagtgtttcttggagtcattagttttggatccacctaaattgatcacgcagaaaacactttcaaagccatcaatgcaaaatttgcaaagtcctgatcatcacacaatacctattaaccccccacttaaacactgtttgtattctaagttggtctgatggggggtctaatctcaaatcagattcataaaaatattctgtcctatctgccgacatcaaataggctaaggcacatatacctgtcaaaactatcttaaagaagtatgaaaaactgggccgggcttggtggctcacacatgtaattccagcactttgggaggccgaggtgggcgaatcacgaggtcaggagttctagagaccagcctggccaatatggcgaaaccccatctctactaaaaatacaaaaaaattagctggacatggtggtgggtgcctgcaatcccagctactcgggagggtgaagcaggagaattgcttggacccaggaggcggaggttgcagtgagccgagaatcatgccattgcactctagcacgggcaacagagcgacactcactcaaaacaaagtatgaaaaactgaatctgtagctcagatatcttgtagcttaaacagctacaagatatggcccctatcaactctctgatcctataagctactattcttcctgtttatatttgatcacagctacatgtgcctctttgctgttccatgtacacacaaaaaatgcttcagcctcagggtctttgtatttgctatttcatctgctcagaagggtcttctcccaggtacctacatggtttgctcccttattgtttctaggtctttgttcaaatgtcctctctgtagggtagttcctgaccatactatttaaaaatatctctcttctgccttacaaacacctttatcacatcattctcactttccctgctttattttctccacagaacttgtcactctctgacataccaaatatagtacctaccagcttttttgtccattcattccatcactcactcctctacccccaagattaataagcttcaagggggctgggatatatattttttattaagtgataatcttcagtacctaaacagtaaataaatgtgtacctctctctatataaatgtttcaaatctatttttaatgttgcttgttgaacattaacattttcacacttccagaaatgacattaataaaaatataaacaaattgatataaaaatctgtgtagactaagctagaatttacaaactcttaataaaaggtgtatttaagctttctcaattatgggacaacaaataatagacttcattgcttcatactaaaatggtatttttgactaatcacaaggaaacttaaactaccatatagttataattataggtattcagtccaaagaggaagaaagttttagtgttactataagaagctgtatctctgaaaatgttagctccataagtgtaagcactcccgaagattataagataataaaatatggaaacaggcaaactctggggcgatttaaagtttctaccacttcctaatgattttctttaatagaatcattcgtgctaagtggataaaagttacaaattacaaaagaaagatacagaatacatccaataacaaattaatcagactgaggaacatttagtgtaaaactggcttaaaattttttgtcagcagaatttctcaacatctaaccctatagcaaataatacaaataacaaggagattcttcaagcagttggcatttcttcaaaacacaagggtccaattataagaaaaatatcacattattcaaagtcctacagaattagaggagaatctgtactactcatatttttgcataaattccatgatttatacataaacccaaaatataaattataaacatttaatttcagtataacgtagacaaaaacagcactaacttttcatctttcaaagtaattttaacgtaaaaggtttaaacatttattttgccaatatatttttcatttcatataggcttagaaaaaaaaaagacatccgaaatacctgagatgtattttataagtaaacaaagtaagaacataaacttaaatttctggtggaggagttaggtcttcattaaaagggttcaagctattagtaataaaatggaagttataagtaatcccttgacatgtgtaaaataaatttttttagtagatgggaatgtactgatgatagtctcttatttcttctcccagatatgcaagtgatataactaaatacttactagagccaaatctatctcaaaagtttaggtcatttttttttcctttttgatagtattcaatgagaaataacactttaaataaaactttttccatgaggaaggtacagtaattatccacctgcaaaaggaaaaaaacacaatttgatttagaatgtcaacttctaaatatataaatatattaatttagagaaagaatagtttatgaaagcataatcttgctaatccaagtagggctaactgatgcatgtaacagtaatgacacttagtggcttaaaaacacctataactctatattaaccaaaaagatacataactgactgaagaaaatctttaatgttaaatacggaatttagtctacagctaggctaagttttcaaatctactatcacatattaatgtgtgatcttgagagatttgtacttgaatataagatgcaaatagaatgactgaaatacatttcttgctacttcctggatactctcctgtagtcctctgagtaagctccaaactcaatccgtaatccaagtaacagacttaagatgttcaatattggaactctttggcatcaattaaaaaagaaacctaaatgaaaaagattagtatttttttccaaacaagaaaaaatgaaaacttaatatatacccctatataactatgtgcagtttgttttgcaaaacaaaaagccaaaataagattaacactaaaaggtataaactttcattttactgctggctccttatgtgtttcaaaattataactctacaaataaaacatccagtactgttgagagtttcctaaatgttatttttcattagatatcgacaggccacctcctcttctctaagaagagactggaatgtacatactataagttttaatgcaacacttttcctatattttcttacttctcaaatatttcaattttcctttaattcattgtcaggattaaaaataagaaaagtcttcatttagctataaaagctgcaaatgatccttcatcacacttaagagcacttaaagatataaagaatcatctggtaaatgtaaaatgcaaattttttcttgtcatttagaagacagattgaatataattttctaaaacctgacttcagatacatttaggaatacaaagaaaaagaaacaaaaaacacctaactcctgggttgttctaaaaaatattagacagtattgggtaaactttgtaattcattcaataaatattctaagcatttgtgttaagtcctggaatatttttagtggaatcaaaaattatatatttggtgaagtctttcatgcaatggttgaaaggaaataaaacaagttaagagattgataaatgatttttaaaagcaccaagacagtgtttccatgcaaacgctggcatttagttctatccactatgtatggtatattgggaacaaaatattgctggataaaaaatgagaactttaatataatatttgatcttcaaattagaatttaaacaaaaaggtccttaagcttttgaatacaatttcttttttgttgttgttgagacagtctcactgtgtcgcctagtctggagtgcagtggcatgatctcggctcattacaacctctgcctccagggttaaggcgattctgctgcctcagcctcccatgtagctgggattacaggccccggccaccatgcctggctaatttttgcatttttagtggagacggggttttgccatgttcgccaagctggtctagaactcctgacctcagaggatccacccgcctcggcctcccaaagtgctgggattacaggcgtgagccaccgtgcccagcctcgaatacaatcccctttccctttccctttcccctttcctttccctttcccctcctttccaggctggagtgcagtggcgtgatctcggctcactgcaacctccacctcctagattcaagtaattctcctgactcagcctcctgagtagctgggattacaggcgcgcgccaccacgcccagctaagttttgtatttttagttgagatggggtttcaccatgttggtcaggctggtctcgaactcttgaccttgtgatccacctgcctcaggctcctaaagtgctgggataacaggtgtgagccaccacgcttggctcaaatacaatttcttaaattacatctgaagtacttcataaatttccaaaatagacaattctgattgtaaaggactaattaacaactgcttttattttgtagattttctgcatggttacaactgaaaaccctaacacactccttgtacaaaataataccagagttatgacagactatgcaaatacactcatcttctcctgaacatcatttttaagtttaatgactttaaaacactacagataaggaaaagaacgtaaatagagcatttctgttcagatttttgttgttgttgccgttaagatggagtctcgctctgttgcccagactggaattcaagtgattctcccgggttcaagtgattctcctgccccagcctcccaagtagctgggattacagacgcccgccaccacacctggctaattttttatttttagtagagacagggtttcaccacattgcccaggctggtctcgaactcctgacctcacatgatccacctgccttggcctgagattacaggcataagccaccaccgtgcccggccttttgttcagattttaattaaattaggccaggggtggtggctcatgcctataatcccagcacagtggaaggctaaggcaagactgcttgagcccaggagtttgaaaccagcctgggcagcatagtgagaccctgtctctatttttatttatttatttagttttaatttttacattttaatttatttttttgagatggagtttcactcttgttgtccaggctggattgcaatggcgcgatctgggctcattacaacctccgcctccccggttcaaacaattctcctgctttagtctcccgagtagctgggactacaggcatgtgccaccacgcccggctaattttttgtatttttagtagagatggggtttcaccatgtcggtcaggttggtctcgaactcctgacctcacgtcatccaccctcctcggcctcccaaagtgctgggattacaggcttgagccactgtgcccagctctacttttcttttctttttttttttttgttgagacagagtctccctctgtcacccaggctggagtgcagtggtgcgatctcagctcactggaagctccgcctcccaggttcatgccattctcctgcctcagcctcccgagtagctgggactacaggcgcccgccaccacgcctggctattttttttgtatttttaatagagatggggtttcaccgtgttagccaggatggtcttgatctcctgacctggtgatccgcctgcctcggcttcccaaagtgcgtgagccaccgcacctggctgtctacttttatttttaataaaaaattttaaaaatacaaaaaagtaaaaaaaaaaattaaattatgttgacattttatatcaataaaactacaatgataatttggtcttactctgagttaaatcttgaatacaaaaaagtaaacaaagtaaacaagaccttatttttgacttatcaaacaaaaatctttggctaaggatttaagaaaacattttaataaaaacatgaaaaaaatagtataccattataaagttagaagacataagactaagaccccaatctgtgatgtgtagcaaattatttgagttttgtgtttccttagctatccaatgagtgggttggtcacttgtaagggtttttctacctttaaagttatggttaagtgtgacgttttgacaaccagaattttaggtatttaattcacatattttgatggcttttccccttcagatataaagaaatattcagaaacagtactaaatattgtcttctaagctctgttcaaaatgcttaatatattttatatttatctgtaaagacatattttaaaagtaatttcaaaacaaagggaaaactagaatttgttttatcccaagtaaaaatctgaattaatgtctatgttgaatataaatgtgcattaaaataaattcctctaatgctgcataagctttttaaaaaaacttgatggcattcaatacaattattaaattgcaattacagtattttaagagatgatacatctgaaaaattagtattaattcatttttacagaatcatactaaaaataacaagattatcaataatactgaaaagactatcaataaaactgaaaacacattagtaacattaatatacattaaaacacaactgtagagtatggtcaaccttacttcagcagcacagttaatactggagataattttagaatcttaacgccaatatttacgtgctgctaaggcactgctgacattgctatcataagagctatgaataaaaagaaatatattttcttcagaagatcagatccttgtatttttgaggcagcacaatatggcctgcaccttttcaaaatccacaaaccattatgtgctgctactttactccaaggttttattttttttaaacacacattcgcgcctaaagaatataaaaaatattttctttcaggaaaaaaagaatgcatgtaaaaaaatctatgtttaaacattataacattgatgtaatatgcataattatttttaaggagattttaagtagaataataaaacatttctacatcaaaaacttaactgaagtccattctgtgcccagcacagtgctataggttaggaaacacaaagaataaaatgaggaaaagaaaagcatttatttgctatgccaacttaacagggcaatacaactaaatgcttaaacttttgaatatattcaatatatgaagttatttttccttgtataaacaaacaagtaaatttataaaatttgatctttaccttggtaaaaggagaatttacaaacattttgttccttgcagtacacctttcaaaagacatcttcatcaaataggtaagacttcacatcaagggaaaaacatgaaatgacatacaagagctcagtttcaataaacttaagctagcaaaatgcaaatatacttttaaagaaaaatactttaattctaaatgttaattttattaaatatctaattaagacattttaattccaaatatagttaagaaaaaaagctctaaacaaactaattctcccttaaataatttgttattaataatctaaatattttactttcaacattgatcttcatactagaagttctcttagagttggatatcatttgatacagtaattctaaaatatgaatccttaagtaattctaaaatatgaatccttgggatgatgagttaatttggtaccctgagatgagaaataaaacaaatcccatagctcttaatcttcctattccctgtttctggcccatttaccaggtaaggaagaaactcctagtttccactttctcagatgtagaaatgaaattccttttctctaaaagatatcagaaaattgccaccactctagtggtgccaccattcaagcctggacaatcttttttgccccatgttctcatcattaaaatgactatgctaaagttacatctattacagaatagtaaggtgatgtacacaaccaaagcactaaaatttgctcttccattctaatatctaattacttatacaaagcacagggtcacattccatatgaaatttttctgagtatttttcccattaataaaaaatatatgtagctaatctcctatctaagcaacctggatttcacatataactctgctccttattgtctcaagtttctgcacaacgttttttaaatttttattttttctttttttaagagagtagtttccgtatcttttagagaaaaagaaattcatttctacatctgagtaagtggaaactttaggagtatacttccttacctggtaaatggaccggaaataggtagggaataggaagatcaagagctacaggatttgttttacttctcatctcagggtactctgttgcccaggatggggtacagtgccatgatcgtagctcactgcagccttgacctcctgggcttaagtgatcagtccaccttagcctcccaagtagctgggactacaagtgcacacaccaccatgcacagctctttacatttttattttattgtagagacaaggtcttgctatgttgcctaggatgtcttgaactcctggcctcaagcaatcctcctgccttggcctcccaaagtcctaaaattacaggcaagagccaccatgcctgacctgcactttttttttattttttgagacggacagggtttcaccatgttagtcaggctggtcttgaactcctgacctcaggtgatccacctgccttggcctcccaaagtgctgagattacaggggtgagccactgcgcccatcctgacctgcacaatttttaacatgtaaccaagataaatccgtttgcattcacttgagaaatatataacatatatttgtatttatcaattatattaaggaattgtccttcagggtccccctcatcacatacattttccagataaaaacttaaacataatttttttcaaatataaaaggtgcctgtaaattatttaacaaatattttattgaatatctactatgtgccaggcactgtcccagttattacactagttggtagtataccagatagacagtctcttttcagaaagagtaaagtcattttaagacaacttaaagtgaaggatcttaagctgaagaatttagtgccagcaaaggatggtttgagtttcagaaagacgtttggttttaaaaatgtcaagataacaggagaagcggctttgaggcagcagatgagttcccagacaccattaagaaaatcgctggggagaaaggacaggtttttttttttttttttttttgagatggagtcttgctctgtcgcccaggctggagtgcagtggtgccatctaggctcactgcaagctccgcctcctgggttcatgccattctcctgtcttagcctcccgagaagctgagactacaggcgcctgccaccacgcctggcgaattttttgtatttttagtagagacggggtttcaccatgttagccaggatggtctcaatctcctgacctcgtgatccgcctgcctcggcctcccaaagtgctgggattacaggtgtgagccaccatgcccagcccaggatgggtttttaatgctgataaatatgccctattctggaagaaaatgccacaaaggacatttattagtaaggaagaaaagcaagcaccaggatttaaggcaggaagagataggcaaactctactgttctgtgcaaatgcagtcggtttgctgcccttagccataaagctgctaatccctgagcctcaaagggaaaaaacaccagcagccagtcttttggttgtacaacaagaaggtatgaacgagaatgctttttctggattggttccatcaatgctttgttcccaaagtcaggaagtaccttgccaataagggactgccttttaaagttcttttgatattggacaatactcccggccacccagaaccacaagttcaacaccaaaagcactgaggtggtctacgtgcccccacacaatgtctttatttcatcctctgtattagggtcataaggacctttacagctcattatacattgtactctgtgggaatgactatcaacgctgtggaagagaaccctgatagaataacatgaaagtctggaagaattacaccactgattatgccactgttgttacagaaaaagctgtgaatgccatcaagtcttaaacacattcctggagaaaactgtgtccagatgatgtgtatgacttcacaggatttatgacagagacaatcgaggaaatcatgaaagagactgtggttatgacaaaaaaaggtatggttggggaaggccgaagggtttcaagatacggatctttgagaaattcaacagctaacagacaccacaccatagaaattaacagacaacttgatcgagatgatcggttctgcactagtgccagatgatgaggaagacaacatagaagcagtgccagacatatactgctggcactgacattagagagtctggcagaagggttgcaattattcaagactacttttgatttcttttatgacatggactcttctataatatgggcactgaaactaaagcaaaaggtggacagacgattgttaatatataaaaacactttttagaaaaataaaaaaagcaaaaaagtcaggcagaaattacgattatttctgtaaagttacaccaactgtgcctggcctttcctgcctcctctcccacctcctccacctcttccactccagagacagcaaaaccaaccccttttcttcctcagcctgctcaatgtgaaaacagtgaagatgaaggcctgtatgatgatccacttccatttaatcaatagtaaatatattttctttagcttactttaatatggtatatgatatgcataacatacagaatatgttattgactttatgttattggtaaggcttctggtcaacagtaggctatctgtagttgagttttagggaagccaaaagttatacatagattttcaactgcatggggattggcgcctctaatcctcacattgttcaagggtcaattgtatttttaaaattgtggttcaatatacataaaagtcaccattttaaccagtcttaagtgcatgcttctgtggtataaatatgtttgccctgttgtgcaaccctccatctccagaactttttcatcttccccaagtgatactgcttaaacactaactgtccatctcctctgcccctcagcctcaggaaatcaccattctactttctgtctctatgaatttgcctattctagttatctcatgtaagtggaatcatacagtatttgtccttttgtgtctggcttacttcacttagcataactttttcaagattcatccatgttgtagcatgcaacaaaattttcctctttacagttgaatagttttccattgtgtgtgtatacattttgtttgtccattcatgtgatgatgggcatttaggttgtttctgtctttggactattatgaataatgctgccatgaacatggtgtacaaatatctttgaaatccttctttcaattattttgggtatatgtccaagtggaattgctggatcttacagtaattctatttttcatttttttgagaaactgccatactgtgttctacagtggctacagcattttacattctcaccagcaatttacaacttctcccatcgttgccaacatgttattttctgtttttgtttttgataatagccattctaatgaaaatgaagtggtatctcattgtggttttcacttccattttcctaatgaatagtgatgttgagcatcttgtgtttgctggccaattgtatatcttctttggagaaatgtctatttaagtcctttgcccattttttgactgggttgtttactttttattgagtttatacattctggatattaatctcttattagatacatgatttgcaaatattttctctgattctgtggactgacttttcacggtaatagtgtcctttgatgcacagaagtttaatttttttttttttgagatggagtcccattctgttgcccggggtggagtgcagtggcacaatctcggctcactgcaatctccgcctcccaggttcaagcaattctcctgcctcagcctcccgagtagctgggactacaggttcccgccaccatgcccggccaatttttgtgttgtttcaccacgttggccaggctggtctcaaactcctaacttggtgattcacatgcctcggcctcccaaagtgctgggattacaggtgtgagccacggtgcctggccagaagttttaaattttgatgaagtccaattgatctacttgttttgtctgtgcttttggtgtcatatctgagaaatcactgccaaatccaatgtcttgaagcttttgccctttgttttcttctaagagttttgtattttttaactcttatgcttaggtctttgagttagaaattaatttttagttactttttgtatatggtgtatggtaaggatccaactttgttcttttctggtgtggatatccaattttcccaataccgtttgttgaagagtcctttctttactgaatgaggatctttggtacttcttggcacctttggtgaaaatcacttgaaaatatatgcaagggtttatttgtgggccctcgggtctattttcatgaatctctatgtctagctttatgctttgtaggaggttttgaaatcaggtagtgagacctccgactttctttttaaaatttgttttggttatttcatgtcctttgagattccatatgaatgtgagaataaatttttcccatttctgttaaacaaaatttaggattttgataggaattgcattcactttgtagatcattttgggtagtactgtcattttaacaatattaagtcttccaatccataaatgtgggatgcctttccatttatttattgtctttaatttctttcagcaatttttttttgtagttgctgtacataagtcttttacctccttggttacgtttatccccaaatattttattctttttgatgttttataaatggaattgttttaatttcctttttgaattgtacattgttagtgaacagacacacgattgatttttgtgtgattttgtatcatacaactttgttaaattcattagttctaaccgtttttggtggaatcttaagggttttccagatacatgattgtgtcatctgtgaagagataatttttctttactattatcttttgtaactaaaattggtttaagggctttctggcaatctcggtccattcattctctaattctcctagaaacacatcagacagctgtgtcccctctcttctttcaaacttccaacactttccctttcatttttactttcactgagaaaacagaaactatcagaaatttcctcagttcccaccaaatctaacatgtatctgtgtgcatacaactcttacttctttctagtatcaatgaaccctcactgttcataagacaaattccttctctttgatcttcacttacttacttaaggatattcctttagatattctcctgcatctttaatcttcctctctgttgcatgattcttatcagcaaaagtgctacaatttatctcagcataattttatctcttaaagactgttgctatctgtaataacactgcaattttatcactgatgttttagtaaaccaccatggaggaagactttttccttgtctattttccttttatttctaactatctgatttatatttgaaagcctgaaacatttgaactattaaaatatttattataattctccagaaaaaaatatgaaaattcttgatttaaatgtattaacaaattgaaagattcagtggaacaattccaagcacatagagaggatatatctctttcttttcttgtgttcgataataataatctcctcccagtgtggtatggtttgatttttcctttccacttatcttcgccttaggggctgccaaagtaggttttatactatgccttcaaaaagggactattttaaatttaaaatttccttgagtctataagtttagactatttctactcacatgatagggatattcagatactaatacatgccatcaatatggttttgctagtttgttgtttagacatgtccttgtatggcactatgttactttaggttttctgaacatttaattttactttcaatccagcatcaacacaatctgtaatggtaattacttcctccaaatatgccttacttctattctgcacttgaagctctaaggaactgtgtatatacagtgcctcggccacagaatgactatccttgctcaatgacagtggaataatacacagtatgtcagtattataccagacagaaaatttataaatagctattcttcaatacctttacgtaaaggcctgagttatggggtctaaaataaatgcatgacaatttcactaaacatggtaattttttttttttttttaagacagagtcttcttttgtcacctaggctggagtacagtagcgtgatctcagctcactgcaacctccttctcccaggctcaagctatccttccacctcagcctcccaagtagctgggactacaggcctgtgccaccacgcccagctaaggtttgtattttttttttttttacagacgtggtttcatcatgttggccaggttggtctcaaactcctggcctcaaatgatcctcccgccttggtgtcgcaaagtgctgggattacaggtatgagccaccatgcctggcgaaacatggtaatttttttattaccctactatgaagtcttataaagtgtccaaatatataacatttacaggaaagattaaaatgtgcttttgcttgattcttgtttctggaatataaatacttaaaaacaaaaaggctctattaactagagaagatagctttaaaattcagtgttaggaatacgcattcaataaaataataatcagatttaatccaacatgactgttttataatataaaaaacctagttgttgagtttaggcaaatataaagttttactgtttctaaactgccttgatttcttctgatgaaaaaatgactgaaagattgcttaaaaactgtgtatgaagtagatttcaatctggaaaatttattccagaaagtcagactatatatataagccccccaaatgttattttaatattagattctcttataatcatttccttatacaaaaagttaaacttcttagaaatcaaacattcatattttatttgatgactttacttcctaaatactaagtatgactaaattacaaatatatcatgttagtcaagaaatgcaatataaaaaggtttgataaatatgctatttacattttttcttacattcttcttttgctcccttttatgtcctaatcattcatacttgcccattgttattctttcttaacactcaattttcatcttgtgtcaatcatcccttgtattcagctagtcaataaaatgaattgattctttaagacctcagttcattgatttcttcgccattcttgatttcataccttaaatctggatttaagtaccttataaatccaattgcattttagctggacctcctagtccttaatcaattaataaatcttcccaaagttacatattcaagaatgtatctaggctggacgaggtagctcatgcctgtaatcccagcacttttggaggctgaggtcggaggattgcttgagcccaggaatttgagagaccagcctgggcaccatagcaacaccccatctctacaaaaaaaaattattattattattttttaacttttattttaagttcagtggtacaactgcaggtttgttatgtaggtaaacttttatcatgggagtttttttttttgtttgcttttttttttttgagacagagttgcactctgttgcccaggctggggtgctgtggctcaatctcggctctctgtgacctccacctcccaggttcaagtgattctcctgcctcagcctcccgagtagctgggattacaggccagcgccaccaagtcgggctaacttttatgtatttttagtagagatggggttttgccatgttggccaggctggtcttaaactcctgacatcaagtgatacacccacttcagcctcccaaagtgctgggactacaggcgtgagcctccatgccaggcctgtcatgggagtttgttgcacagattatttcgttacccaggtattaagcctagtacccattagttatttttcttggtcctctccatcctcccaccctctatcctccaaaaggccacagtgtgcgttgttcccctctatgtgtccatgtgctctcatcatttagccacccccacacaaaaaatttaaaaatcagctgggcatctgtaataccagctactcaggagctgaagtgggaggaatcacttgagcccaggagtttgatgcagcactgagccataatcatgccactgcactgaactccactccagcccaggtgacagagcaaaaccttgtttcaaaaaaaaaaaaaaaaaaagtaatttctagtttcctaagtagaatctctactttctgcctaagtatcaaggtctgtataattaagatctatccaatgtttcctgcttttctccaaagaaaacacttccattccagttaaatggtctcttttaagacattaacaaccactaagaacctttgaatacagaaaattattctcattattaggtactgtgttgggcagataactggttccctattccatacttatctctccattcaaaatggactagctgtgaggaaatctttactagtatagaccatgccatttcttcaatcctttatcttagtccactggaaatatcatcatgactccatcccttaaatctctgcttttacgtttgctggctgaaagaaaagccactttgcctaaccagatacagaaagagccctaatggctagatgtagagccaaagaaaagagcttctaaaaaaaaaaatacaaaaatattctgaagacagaatcattcagtccttatcctttacacaacaaccatagttccaagtctggtggtttatattctgggctgtgggcctttgatataccagaactctccattcttataatcttccaacaaaaaaaagtagttatattgaaaggtgagacaaaataagtaaattaaatgtcttgcttaataattcaacttgaatataataaatctgagtagatgggaatctttaaatctcttaagttggttttctatgttagaatttaatatattttaagaaatatggaaaaaataaattgtatataagttaatgttttttccttgttaatgatttacagctctaattttatttccaataacattttttagacattttcttacatgtgctctattatcagttcatctgtagtttacataaagttgttattgcatttaacaaaatcatttagaaattctttttatttatttatttctgtccttacaatctgttctcattgaaattctagtcatgtctcctaaactacagaatcatcctcagtacaataaatctactggtcaatttctacattttaaacttactatcagtaaaataaacagcagaaatttatacaagcacatctagtagtgaacaggtgttcaacaaatgcctactgaatctaaatttacaggatttgaaattctaacacacttaagtgtttcagtgaactgcagctcaacatgacccgatagtattgatgaaaaaaaaagctagtgcaatcagactgcactatagaactttattcatagatgcagtgtgttttgtacctatactacattaagtatattgcaattaattctaaatacaattatttaaaaaggaatactaacaaaatgtaacagatccaaagtagggtatccagaaaatattggtctagaaattaatatggtctagaaaaaatatggtctagaaattaatgctatatggcaacagtggaaggacctcagaatgtacagcttagagaaaagacataaaaacaatttttagacagtagatctagggccagagaacaaagttataaacagatcttcaaatgatgtttcattcaacattgtttcatttttaatactgaagaggaaaaatatagagatttctgtctggggccacagtgtgtggagtttccacgttctccccatgtctgcatgggttttctcccacatcccaaagatgtgcatgttatgttagttggcacatctaaattgtctcagtatggctgagtgtcggggtaggaggacaccctgtgatagaatggcatcctatccagggttggttcccacctcgcatcctgagcttctaggataggctccagccacctgcaaccccaaagtggagtaagtgggttggaaaatgaatgaatgtaaattactgcaaaataaaaacttgtcaaatatacaatcatcatacaaatgcacaacaacaaatgatgtagtatgaaagtgctcagcaagcatgccatatttgttattgcttgtttttgaacaacatggtagtagaaggtgctccttacaatttctgctttacaaacatttattccttattttaactcaccaccactatgaccatcatcgctgactcatcaaaaattgggtaaatgatgatcttgtttctattaaactttcttaaatgtatgtttaactcacatttatttcacaatgtttaataccagaaatgtgttggatctttatttagaaggtgatgttctttgtgaccagaaataggctataggaacttaactcttgtttatatcaattagcctatggtgaaactggttttattctatgtcatttagcttaaagctgcagtttccaagaatctattcattactttaagtgaggacttactgtactaagttgaaacctgccctctgatgagaaacttattttatgttaattaacataaatgtaatttataacgtaaaggaaaacatttgtttactatgattctaattctaatattctagggtcaaaataaaattaataaagttcaatttaaaataaaattgacttagaaaaatttagtgtactttacttattttgtcttgttaaggatttggaggacagattgccagttttaagttccgactacagggcaccaaatactagaggcataaagaaacagctgaactaaggatataaaaactaaaagtaataatttaaaactgaggtgtactgaattttaattcagatattgtttccctaaacactttatttatttttttgagatggagtctcgtgctgttgcccaggctggagtgcagtggtgggatctcggctcactgcagcctccacctcccaggttcaaactattctctcacctcagcctcccaagtagctgggattacaggcacttgccaccatgactggctaatttctgtatttttagtagagacgaggtttcaccatgttggccagactggtcttgaactcctgacctgaagtgatccacccgtctcgacctcccaaagtgctgggattacaagtgtgagccaccatgcccaactgtttccctaaacatactttttgagatggagtctcgctcttagttgcctaggctggagtgcagtggcttgattttggctcactgcaacctctaccagcatacatgctattctcctgcctcagcctccccagtagctgagattacaggcacccgccaccatgcctggctaatttttctatttttagtagagactgggtttcaccatgttggccaggctggtcttgaactcctgacctcaagtaatccacctgcctcagcctcccaaagtgctgggattacaggcatgagccaccatatctggcctccccaaaaattttaaactgaggttctgaaatttgaccagtggtagagtacttgaaaggatggcattcttagtggtaatactgttaaatgtatcaaaacttcattttcattagctacaaatagttttactataagaaacagattttataagacattttaaagtaacttgtttttttctttttattttctttttgagatggagtcttgctctgtcacccaggctggagtgcaatggtgcaatctcagctcactgcaacctctgccttccaggtttaagcagttctcctgcctcagcctcctgagtagctgggattacaggtgcacgccaccatgcctggctaatttttgttatttatttatttatttatttatttatttatttatttttgagacagagtttcactctttcgcccaggcaggagtgcagtgacgcgatctcggttcacagcaacctctgccttctggtttcaagcaattctcctgcctcagcctcccaagcaactgggactacaggtgccggccaccatgcccggctaatttttgtatttttagtagagacaggttttcaccatgttggacaggctggtctcgaactcctgacctcatgatctgcccacctcagcctcccaaagtgctaggattacaggcgggagtcactgcacccagccaaagtaacttgttttaatggaaaaacaagcataaattaatttagtggatataacaggaaaaatgaagcttatagtctaggcaaaaaggtgtgataattgacaacatatattttaattatgcattcaatttattcctcttttacatagagattaaatttaaaaactcaagtttcagactaataggtagtagattagggcaaaagtacatagaataagtcaggggatgttacttattgcatttataacttgaaatccccatgacagcagagttgattatatctgtacatttattttctatttaaatcaggccccatgctgttaaattctaccttttgttttcctaagaaaacaaccaagtaacttcatactaagaaattccctattattcctctttgaatcatccatcttgaaggtaagaagttgttcaggttgaggaaacaagcccaacccctttttataattttggcactaaaaatcaaattttatggtgcaattttattaagagcgaaaacacagccatcgcttaagcataaaagctcatatttaactcaattattttgctaaacatatataagacaaatatggaagaatgaggacaaggaacacctggcatttttattaaatgtctaattctcaaaaatagcaattatttgaacaatgaaaaacagctgcagcatattgtgaactttctctatattcataaattatagaatacataagagcctagattttatatatttactaaattaatggcacttcatcatatcaataggtttataagacattctctttactaccaaatgctgacaatagctggtacctttatgaattttttgggttataacactctttcaccactaatccaactgccaaaagagcaatttattttttctcttttggggaattcctttctcccagaaacattcccatttttaaaactattcaagataattagaatttcctcatcagtgacacaggtatacagcaatttacacaagagtaaatttctatcacaataattaaaaataagagaaactttggctatgtctagtgcataatataattacatcattatggttttattgaaagcacaacagattttatatcatttgccatatatcaattacttactgctccactgataaaaacattgattttttttgcagtattttcagtcagtcctacgtttgtacattttataatttacaattgacaatattttctaggctgatgattacataccattgcttttattgctaacctgataatacttctaaaaacttatattgataactagtcatatgtgagaaatagtttttgttatttctttttactaggcttgctcttgatagcagccaaatttaataagtctttggaattaggaagtaatttatctctatcatttttgtttatggaactaacattgacagcactggtgaatattctgcttcatcttttctttccctatttataaagtcaatgttttaagatttttattgtagattattaaaaagagagatgtaatattcttaactgctgacaatgttttgagatttttttaagcaccaaatatatatttaaatttacataacagatgtcaacatgtatttacatttgcaggtaaacatgtttacatttacaaacagaaatatataatttaagtgtctgtattcgaaaatgcaatgtgaaaaataaaaataattcaaaaaagaaaaagaaataaagacatataattatttctgaattttttgttaagcagcgaaagtttaagatctctaaattgaaaaataaacttgaaaaatactccatctctatatttaatttgtaaaaatgaaccccaaactgccattgtttgacaggattgtatacatgaacatcactgttctacaacttctagaacatccacattccacaaatgaacagctttaaaaaaaatcccatcttaggcagggcaaggtggctcacgcctgtaatcccagcactttgggaggctgaggcgggcagatcacctgaggtcaggagttcgagaccagcctgaccaacacagagaaaccctgtctacacaaaaacaaaaaacaaaaaacaaaattagccaggcgtggtggtgcatgcctgtaaccccagctactcaggaggctgaggcaggagaatcacttgaacttgggaggtggaggttgtggtgggccgagatcatgccattgcactctagcctgggcaacaagagcgaaactccatctcaaaaaaaaaaaaaaaaagaaaatacatctatctatctagatatctaaaatcgatctatatatagatatctaaaatatatctatatatgtaaatatatattatatataaaatatatgtaaatatatattatatgtaatatatattatatataatatatgtaaatatatattatatatatgtaaatatatattatatataaaatatatattatatatatgtaaatatatattatatataacatatgtaaatatatattatatatgtaaatatatattatatataacatatgtaaatatatattatatataacatatgtaaatatatattatatatatgtaaatatatattatatataaaatatatgtgtgtatatatatatatatatcccatcttttttttttttttttttgagatggagtctcactcggtcgcccaggctggagtgcagtggtgtgatctcggttcactgcaagctctgcctccgggttcacggcattcccctgcctcagcctcctgagtagctgggactacaggcacccgccacgacgcccagctaattaaaatatatatcccatcttaaaaaataaatggcattaaacaaacattaaaaaaatgatagaaggggaacacacaatcacacacagcatcactgactattgccagtcactatgtacctattattctgggtattgtttaattggaaacatcaccattttagaatctaagattaaggggaatctacctagaacagacaacagaaagcattccaactatgaaatatgataaatggcctatgtttaaaagatgctggagagtatccaagaaagactgctagcttagaaatttataaaggagatgaaatgaagaatgtgatattatctgtgcttatgtatctgttagaattcaatgatacctatttcttgttgaaaagtggactgccctccattctgagtgtagtacgaattaaaaagacttctttttttaaagagttaagttgaagaagggctgagctggcttccaaggcactaattaaggaatccaagcctgtactatataggattctttagggatctgcagatatttccattctaattttccagagacaaaaatgtaaccgggagaaaattagaaaaagaaagtgacctgtggcatttgactactactttgcaaactggcttattattaacagttttcaacatttaattgatcccccacttaaaaattctcaccttattgagttcaatggctgatcgtctatgatcataaggccatccccaacatatacacattatttgagtcactgtgagataatgtaataaaagcatctgaagcactagtttcatttaaacagagacatgccctcaacatcaagaatagaaagtcttgcgcttgagtttttctttagagatgcagaattagctcaaggaatggatggaaatgacattttttggtaactgattttaaggtctcgaatacttttatggaaataagtatcctgcgcattttatatgcccttgatcttgtgagtttttctagaggcataatattaatttcagttaacttgttaaaattattctttcagaatttctaagtgtctcaaaagttaaatgaattggggaaaaatgtttcttattctaaaaaagaggtatgcatgtatatatataaaaggaaggaaaaaggagaaaaatcctctttttgatatttgcaggaaatatctgaggtttagcttgggaggcgatggggcaatccagggcgagaaatgatgtcttgaataattaaggtgactactcctgaccttcaactaaacagactaccttcctgtctaccctgaaggtatcactttggtgttgctatccactgattcacttctgcaaacttccctgacagaagaaaggaggacttgcagctggacactgctccctggctcttcggagcggtttctttacactatgcatggaccacagatcatctgctgccatcctactcagggagagcttgctaaagatgcatggtcctggcccccacccaaaacctctgactttgaatccatgtcagaaatcgtttaatttatgtacttacttgtttatctgttttgttcactgctatatctttggctcctagaaaagtactaggaacatggtagatactcaataaatatgtactgaataaatgaaaaaaaaaaaaaaccaacaaaagaaagggaaggaaaagggattgccttcatgtttctcccacctcctcaagttgttttttttttttttttgagacggagtctcgctctgtctcccaggctggagtgcagtggcgtgatctcggctcactgcaagctccgcctcccgggttcatgccattctcctgcctcagcctcccgagtagctgggactacaggcgcccgctaccacgcccggctaatttttttattttcagtagagacgtggtttcaccgtgctagccaggatggtctcgacctcctgacctcgtgatccgcccacctcggcctcccaaagtgctgggattacaaggcgtgagccaccgcgcccggccacctcctcaagttttaacagctaaatgttaagctcttcacaaagaagtctcaagtgtaacctaatgaaattaaaaacagactttacaaaatcatttctcaagtggagagaatactctcaatttataaaaccataagaccaataaacctgaataatgagtactaaaaaagacaattacctatttgttaattcctttgaaggaaaagggctcaaaattgtgattctcagacttggagattatagggcctgggtataaaatacttccctaaataacttaccaaggcaatggcattattcttgctctaaactattaattaacatcaaatctcaacgtgtagaggggctaggagaggttagaaagttaccataataggataagcagggaaaaaaatcagaaataaaccagaacatgacaccaaacagtaatagggagactcagagttaatacttacaaggtaagaattgctgagctaagtagaggtctcttttattgtggtcttcattctatcattattaaacctaggaaaaagagggaagactttaaaaatttcagcacattatataagttagaacatttcaactgaggttgccaccgctgtattctgatccttatacagcacagaacaatcagattataaacacccagcagcatttgtatgtttcagcccagtgcagcattcttgttagtttttttgttaagacatggggtcttgctctatcacccaggctggagtgcaatggtgtgatcctaactcactgcaacctcaaactcttgagtttaagctatcctcctgcctcagcctcgcaagtagctgggattacaggcctgcatgccactacatcctgcttatcactggcttttaaaatttgctattctattacaattgccctcttgaagtttaagtcaaaaattttagtcaaagctaaaactctaacttggagcccaatgagcttctggaggacatcatatatttgcagatattttaagataaattcaagatcatattccaagactgattaatctctctcacacacataaaattgcatcatctataatccatgtattgtatattgcacaattccaagtacacaaaggaaggaatatatgacatttttaaagatatgctagtaatctgagttggttagcatgtttggcttctgtgggtcatgattctaagttgtagttgttacatcaactaatagttaagcacttactataagatacagaatagaaaggatatgacaaattcatccatgttcttaacagagcactgcaagtatacgctttattgtagactaatcttaacagaaaaagaacagcatgtttttaaaaatttcaaaatcatttgcttcaaaattcacagaaaaatcaagggaataccaaaatgaacctccatatcctatctctggactcccaatccagctgtactgaaatctaaaactatgccatacttacttccctttgttttttatgaaaattgattacacatacagatgatgtcctttgtgagctataccctgattccattccattctttccaaagatgcaagcataatcttgaatttgatatttatttcctatgtttttacactattactaccaattcaagaatttaaactttatcattgctttcaagcttttgataaatggtataatatcatacatattttatatacgttactctgtatataacctttatgcaacttatttgtttgctgaagtaggatattcacccatgatgataaacacagctctcattttagtagctttacagttcatcacatgactatgtcacaatttgccattctcttcttgcttaacatttacattgctttcatttttttcctattaaaaataaccaagacttttttctacatgtcttgagtttacctagagcatctaggaataaaattgttgggttcaagcctattgtatcttcaactttacaaagatattgctaaatgctcccacaagcagcatatgaagagttcctcattttatatttcctccaacatttggaagcatatttaagaaaaacagccactatctatatgaaaatttaaaaattcataagtgatcaattcctttggttttcatcaagtattggtttaacataggtatactaatgttccaaacaaagagaatagactgaaatttggcccaaggcacttacatgaaaacaaagctctgataacacagattttcctcatgtgactgaggaaataccaagacttaatctattttttaatcagccgaatttaagattcaagaacttaatctagaaatgataagattcctaattaaatattaagcttagatccaagatgaccaaagaggggaaaaaaagatgcaggaaaagtagatagtttgtgggtatgaacaatccctcctccaagttcattttgggcagtgcttctcacaaatgtggtgctcctaagaaaaatctcttaaagcttgtaaaaaaatgcaaattccaggtctggaaaaatgtttttattttattttttaaattctaggttattctcatacaggtggtttgcaggcaactaagcagtaagtaatgattaaaaatgaggtgctttcaatagagaggattatgtaactcatgttttagttaggggaggtaacagtaattaatatgttatctgttaaattacataaacttttttttaaaaacctctagcattagtcaacaacaaaaaaaaagtaacctcaatttatggctgaatatgcttgacttcacaatgccaagaaaggttgtgggctcatttattttttcagataactagacacatactatgacaaagctttttttagtaatattaccagggaactaatattctgaatttactgtgattggcacaggaaaatattaagagtgagagtgatcaggagtgattttaatgaaggtgaccagaaagcaactatatgattaccttttaaatagaatgctattgcaaatgtcaaactttaaacgggacatttggctttatacactaaaaaaaaaaaaaaaaaaaaaaaaaaggcattagtagtttcccaccaagaccgctacaaataaattcagaacatttatagaaatccaacattcacacttccctgtaactctaacctattgaaattagatgtaaaaggaagaaaaaaaatagaatatttaggttataaaaatcggcgcaaattcaaattataaaaataaaaacattcttctatattatttgaaattacaaagtcctgtttccaaaagatttagaataatctaagctttctagataaaaagttcagataaaagatatttcagtgagaaatggtaaatagaaaaagtaagcagtttagtagtaagaaaaaagacataagttttcatctgttgcctgcttttagttatttacaacactaagttaatatagaatgttgttttctttcttttattatagtgaaatcaacaagaattcggtcttgttagactgggcttttataaaacaaagataatgtagtccaaaagtgaaagaaacactcctgtgtggccatagccagcttttcttttctatcctcaatatattacctaacttgtgatatcagcaactaattataatttttttcagtctacctgcttaaaagtgaaaacatgaaacataccatatatacatgaaacatactatatatacctccagaagcaagacaggttttccattctaatggatggaattaactgaataaaaattaaatgaactaaagccacagagaaatagtaaaaaataatagagtctaagaactacaagcatctactgttctctttatgctgcaacctttctgctaaagaatgtattctctatactgtgtatgtggtacagtgacagttgggctcttcccacctgggtttgtaaaaacggatgggtgcaggctcctttggccaccattattgcatattgatgttattctgcacaacagctgacaagcagcatcgatctcccagcctctgctcccagctgtaaggggtaagaacaagggctgtggtgataacttgtttattcactgctgttgctgttgctgctgctgcttcttaaacagcaagctgagaaaagaatatcaaactgacacacagaggaaaaatggttcagacatcaatctacctctcaaggtctgcttatatcactatatgataaaattatttttaaaataatttttctttaaaaagtggggtggggagagaaaaaagacaaaattggtgttttgattataaagggaacctataatgtatgcaaggaaaaggaaattaatgacatatataataatcttccccttgtaagtctagatttaaccgctcaattatcaaaattctctgaagagttttaaccaatgttggggtaaattcattgagagtaacttccctacctattctcctggaaaataagaaagtgtaaaactccaatcaagaaatgacactttattttgcttacaaaatgcctctagctcccaagtgccccatatctaatcaccaccatatgtttgactttagacactattagcaaagaaataagattttagtccatactgtttttgcataaatcccattaaaaaaacttccatatgcaatttacctattttaaatgtgcaatacaaagttaaaaacttagtaagtacatagtattaattgatgagtaacagaaatagaaatattcactgttcaattacctttaaatgtaatgtgatgctatttatagacttacagctttaactgtaaatgcaactcatcttttagaaccttaagcaacttgtgattcagaaaaatataaaaagtcagaaaaatttggagatctataaactattaaaaagaaaaacccacataggctagaactggcaagtaagtttaaataataatacctaatcaagaaggctaagtttgagacattttaaaataaaagtatgaaacagtaacaatattttaaatttagatattttgtaacaaatcaaaacccaaccccaatcttctatttttatcacaattgaaaaaattttctgcttagcaactcaatgaggaacaaaaaatgttaataataataaaaataattctgaagaccagaggataacaagatactttaaatatatttgttttgtatgaaggctataaaataaaaaagactaacagcaaatcctcaagcaagatttttaaaaattcagacacttagaaacagtaatggattaataaactattaaccagtgggattaatcagtctcagcagccacatgtgaaacatgcttcacatttctcctctaagattctaaccatgaaaataggaaagtaaaactaagtcaaataatatgttaatgaagtatcaaaagtgtggtttgtggtgctgtgaatagaaatttcacttcaaaatgtatttaattttaaaccttcacattaattaaatattaccctttgaaaaatgcttatcagaaaatataattctgatacattagatctcatttgaagaaaaactgaaagaggttaaggatgttatttgctagtttaagaaaaaacacaaaatacacacatgaacaaaactgcttcaaataaatatttttaaaacttttatttaaaaagttaattgtatctattatttaacaaattctcatcaatatataaaacctctattaaaatgtcatagctgacaaactgcctaaaatgtaacatatccttataaactagcattatacatctctgacaaataataattttaagttccttcatatgtagatatgttaagttacctctattctagtttattcaaatattctttctatactaaaaaaactatttcagtaagacaggaacaatgatggtataactgtattttagggacagctaagaatttttcccaaaagtgaatgttatttaaccctgattgtgcatttagccaaaaacataaatattgaaaaaatgagatacaaatcactgaaaaaaagataaaaattaacacaataaatctcttcccccaaattccaacataattaactacacatcaaggcttaaatttagataatcaggtttgcaaatttaaaacggtcaaaatctttacaaaatgtcttacaaggggtagttaaaagagagccaatcatacacagcagttgaactctttgttaattggcctcctaaaataacccatactcctaattaggttaaagtttctcaccctgtaagaattgaccaaatacaagtaaactgttaatatttgtattgattcttttagatatgaaattatttactaagctaaattattagaagtttataacccagtataataactataggaagaacaattatatgatgctaaatatttgtgttcaaaataagttttgatatcttcaaagatcacaaatcacaaactctctaaatttggacgactctgtggatttatatcttatctaccatataaactcaaatgctgtctctcttttcctatttaactcattaaggctgttctaaagatacctgcattgaaagtgacaaactgaacctggattttttttcccagatactcaggtaactgtattttccacttttcatcttaatgttctctaacctgaaaaatacctgttaagtcagtgagggaaaaattgtatttattttcattttattcaaactaagctgctttttcataaaaatctcaaatcaaacatatgaagacattccatacctcatatttatctgaaccacattacagcatgacaccaatataaaagtatctaaacttcacccttatgttaaactctgatttctaaacatctttacattttatttaacttcaactgttaattgattcattcctggtttatctacctaatatccaatatagaaatatcaaatttcagtttttagtattttgatatgtatttcaacattcactcttaaacacacctcagaattcatctttaaaaattttacattgttggaagttaaaagcagttctatgatcgtgatgatatacttcattcttaagactaaataataattttctcatgaaaacaaacctttgacatttcctctaagtatataaatatttttaggtgaaaaaattaaaaaaaattgtattatgttagtaaaccttactttagcaaatagtttttacacaaataaacgcacacatatatgtacatataagattaatactttactatgaaagaattaaccaagtaatacttagtaatactgttcaataagttcattttcactataccagattaccattttagaaaatgaaagttgtattagttaaatactgtctgaaattttcaactaaaactataaaaatcactggaggtttagggattctacaattttatttttagagtctgcaacttttgatattaacaactgaaatattttactcagtgtatgttgagtaagatactagtaatttctgcttaagaaagtggttttttcagtttcgaccatattgccacttttggttagggcagtacttggaatactttacattttcttaaaatattctcatcaattttacctaattttgcaggctctacctactactcttccacctgtcaaacagctaagcactaaattccatttgatttaaactctccattttataagatgaaaagttcatattttactgagtacactgtaataaccttaagaaaataaaaattactataaatacatatttttggaataaattcagttggagttagaccttaggatgctgagaagaacattacctgtataaaaaaaaaatctggagttttagtaagctagacaactcagcttatggccacttcatatgatgatttctgtttatgagtaattacttattgattttagttcacgtaaaaatttcaactttaccaattgtctagtccgattatattgcaaagacataaaattatatggttttaaaatttgttagtataccttaatctcatgtcatgttccaatgcattatgtaagtattcaatcaaagaagtgaggctgttctccagaattggttctctgctacaggtcaaaacctgcaataaaaatgtcatgtattatagcatgaagacactcaacagatttccatctcctgcagttccacagttgatccctgaacacagaggtatggtcttcaaaatgaccctaatcttgccaatgttcagagaagctctaacttgaaaatgttttaaaaatagaaataacttgattagaaacacctgtgatatgctttatcatccgaagcctcttcaaacaaatcagattaatatgtttctgctttcatttctctttagggcattcatgttcaaagtagtatgggtgagtgtgtatgcgggtagctgttagaggactggtacaagaggagttcataaagaaaatatcagaaatgtagtttgtacttgtaaaactcataaaatccacacagtttaaaaagttactgaagggacagggacgaaattttactttctctccaaattatcaaatgttttaatgatgacagaatttaccattcttttttttttttttttttttttgagacgaagttttgctcttgttgaccaggctggagagcaatggtgcgatataggatcactgcaacctctgccttctggattcaagggattctcctgcctcagcctcccgagtagctgggattacaggtgcctgccaccatgcctggctaagaatttaccattattttcaactttagtctactgccaagcctaagtgaaaagtatcagtatttccaaatattttaatacattacagtcctaacagaccaaaatgtggagtttttttttttttaacaagttaacatatttacaaataataaatggaccactactggaccaaatggttttttaatgtttctaagagatgtaactgaatatatgttaagtgttttttttcatttctttcacctttctgaattataatgattcagtggcaatcgactgtataaaaatattaaattaccaaaggtgtatcatgtattacatgtaaatcataatgctctgaataaattttccagttatatttaagaatagcttaggaaaatgaaagagtaaaacctaaaaaaacctttattcctctgttgccaaatatttgattgtttaatgacaaaacccacacaatcatccataactcataaacaccaatccaaataccatgacattttaaaaaattaccgtcatttatacacagtcttcctcaaaagacagacagttttctatatttgagcactctgaaaattaaggtatcttaagtttaaaaatcatagaaggaaaatagtagaaaacaaaatgtactacatgccaaatgttaagtttttaaatagtagggagatgaaaaatactaaccaataagaagcaaaagaggtctggatataaataaaataataaaccaatgtgtatgataaaaaaggcaatattaaaaaaccttcaaatagtaaaactcaaatctaaaatctattacaaaatagagcttactatttattcttagaaaccactacaagttattccagtacaaattttctttactgaaataaggcaggattaaccaaaggtatagtaaacttcttataatttgataagaaatattaataatattcaaatatatatttaatatcaatttcaatatttaaaacttgtctttctaaaaggaagatcctttaaagcatctctaatacagatcaaaaaataaaaacaaaaaccaaccgaggcaaaaaaataaaaaacattcagttccccaccagaaagtaatatttatatgatctacgagataaataaacatataatagtaatgtgatattctaaaaatctatcctgttactcttaagacaatcatgacattaaagttctaatactgtcacttccaaaaattaaatgcttaatctcattttcaatgcttatttgaaataaagtggtattttattactgatttcctttggtgttatgagatttggggctacaaaatttcagcaagtcatagttgagctctaattatgtgccaaaattagttgcctggcatacaatgtttcaaagtttgctgaattaaaaacaaaacaaaaccaaaaacccccacgaaactatatatatgacaattttttctaagatgtgttttctagttataatcagacctaaaatctgtgtcttctaaaaaggggttaaaaagaaattaatatgtgaatttttaagcttcattagacagaagaaaaaaaacacaagagccaattttaggtaatattttaaaataagagaaatttttatagaataattttttgaaactataaatttatcatcttcttttgaagaaagctaatgtgtcatatataataattatctaatacagtctctgggaattttttttcattttgtaaaccaaatcaactgacccatatttctggctttaagtattctgtgacattccaaataattactacctaccaataaacaaacaaacaaacaaaaatacacacaagtctccacaaaacaaaacaaacgaaaatgtactacataaagcatgatgaaaccaggaatctagactatgaaagctactttaaaatttttatccttagctgtagttcatgctaaacattaaaactcatattaatctgattagaaaaaatatgcagtgttacatacaaacacccgaggctacattttctgaatgtacaactaagacaggtcaacagtatttttttaaaaagtctgaaactgcacttttatttgaatttttaaaaatagtgtgggggcaaacaaatgaaaatcaatgctaccaggaagactgataccttaccagtcccctttcccccacaataggtaaacataactttaaaaaggggtgacctattatagcaacaccacaccccgcagttgctttcctatggtaataaatgactttgtaatacaaaataaattacaactgtcaatttctacagagaaatatggataagtgcacataaacattaaaaaatacacatatgttgtaacttatacctatatgcccacaagtctaaaaccaaaatcttcctcttatatagcatcacataaaagtgaaaatattttgaatgctgtggattttatttaggcgctagtgtattctcaaatttgaagtgatgtattttaaataaaggaatcacttcttttaaaaatggcttattaaacaaacaatcctttacccattaccccctaaacaaacaaaaaatcccataaaccaaagtgctaaaaatgtatggttatacttaaccagcctggtggaatttaaagcttgcccccaactcttcccaaaactcacgtaatttgaatgagaatacaaaactcaaaacaaaaaccatcagtaaaaagcaaaacccaggagttctggtactttaggtataattacgtttaaaatagaaatgagatctcctaaaatttcattaaatcaaattttatagagaagataattagcaccttctatgaaattttcataagatgacccaaaataaatagctttgaacaaaggtaatgaaaagggatctgttatcacaattcttgttatgagggcagtacaaaatagtatgaattataaactcagctattccacttactaatgtaaattatatttacagccctacagagatttataaaagccataagattttttatttgaatattttttaacaatgcgtatttgacttaatgcgaacatacacactataagcttcaaaatttaactactattcataaaagaatataaacgtctattaaattaaaacaattgtttctcaaagcatctacagctgtttatcagttagtttgccgctgttctttgaaaacgacacctgccttttatcaagatgcaattaaatggaatgacaagctcggtaataaatggaaatatactgaggctgtctcaggcaacatcgaacaaaaatcaactgaaaatcaaccagataaaaaacagcacacccacactgttgtatacaatatatttcttcataatgaatttatcaaaggaactaaataatagatacgcacctgtgcttacctgttgtctaaattaagaaacataaatgttttgtaaattaaagttttagttcactgcagttactgaattagcaaaatgtatattttcactagatgcgaaaagttttttaaataagatgttcaatttttatggaaaatgttaaaaagatcattcgtgaaccttaagaaaattagtttctttgcatcaaaataaaagaaacaactgtccggtaatctgcatccaacaaatatatgtagtttaaggtgaaaaattcctatcaaaggaaaaaaactaaatttttcactcagtttttaaccaataaagaacagtgacaaatatataaaagtcttgttaatttcaaccagcagaaacataattttgcgaaaacagcctcttcagttttacttttaatatacatttgagaaccacacgaaaatcctttctgagaggaaaaaaaactattaaaaaccaacttttttttaaactctcgtcctaacgtttcgtagctatttccgtggttctctggctaaaagtatattttttcgtaaagtcgagaattatagtttagcgttcaacattcaaaccccccaggcccgcttccttccagccaatcagggggtaacaagtccagagtttagggagctccgttagacacaatttgaaaaacatcacattgcactcttctattctcctccgggaaacattctaagcgagggcgggtcccccagtcttcatagaatataagaaataaatcaatcgttacatcaattccacggggaaaaactctgtaggcaggcagtcctaaagaagcgtgtcaccgcggttcccaggaagcgttattcctctttgcgaacaactgaacagaatagctgctgcaaaaagcatctccggaatatttgcaacccagagccgtgcgccccacacgcaatacaccggcaaagggttaatctagtggtgcctccagcgcggaaaagaactcaagatctaatacatccttaacgcgggatttttacaaaggccatagaagtattacctaaagttaatgccgtcactggctcacatcactcaagagctgtggagtaagaattgatagaaaccaccagctaagggggaaaaaaaaaatcaccgaagggaaagacaaataacaactctcgtccctcctcctcagcgtcaagaaaaggtggggatcgcaaaattaccgttaagttgtccgggtaaagacttttgggggaggaaaacattaatagtttcacagattgcttttttccttgcgacatgtttcaaacaccggagaagaaaaaagtcttctaagaaagtgcgactcggaggaaatagccacgagaaggaaatcgttagctcgaagccccatctttcatctcacccgtgaacactcctcccctttgagaaaggacaacgctgcgagagcaaatgacaaaaatccccagaaagaagctaaagtccagcatctttcctaagagcccgctacaacctcaaaagcctgcccctgccccatcttggaagcgcgagccgcggccagtcctacctacctagagacctcaccgggacccagcgcgccgggggagggcagccagggcttgggaaactctttcctggggcacctcacgcttcagcgtcaaaagacaatatagatagatgggtgccgggcggtggcgggggggactgttgccacgacccaccggagggacccatgactccgggtcctgaattttctgtcgaccttaagtttcttgtcacgagatgacggccatcaccgggtcgagaaaacggcgagaaaaggcggcccggttcggaaatgggggaggggcgcgcgtccagtcctcctgtcaaggagcggccgcctgcagagaccccgcagtgcgccgtccccggctccggtcccgggcggggggtcttgctgacagatccgctgggcggcggctgctccgccgcagccggtccgcgtcccgctcaaactgcagctcccctccccccacagccccgtctctccgcgctcccgccacattccgcccgccgccgcccactcgcagacgcccaagttgcccctaaccctacttcctcggatttttcgcgattaagtgagagtagaccccgcgcccattccctgcacccaccactgcctgcgggtcccaccactgccacctcccgagtcccgctctgctacttcttcaggctcttaccgactgcgccagccttggcgaagctccgccgactgccctttgctccaagtaatttttggcgatttttaaagtaatttttccggcggagtcatagtggcgctatactctcggacaggttatcctgtctctcccgctagattgatgagatcaggcatcactcgaaaatggcgccgaaagcgctgaggctcctcattcaaattcgttagagccaaccccgccgccccagggaatgccgggaacgcgggctgcctccacagctgtcaataccgcctcttaaccccccttctcttgctttcccgacatttttacgcatgcgcaaactccaaccctcccccctcctcccgccaggcacatgcgcagaatcatcgtggtgcacggctctccctttgcttcttcggttgcagtcctcttgcttcttgcgcgtgcgtgtagcgcttttgcaaagccgcggaggtgaagtgaacttagaggttgtggggccgaggggtcgtcttatagctaccagcccacaggcatttagtctacgttggaggtaaacaaatacgggtcctgcttaggagaaaagaaaaacgtcttacagccagtgtctaaactccaaacaacggaatgtatcaatgagacctagtatatggatacacgtgcatttaaaaccgccctgccggcttgtagagcttttgccgttctccagcgctttacaggggttatcgcacttaagcctcggaacaactttaccaggtaggaactattactgttctcgttttgaagaccaggaaacctaggctcagagacgttaagtaatttgcccaagacagcacaggtggcacagaagtggatgaatccacatctgtcagattcagcagccctggagttctctaccacgctgtacgattcaacctgagcccacacaggaggcgtggtctccttcttcaacggtgtgtgtgtgtgtgcgcgcgcgcctgcctagagttaatgattaagtttgctgaagcccttcttcccggtcctaagctgcctgttgcgaaggcgctttcattgaattcagtttctcttaccgtcttaacttgttcataaactttttgagataggaatgggcagtttttctgtgtcacttaggatgattttttttttaatggcgtgataagtgaactgaatccagcaaagacgagtttctgttgtgcaacacgttggtatactgacagctaccacgtattgactgtgtactgtgtgctgggcactgtgctaaataaatgatttacgaattaatcgtgtttattgctcacaacagccttatgaagtaggtattatcttcactttacagatgaggacacctgaggttcagattaagaaatctgccccaaagtcttagaactggtaagtagaagcaccatatctaggcaaacctgtctaccttcaaaaaaaatgggcactctgataggacaattaacgataataaagttgtaatttttttttttttttgagacggagcctcgctctgtcgccaggctggagtgcagtggcgcgatctcggctcactgcagcctccgcctcccgggttcaagcaattctcctgcctcagcctcccgagtagctgggactacaggcaagtgccaccacgcccagctaatttttgtacttttaatagagacggggtttcaccatgttggccagaagggtctcgatctcttgacctcgcgatccgcccgcctcggcctcccaaagtgttgggattacaggcgtgagccaccgcgtggagccctataaagttgtaaatattttaaaaccttcattgtgaatgttaaataagagagtagatatgaaagtgcctgaagtactaataaggaagtgggagaagggtagcatggtttgcattatttaagtgtcttggaaaagaaatggattttagcaatttgagatcagcaagaagtaacgtggcagagtagtataaatacactacttaatctctggtacttttttgcactacttaagtgggccgactctggaaccgagctgcctgggtgaatcccagctccactacttactagctgtgccttgttgggtaaattatctgttggaccttttgtaaaacaagtactattaatacctcattggactgttgtaaggatgtaaatgagctaacatattaaaggaatttcaacagtgcttggcatattagtaaatgtttgttattgtcagtcagtcattgatcttttaaactggcttctttaatggttgttcaaaaatcaaactacagttagtgcctttaggggtcagcattttttttctttttttttctgagagggagcctcactctgttgcccaggctggttggatcactgcaacctctgcctcccgggttcaagcagttctcctgcctcagcctcccatgtagctgggattacaggtgcgcgccaccacgcccggctaatttttgtatttttagtagagacggggtttcaccatgttggtcaggctggtctccaactcctgacctcgtgatctgtctgcctttgcctcccaaagtgctgggattataggcgtgagccaccgcgctgggcggggttagcattcttattcaagagctccttaaaatgataaatcaaactgacaaatgatttttcccaaatatgaataatgatccctgttaggcaaataaggatgttaatttattttaccatctcataagaataatacctggaaatggaatagatttattgctttttctgattgttaaggttaaaaaaccgaggcccatctaaaatatatataaagtaaaaatcatccaaatttctagcattcagggataaccacatattgtttgtactttaaaaatataatgtacctgtggggacaatcagctagggggggtctggataagtggtatatttgggagacatgtgtaaaattgtactagaacttacaaataggtaagtagcacaatctggtttcctcactgtagaattttttatcttagtccccttttagatataatatgtcaagagaattctaaagtgatgatgataaatgataacatttattgaagacctaatatgtgtcagacactgggctaagcatgtacatgcatttttccatcgaatcatcatgtaactcattaagtgggtgcaattatctctattttgcagagactaaagtttatgtgtaagtcacttttagaagatttaagtctaattgtgtttaaagtcttatttaagaaaaaatctttcatgaaagcttcttgatttgctaaaatgggagaaaacaaaatcaactaacatacagtagttcctatgcctgaacagagagcccgattgtaaaaaacggtcttttgaaaactaagaattttatatttgaccacaagggggtgcaaattcctgagttaaatttcaaaggaaaaacgggaaaagtgcttttactttagaccatcaaattcgtgggttaaaactagtaagaattcctgcctggaactttaataccctacaaagtaatgtactttataagaagaaagaactcaattacttaggtgctcaattagggcagaagtgtcagcttgctttcttcaatacagtcaagagttaatcatccctcccccacccctttccactcacagttagtttgtgtctctgcatacccctctttacttgtcaataagagtagaactgaagtcataatttaaaatctggggttttgctcttggaaactgaaatgcaatcaccagctaatggatgctaaatatgggtagtgtgaagaacagaggtcttgtaatttctatgctttttttccctcctgctgaagtttataatgagtaagctacaactgatgcaatgttggcttcaacatattaacttatttagataaaactgtgaaagctataggtctgttcatctttcaagaaagaatgcaggccgggcgcggtggctcacgcctgtaatcccagcactttgggaggccgaggcaggcggatcacgaggtcaggagatcgagaccatcctggctaacatggtgaaaccccgtctctactaaaaatacaaaaaaattagctgagcgtggtggcaggcgcctgtagtcccagctactcgggaggctgaggcaggagaatggcatgaacctgggaggcggagcttgcagtgagccgagatcgcgccactgcactccagcctgggccactgagcaagactctgtctcgagaaaaaaaaaagaaagaaagaatgcagacagtaccttgaaaacagtatatactactgaatgtattaaaaactttgcttagcagggttttcaacttccttttattttcgtgttggtcttgtttctctgagatgggacttaatttaaaaaatacaactttttttggaaataatttcaaatttacaaaaagttacaatattaaaaagagttcaaagaacatctatatcatttgcttgctcttgtacatgggtgagttttctttttctctctctctccatatacacagtctataaaaaacacacagaggaaaaatacaagaaaaaaactttcaacccatatcaaggttttatgattatagttaaaaatatacatatcaaaaagtcaaactaaaattttgcagtgttgacactgccaaactattcttttaaggaacattggtgttctatcagctagtccagtgatttttgtttttttaagagacagggtctctctatattgcccaggctggcttcaaactcctggactcaagtgatcgtccattcagccttacaagtagcagggactgtaggcaagtgccactgcacccagctcagtgattcttaaactttgaaaatgtgttgaaagttatagaccctttctctagaatcatgcatgtatgtgaatagtttgcatatagtttcagaggtggatgatggtccatggagttcctgaagaaaagtaaaggaaaaattattcatacatatggtaggcagaataatggcctaccaaagatgtccaaagatgtacatgtcctaatctctctgggatttgtgaatatgttatgttacacggtgagagataattcaagttgcagataaaaattagggttgctactcagatgatctgaaaatagattattctggatcacctgaggaggcctaattacatggtcctttaagtgtgtaaaggggaagcagaagaatccgtgtcaatgatgagatgtgagaaagccattgctgactctgaaggtggaaggaggccatgagccaaagaatagttcatgagctctagaagctgaaaaaggcaagaaaacagactctttaggaatgcagccatgccgacatctctattttagcccgctaagacccattttgaatttctgacctccagaactgtaagataatacatttctgttgttttaagccactaagtttatggtaatttgtttaaggtaattttaaggcattaggaaactaataaaggatgtgaacagtcattttgtatgtgtgttgatgtgtggttatggtagtaattaagtgtgtgtgtgtgtgtgtgtgtatacattttttaataccacctaggtatttttctttttttcttttttttttttttttggagttggggtctctgtctcctaggctggagttcagtggagtgatctcggctcactttaacctctgtcttctgggctcaagtgatcctcccacctcagcctcccgagtagctgggaccacaggtgcccgccaccacacccacctaattttttgtattttttggtagaggtggggtttcgtcatgttgcctgagctgttctgtaattttttgcttaacaaatccataaaaagtacttctttatcttttttaaaggtctgtgaagtgtcagacctcaagatggacaactatttaattagatatagcatcttatctactactgaaattatattcctacacaatttactgaaatttcttggtaagaatgtgatgagcttttcccaaaaatttacccatctacattccctttataaaacgcaaccttttgatttacagttatgttgacaatatctttgttctgtcaagtatcttggataatttcttctccctgtagctaattgacagattaaaaacaattagaaaattctcctcagaggttatttaaacagtatataattatatgctttacttaggtatcagcttaagagaataaactgtttagaaacagatttattttgcagttggtagattattttaatggaagatcaatacaggtacttaattatctataaatgttttgtgagcaagaaactttttgtgatttttttttttaaaggataccaatattagttacatgggggaaaatttatacacacatcaggaaatgtacttgttttaggaaatttacatggtttagagctccaatttctagaagtggttagaacagattcatatatagcattttcaactttgattctctgaatatactgagttaagattttttttcctatatgaggagttattttgcttacagtatccttgaccacaaatcatggaactaaactaaaattcatttacgactaataatggtcaacatttattgaggaagtatgaccttttttattttgttgttgagacagagtctcactctgttctccaggctggagtacagtggtgtgatctcggctcactgcaacctctgcctcccgggttcaagcagttctcctgctgcagcctcccaagtagctggtacaacacgtaccaccaggcatctaatttttgtatttttagtagagatggggttttgccatgttggccaggctggttttgaactcctggcctcaggtgatccgcctgccttggcttcccaaagtggcgtgagccactgcacctggctgggaagtatggatttttttttttcacgtaccaataatgattcctggaaagggataaacccatttgtttttgttaatcttctttctaaaattaatgttaaaatgttggccttaaatgagatattaaatatggtgttttgaaacactgcttttgaaataatatatactttgtgagagcttaataaaggaaatttagcctattcaggattggaatcatagaatcttaagagttaaaatatgtctcttcttactgccacccattgtctaagtgtcccctgaggctactgagaacaaatttattctcacctacctacagtaaccctttaaatatgatcattatttttttgaatcatgatgacagcagaattcccactcccaaacatcctttaatggcttctttaatgtgtctttaattgttttatgctcttaaacccttcaccatcttggtttccttcttctggttattcttgtttaacaaggcccctctcaaacagtgacacccagaatggtattaattacatatatatactatatatagtctgaaatataccatgggtgggtattaactttttgtcctatccattacaatttttgtattttgagaacaattttaggtcgtaacagggactcataaataatggaaatggatgtattggaaatgtatcaaaagaaagttttaaaagttttaacataaactacaggagtaaaaaacttaaaaattacaacttatgactttctcagagactttattgagttgggatgaactggaagttgtggaggatagggaaccaggaatctattacattcatgtcttatttatttttaataaactggagtaaaattgagactggtctgtaggagatatgactgcggatgtgtgatcagttgtctaagacagttgagcctcatactacatttctattcttaatatgtaaaatgtatttcttatagtacaaatcccttttggctaggaaattcttatatgtttaaaataaattaaccttttaaggcagctctgaagaagtaatttattttaaataggtgagcagtttatagctcttatgggaatactttttccttattttttcatcataggattagaccctgtgtttttaatttaagtcctttaatttttgctgttaatgtttaatttacttgatgaccccgtactgttaacttttgaccaagtgaacttgggacagtatatacaaactgtttacctaattttaaggaaactcttttaaaaataagataggtttgatgtgaaacagaacattaaattcatttcaactttccatgtagaaaaatatcatatgtatttaatcaaataacttttccccccttattggaggatgtatttttatcagcatggaggttttttgttttttaataattagatgtttatgccattggcaaaacaacccaaagctgaccatgaccaaactgcaatacttttaataaactaaaagactactaatatagtagatataaaaccctttcctgataagaaatttttatagcgtatgactgaatctaacaattctccctctacctttatttatgctcgtttactttcttttatagaaaattgaaattcctaaagtttaagtttttagatgtaaaaaatgttagtatatacagttaaattaagttcaaggtttcttttaaaccacttgatgtaatttactttgtatatagcttttatttgcctttttaaaattattattacaatttttttagacagagaattgctgtatcatgcaggctggagtgcaggggcgtgatctcaggtcactgcaacctctgcctccccggttcaagcaattctcgttcctcagcttcccaagtagctggaattataggcgcaagccaccatgcccagctaatttttttttttttttttttttgtatttttagtacagacagggtttctgcatgttggccaggctggtctcaaactcctgatctcaagtgatcctcctgcctcagcctcccaaactgctgggattataggcatgagccactgcacccagcttatttgcccttcaaactagacctgtggacttgcttttgaacattttctcccctaattatagaatacatgtgcattaaagaaaacagaaaaaaatcaggaatgattggaaggcattgcttctgaaggcctcttaacaatatacctctctcctcatctcctttcccagttgaccaaagaaggctccgtgtttgtcttttatgtatattagcatgattgaacttcatccatttagccttattgaatactgtactttgtttctcttcaggaaaattacagtttgatatcttgtgggacagaaggtttcatctttcagtcatcagagagcaaagtaggaaagacttagagaggcaaagtccctctgcacctaaggatacactatttttactctaagggggccatgagggtttatttactttcatcattttggggtgaggaatggttagaaactgagggagcataaataggttaagtattatccatgacagtagggtgggagttaatggaagctcatttatagcagttctacttcctgatttatgggtatgtgtggtgcattttaaagagattctggtgaactaacaaggtgtaataattgtattttgttatatatcatattattgactgccggactgcttaacatgcagcttaataattattatggatatctttaaatatgccacattcactttattcagaagtgaactgataagcaacaagctgccatgtgctgaacagtattaggtactgggataaacaagggttttaaatgctgagaatagtgtaagctatatatgtttctgtatagccttcatggtttgctaataaggtaatctgttgtcatttcataattgaaatactagggggaatgttgtaaaaatgctctttattattgttatttaaatggaagtattttgtgtggttttatagtcatggtgggaaatcatgagtttttggactagggtagtgatggttgggatagaagatgagggaaaaatctgtaatgcctccctggtccctggcctggttgtagagtacaatggtggtatcattaaccaggacagggacaagtggaggaggctcatggcttttgagagagagagagagagagagagagagagtgtgtgtgtgtgtgtgtgtgtttatgggtgtgagatggaacgctgggacatgagagggagatgacaagtccagtgaggacattttgaatatgaaagattaagcactcatgggatacctaagtagggaagttcagtaaggagctcaatatatacgactgaggcttaggagaaaggcctgggctggaaatggatatcactaaataggtggtagttcagattatgagggaaatggatgccattgctcatagagactaaacatagaggaaatgagaaccaaaattagtaaatgggcaaagtaagaggaagcagcaaaagactgagaaggaatggctgagagaggggcaggaacaccaacagagctcagagttaaaggagccagtggtagagaggtttcaaaaggaaagaagtcaggagtgtcagaaggtaaagacaggccaagtaaactgaaaaagataaaaggatttggcagttctgtcattagtaatgtttgccagaacactttcaatgaaacaatggtggcagaattctgtttgtgttgagttgaaaagtatattaaaatagggaaaggggctgggtgcagtggctcttgcctgtaatcccagcactttgggaggcccaagcaggcagatcacctgaggtcgggagtttgaaaccagtctgaccaacatgaagaaaccctgtctctactaaaaatacaaaattagctgggcatggtgacacatgcctgtaatcccagctactcaggaggctgaggcaggagaattgcttgaacctgggaggcagaggttgtggtgagccgagattgcggcattgcactccagcctgggcaacaaaagcgaagccccgtctcaaaaaaaaaaaaaaaaaaaaaagagaatggttacaataaatgtgtattatttcaaggctcttgacattttcttaaaaacaaaagatgataattttagggaggaggttacagaatagagtaggagatctacaagagaagagaacttaacatttttataaagtatggggacagagtcatcagagaggagaaattagaaaggtatagtgagatctagtaggagataagggtgcaggtaaaggaattaacccagaaaagagaaaggataccttttcctctgagactagaagggaacaggtaagatggttttatgtataacttgtaaatctagagcaggaagttgagggaattcaaagctaatagttttaggttttattttttttctgataaaggagtcataaaagagataagggtagagctgaagtagcaagtttgagttgaagtaagatggtacaaaatatatgctctaggtaatgggagagggaattaatgagggaggaaggttgttagcagaagagggtgatgtacctgagaacctaggctggataggaaaagacacaaagcatgtgggagattgtagtttgaagaaatgagattgtagtttgaagaaatgaggaatgggtatcaaaattaggtaagaaagcaggtatttagggagtaatggagtaaaaaaactgcaaggataagtagttgtagtcagagatcaatatattggactcttaaggctgtagaataatttcttggttatcagaagatagagggtgtagctttgggtatggattactgaatgaagtggttttatggagtcagagttcatagtttttcaatgggttttccatatggacactgaagtgggaggtgatggcagaaaatgcaggggaggcagatactgtcagcaaagggccagagtcctcaacaaaatggaatgactgggtaattaataagaatgaaagaaaggagtaaaaaattcccaagattgttcatcatgccttttttttttcctcgtaaattaagagacatgagggtaaggactatgtctgaattaatccaacaaatgcaaatatttgttgaattaataagtgaatgataaactcatgttgaataagtatttcagaaaacttgtttttttcttattataagtagtcgatattaaagaaaatacaaataagcaggatgtaggaaaaaataatcccatcagccagaaatacctacccccaacaccctttgttattaaactttttgcttaaatctgtttgttgttcatatatttttttcctagcaatattcagttgtacactttaacatctaaataagtattttcttatggaatataaggatgtactataatttaagcagttccttattttggggcatttatattgattccacccaagtttcttcaactggtaaaacgaaaaacctaatagctatttttttttttagacagtttcgttcttgtcgcccaggctggagtgcaatggcacaatcttggctcactgcaacctctgcctcccaggttcaagcaattctgctgcctcagcctcctgagtagctgggactacaggcgtatgccaccatgcccggctaatttttgtatttttagtagagacaggatttcaccatgttggacaggctggtcttgaacttctgactttgggtgatctgcccgcctcggcctcccaaagtgtggggattacaggcgtgtgccaccacgcccggataatttttgtatttttagtagagatggggtttcaccatgttggccaggctggtcttgaacttctgacctcaggtgatctgcccgcctcagcctcccaaagtgttgggattacaggtgtgtgccaccacgcccagcataatagctaaatttttgccttacttattttcttaggattcttagaagtagattttctaggaggggcttcatagagatcctatttatctttattttagggccatttctaacaggcttgtttatgtgcattccatccaggattggaatcctggacaatggacagtgttgcaggtattgactgatgcaggcatgctgacagccacaaaagtgagaactgttagtcacaggtccttcttcacaaaaagaatgatgggtatttttaaaacttggaatcaagtatagttttcatgagcacagtaagagatgattcatgagctgaatacaggatatagtagtcaattcagaaatgcatattcaaattaaataaaaaactcttacaatagtctatatttgttgataatactgaactttagtagaggtttttttccataaattttaaaactgtggcaaaatactcatgaagtttatcaacttaaccatttttaagtgtacagttcagtggtattaaatacatccattatgttgtaaccatcaccaccattcatctttgtaactagtagaggtattaatataccaatcttgaatagtcatcaaagtcactctacctcaaacttttccacaaaagtatggttagtagcagagaggagtgaacaattgccttaaaaacttggtcccaagctagaattctttttagcttcatgttttgtcttaaatttaatgtaaatgtagtgttacataccataatgttcctatatttagtaaaatacaatgattatacattttttcaaaatctctgagggaggttgatccccttaactttggcaattttgagacgaagtcttgctctgtcacccaggctggagtgcagtggcatgatctcagctcactgcaacctctgcctcccgggttcaagcgattctcatgcctcagcctcccgaatagctgggattacaggcatgtgccaccatgcctggctaatttttgtattttattagagatggggttttgccatgttggccaggctgatcttgaactcctgacctcgggtgatgcgcctgcctcggcctcccaaagtgctgggattacaggcgtgaaccaccatacccggccttcatttttcttttacggtttagccaaggctatttatagtagtgtatgtcaaggagtagactgattgatgttcaccctcttcaaatgtgagtgtcacagaaactgaaattcacagagtaaaaatttagaagtatccttttatattatatttgctctagtaatcaagcatacttcatcattattaatgctatgagacaatcttattgtacaaataaagagaatgatttcatgtgctggctagggccatagccccacctttccaaagagtatcaacttttcaactatccatgcattatgactccagagacttgtaaaccctctcaggtgtaataaatttttttttttttttttgagaggagtctcgctctgttgtaaggctggagtgcagtggcgctatctcggctcactgcaacctgcgcctcctgggttcaagtgattctcctgcctcagcctcccgagtagctgggactacaggtgcgtgccaccacgcccagctaattttgtgtttttagtagagatggggtttcaccgtgttggccaggctggtctcgatctcttgacctcatgatccacctgcctcggcttcccaaaatgctgggattacaggtgtgagccactgtggcccggcccagctgtaataattttgttcttcatgcctgatcccatttcaggagattggttattacattgaaggacagtagcaaaattggaactaaagtctgagtctcttaactcctagttgagggtctttccaattacaccaaaaggaaaagagttacatataacaagagataagacttactcctacctgcccccacaaaaccactttaagccatcctaagaacggtctcttttttctccctccctctctccttcccttcacctttcctttcttcttcttcttaccttttttgggggtaactcccaaccaccccagttctcagaattaaaaggttaagaatattttagtactcttcaagatacaaagtagactattagagttttttgttgttgtttctcaagcttgggacataaagctcagagatcgggacataaagctcagagatcagaacaacagaattttagaaaggaatagataggatacatgaaaaaggctgctggaatatgaaaaaactggagtaaaaataagcaaatcaatacttctgaaatgaagccttcattggtagaaaagagtgtaggtcacaaaaatgaattagcagaagttcttgatttctaattattgaagattcctatctagtggtattctaatatgcttaccaaattatgagttgcattactttttaaaaacctaaaaccaagtcaagatttacagagtgaccccagtttattttgtttggtaagttttcagttccagttattaggcaaaacaaaaattgctaatacgtaacaatgctgaaacaggcgattggtagaataaaacaaaagggattcatacagcttttgtactgtcttcttgaaaaagtcatatttggccataaaagctaatacatgctttaggaatggaaatgatttaacctgattttttcaagtaagatttgttcaagaataatgggcttatgttgtcagttgtgggttcaagcagtaattcactttggactgcttctattcaacagtatgctgtctgtacgtaaagagttacatggaatttaattttagcattggaatctatttgagataccattatcttttatattcaaatgaaaaattatgggcctctagaattaagtgttactaacctgatatagatagaataatagctgtatcaaaaggaaaaaagcaaggataatatgtgtatagggtttgaatcatacagtctcactagagatgtgttttttaaaattgtgaatgtttgttgattcattcaaaaccgtttgaaaattgtgagggagccagaaaaggggagaatatttggatgtataatttagatgtatagtttgcttgcttatcagggaatagttaagttcctttttttctgtatattttagttggtgaaattaacagtttttgttcttttagattaccctgtaaaagaacatggcattttatagatgagataattgaggcttatacatgttgagttataatgtgtggaggagtctgatgtgcatccaagtctgtctgcccctaatgtctctgtttttaaccattatcctcagaatgaaatacattcatatagtagagaccaattcttaaacagaagtcatctttactcacaaaattaatctgtgaagtacccactgttctcagtttctctccctctcactttttctttctagtgctttgcagtttttaatgaaagtgaatatttttttcagaaattattattttcatgttttttattagaggattaaatttgttgctaagatcatttagtaagtcttttgcagtcttttaagattagacttaagtgtaaacttaaagattgccttgaagtatattatttagctataatgcattattattccttatgtaatgagctatagactgagcactccttgacaaatcacaagaataagacccaaagaatcaaactttcccaagtaacttaactgcatcccaggacaaaactcaggaacatttagaggaacagaagactatccagcagccaacagataaaattcacaatgccttgccaggcacacaaagaagccagaaaaaataatccacaatgatgaaaacaatcaatcatctgaaagtgaccttaagcagagaaagatgttagaactagtaaagacattgaacattattatagctatattctatattttcagaaagtagagacatgaaagacatttttaaaaactcaatgcagttctagggatgaaaactacaatatctgagatctactaatggtatttgtagcagattagacatggcagaagaaaaggttagtgaacttgaaggatatagcaaaagaaactactcaaaaatgaaagagaaaaaagaatgacaaaagcatcagtgagctatgggacaaacttacagaatccttatgtaaacataatcagaggcatcaaaggagaggagaggcagatacaaaagggatatttgaaaaagtaatggccagaattttcaaattggacaaaaactattaactcacagatccaagaagctcaacaagaagaaaactacaccaaggaatgtcataatcaaattattcaaagccaattataaaaaatatggaaaacagccacatgttatagagtaacaaagataaggttgacagcagatttctcattagaaacattgcaagtgaagagacagtagaacataaagtactgaaagaaaaaaatgttaacctcagcaaaatatcattcaaaaaacaaaggcaaaataaagatgttttcagacatacgaaaacaactctttaccatcaggtagactgaaggtagactgtggtagggtgaagatgtatactgccctagggcaaccagtagaataacaaaacagttatagctaataagtcaacaaaggagataagatagaatcacaaaaaaatactcaacccaaaagaaggtggaaaaaggaacaaataagtagtgaaactaatagaaaaatggcaaggcaatagactgtaatcatatcagcaatcacattaaatgcatattatctaaatatcccacttaaaaggcaaagattgtcagataaaaagcaagactgcttttggacctggatgaacaggaggcaccatcacggaagttgactcctgccacaacaatgactgaaaggttcaacaccaggaacccaagagccaggacatctactgaaggctgttggttaagctgtatatgtttctggccagaagaaactctaccttcaaccaagttgtggtgaagaggttatttatgagttgcaccaaatggccatctctgtctctttcctggatgatctggaagatgaagcttcctggccaggaaaacaaaacagctgtggttgtggggaccatgttcaggaggtgcccaaactgaaggtgtgtgcactgcacatgagcagttgggcctgcagccaaatccccaaggctggggacaagattctcacctttgaccagctgaccctggacaccctcaaaggctgtggcaccatcctgctctctgggcctcacaagggccaagaagtgtactggcatttcagcaaggccctgggaacccagcatagccacactaagccctgtgtccactccagggaccagaaattcaagcacatcagaggctgatgggccagccaaggctacaaaaactaaccctggatcctctatcttattaaaaagattttggcctgggcgcagtggctcatccctgtaatcccagcactttgggaggccaaggagggcagatcacttgagcctaggagttcaagaccagcctgggcaacaagtgaaactccatctctataaaaaattaaaaaaaaaaattagttgggtgtggtggtacatgcctgtagtcccagctacttgggaggctgaggcaagaggatcgcttgagcccaggaagtcaaggctccagtgagccatgatcgtgccactgcactccaccctgggcgacagagtgagaccctgtcttagaacaaaacaaaacgaaacaaaaaattttggatggtgggggaaaggaaaataaaaaacaagatccaactatatactctcaataaaaaaacacattttaggctgggtgtgatggctcccagcactttgggaggtcaaggcaggtagatcaccggaagtcaggagttcaagaccagcctggccaacatggcgaaatctcgtccctactaaaaatacaaaaattagccaggcatggtgatgggtgcctgtaatcccagctacttgggaggctgaggcagaagaattggacgaatgcaggaggcagaggttgcagtgagcagagatcatgccactgcactccagcctgggagacaaaacgagattccgtctcaaaaaaaaaaaaaaaaaaaagaaaaagaaacacattttacacacaaagacataataacattaagaataaaaggatgaccaggcacagtggctcatgcctgtaatcccagcactttgggaggttgaggcaagaggatcacttgagcccatgagtctgagaccagcctgggcaatatggtgagatcctgtctccacaaaaaattagccaagtgtggtggtgcacacctgtagtcccagctacttgggaggctgaggtgggaggatagcttgaacccaggaagtcaaggctatagggagtggtgatcacgccactgtactccagcctggagtgactcaaagtacagtcactttgagacagagtgagactctgtctcaaaaaaaaaaaaaaaaaaaaaaaaaggtaaaaggatggaaaaagatatatcatactgatgctggcattagtcaaaagaaaactggtgtggctatattaacatgaaataaagtagatttcagagcaaataatattaccaggaataaagaaggccattttataataataaaagggctggttaatcagaaggatacaataatcctacatggttttgtctcaaataataaaagcttcaaaatatgtaaatcaaaaactgacagaagtgcaaggaaaaacagacaaatccatagttagagatttcaatacccctctttaaatgattgctaaaacaagtagaaacttacaaggatatagtaaactcaagcaacactgtaaccaaattaacagtacaggttgagcatccctaatctgaaatacaaaatgctccaaaatccaaaattttttgagcaccaacatgacccaatacgttgggtcctattcccaggatctcttattatatatatatatatataaatgttcagaaaatccaaaaaactttgaaatctgaaacacttctggtcccaagcattttggataagggatactcaacctgtaatagaatatatattctcttcaaagtatacatgaaacatttacccaaatcgatcatattctaggccagaggttatcaaactatggccctgaggccaaatgtagtctgtttttgtatagtccatgaactaaaaatggtttttacattttgaaagatttctttaagaagaaaagaaaatatgtgacaaagatcatatgtggcccacagagtttaaaatatttactgtctgaccctttatagaagtttgcctgcccctgttctaggccataaaacatgtctcagtaaattttaaaggattcagataatgcagagtatgtcttctgactacagtagaattaaaattagaaatcaataacagaaagctgtctggaaaatccccaaatgtttggaaacaaaataacatgctactaaataaccttctaataacccattgattaaaataggagtgcagtaaaattagaaggcattttgagctgaatgaaaataaaaacaaagcatatcaaattttgtggcatgccactaaagcagtatgtaggaagacataagcaaaatgcttatattagaaaatataaaaagtctcaagttaatgagcttccaccttaagaaattagaaaagaagaacaaattaaacacaaagaaacaaaagaaataataaagatcaaagtagaaataaatgaaatggaaaacaaaataaattgagagtattaatgaaaccaaaccctggttctttgagataaataaaattgataaatcttttgccacgctgatcaggaaaaaaaaaaaaaaaagagagaagacacatattaccaatatcaggaatgagaggtgaaatatgacaaattctacagatacttaaagaatagcaagggaatattatgaaaaaccttaagcaaataaaattcaacaacttagatgaaatggtcaaattccttgaaagacataactaccaaagcttactcaaaaagaagtacagccaggtgcagtggctcacacctgtaatcccagcattttgggagtttgaggtgggcagatcacttaagtccaggagttcgagaccagcctgggcaatgtgaagaaaccccatctctactaaaaatacaaaaaaatttagctgggtgtggtggtgcatgactgtagtcccagctacttggggggctaaggcgggaggatcgcttgagcttgcgagattgagccctgattatgccactgcattccagcctgggtgaaagagtgagaccctgtctcaaaaaaaaaaaaaaaaagaaaaaaaagaaaaaaaaaagaaaaaaaagaaaaaaaaaagaaaaagaaatagataacttccaaagctatgtatctatttttaaaaaattaatagttaaaaatattctcacaaagaaacactagtggattcttccagacacttagggataacactgtgtataccaattatatacaaatcttccagaaaactgaagaggaaggaatacgtctcagtttatttttgggggccagcattaccctgatacctaaaccacacaaagccattacaagaaaagaaaactatagcccagtttccctcttgaacatggatgtcataattctcaacgaaactttaacaagtcaaatccaacaaaatataagaaagttaatattactggatgaggtttatcccaaaaatatgtcattgctttaaattaaaaaattaatcattgtaagtcactatattaagctaaaaaagaaaatctgatcatttcaatagacacccaaaaaatctgacaaaatcgtatatttgttcctgattttaaaaaaccaaaaacaaaaaaaacaaaaaaaacaaaaaaaaaaccaaacctgttagcaaactaggaatagaagggtactttctcaaccagataaaggacatctataaaaatcctacagatagccttatgcataatgatgaaaaactgcatgctttccctttccccgtaagataaagaataatacaaagatatctgctctgaccactttcattcaacatcagaggttctgtccagggcaatcaggcaagaaaaagaaataaatcgcattcaagttagaaaggaagaaatacaactgatgatagccatcattcctaagagttccccttgcctctttataatccttgcctcctcttacctctctccccaggaaaccactggcctgttttctgtcactagagaccagtttgcattttctagaactgatatatgtggaatcatgcagtatgttactcaattttttttgtcagtaattggtagcttatcttgcaatcaaagttcatatacaaccatttgatcttcattccattccctcattagtccatagaatgtcaatcaatttttctttcttttatttatttattttaacgaaacagggtcttgttgtgttgcctaggctggagtgcaggcttacttcaacctccaactcctgggctcaggtgatcctcccgcctaagcctccagagtagctgggactacaagggtgtgtcaccatgcctggctaactttttaaaattttttgtattgatggggtcttgccatgttgcccaggctggtctcgaactcctgagctcaagacctcccaaagtgctgggattacaggcatgagccactgcgcctggactcaatttctgtatgatgatgactttcatatgtacatcaacaggccagatagcttatcaagaaagcttctcctctgtcttctagtaatatcccacttagatctgacattatttttttccttcaaggtatttcttccaaatttcttggctgttgttggtgacaacacaagtttttggacctttaagtttacaatcttaggttcatttccttattttatttcttccctataggtaaatgatcactaaacttgttacttcttatagttacttctttgtaaggcactgcagatatgtttcttttcatttttaaaattgcccatttaattcaagctattaaatatcaagcttgtactatatcaagagtactatatatcaagactatagcctcttgatattttccctaccctcccatcctgccatacccatgtctccactagcctatataaaacataaaatacttttcatcaaactctctgtagagaagtgttgctgggcgaataagaaaaacctgattgactagaaagcaaatgtaaatgtaatctcctttcttttcagtgattctaccagaaaggaatgaagaacagaaccttcaggaattgagtcacaatgcagacaaatatcaaatgggagattgttgcaaggaagagattgatgatagtattttctactagccattgggaagataaaaggagacagaagattgaagcctttgccagccattctttccctttttgcttccaaactcctcaactgggaaccttcatatgtgcagtatttatattggatcatactggtgattataaaagttcctaggaggctagaagagccaaccaacagagaagggaaagcagtctgttctgaacatagggacataagttcattcatgccaagtatctttccagcatgtttctcccatttagaatatctagcatgtaaggcctttcaatattaatataagcccaatatcagctctttctctttgtatttcatctctttctactctcctatttgtattttgtgttcctatcaaagtgtcgtatctgggagatgacctgccttatcctgttctataacagttttgtttgctgctgtgtctttagaacagtgcctggcacacagtaagcactcaataaatctttgatgaatgaatgaatggttatcttttctctctggcaatccaaattcaccactccttaaaaattctacataagatttgctggctgggcgcagtgactcacgcctgtaatcccagcactttgggagactgagacaggtggatcacctgaggtcaggagtttgagaccagtctcaacatagcgaaaccccatctctactaaaagtacaaaaattagccgggcgtggtggcaggcgcctgtaatcccagctacttgggagactgaggcaggagaatcacttgagcccaggggggcagaggttgcagtgagctgagatcacgccacttcactccagcctgggcaaaagagcaaaactccgtctccaaaaaaaaaaaaaaaagatttgcctattccagcagacttctacccaatatcaatctagatttaaatcacttgattttccacatccctttagcaattatgtatagtttgcacttcattaacctacccttatttatgttacttctcacatacacccatatctcttctgtattttcaatcaaaagataatgcctcaaatgttatatatattgtatgtgccactcaacagtgcctcatatgctgcaaaaaaaaaagacagtaaacaatcggggtacctttttgtcttttaagccatattttctgggtcagtgtggtctttcaagggagtttagacaggctctattttttgttacttcactcctatagtatgtgactgtaaattgttccttcagtgttcaatttaagtacaaactaaagagaaacagtttcctaaagaaaaacattttaaagttacagagacacctatgtgttcgtaacatttctccagaaatatttgaagtaacgtaaaacttctggactggtcagtttaaatattttcttggaatttctatagaaatttctgtggaatggtgttatattggaaatattaattaactataagaagactcctacttcttcacagagaacaagcagggatatcctggattttcacagtatttaggccactccttagttgtctcatgaaggaattaaggtagtggaacacattcaagaattgcttaggtgtcaaaataagacaaagtgtaacagtttttttctgtagtagatttttaaatagttaaaagactctgccctctttatctatactgtattctggcaataataaagttgggcagcctatacataaaagcaatttctaacaatgccaaattaacagcagtttcttggccctttcctttccctccatgaaagttacaatattaggttatttcacaggtttcctccatgccccccatacccaacctaaaactgtgttaggctgtcaaagaaaacaaatcaggtaagattagtgtttgcctttacgcagtcattctaagtacacataaaatcatacataatatgaaaatacagcaggaagagaaacatcaaaccatagaactgagttttagttttactgacatttatatggcatacttcctgtttttgatttcagaagtgcaaccatgcagtgcttctatgaaaaactgaatagttgagtacagtttgaggattataacaacttatccaaaggaaacaaacagacctaacttactgctgttttcatttgtggaactgctatctttgttgtaaaaagttgagtatttttcaaacatcatttaataatagggtagcccctaaaacaagtaaggagctataagtctgagttgtgaatttgactagtaatggaataagaaaaccaagccaaactccatctaaatatgtatgtaaaggtaatgcttgtaaaaatttgctttttcctcattttgagatttcagttgccagttgactattggtatgcaaaattaacaattctgcctaaaggaggtaaacgatagaggttaattcttaaataaaagtccctttgtttcactattaactttttctatttgaagcataattgtgtcagctaatttattttttggtaaccacttaggaatttgggagggaggggggcactcaagtaagcaatgacagccagctagacatcaaaatccatgttctcacttcatggccgtacagataaatttcatttcctagcctctcttgcagttagatgtgggcatatgactaagctctagctagtggaatgagaatggatgtcaactactttaagctctttaagtcaactaaagaaatcaactactttaagctcctgtccctaaaaaactcccaacagactgacccctccaaggaaaccttggaagttaggtcctaaatgcttaggtacagtaagaccttggaaactactaaagaaatagtaaagtaaacttgttttgcaagaacaactttgagccactatatattttggggatgatctattatggcaattagcctgccgtcattaatttgatctataaaacatatatgaagtgtccctgtgatacacaactccagtggtcacacactgtaatgtatgcaactgggatttttctgaagcacaactgagaggctacaggtatgcatacatatggatataggtaaatgttcctcccaggagtggtaaaatgctgtggctttgccaactaactccagcttctctcatgggttttattgtggatgattattgatttgtgtaaaggaacttcccttttgtgtctgtggtaatagataaaggtggaatggatcctccaacaagaatcttgaggggaaaatatatacttatgatcaaaataagatatctttcttgggtttgtccaatagtgatggctacatagtcttcctattaccttttatctacaggcaggcagtaggccataatagtattagaagcccctccctttctccaaaaaaaaaaaaaaaaaagtgctctgagcagtaaagatatttaatttaacatatctgcgcttcatgtttctcatctgtaaaatgagagttggattatatcacttcaaaagtttccttttttcactaaacattctcccatctatgactacaatgtccagagctaatggtagaaatatatatatatatatttttttttttgagagggagtctccctctgtagccaggctggagtgcagtggtgcaatctcagctcactgcaacctccgccttcggagctcaagcgattctactgcctctgcctccctagtagcggggactacaggcacgcaccaccatgcccagctaattttttttttgtatttttatagagatagggttttaacatgttggtcaggatggtctaaatctcttgacctcgtgatctgcccgccttggcctcccaaagtgctgggattacaggcatgagccactgcgcccggccaaaataattttttttgttttctcttttattttgagacacagtttcgctctttttgcccaggctggagtgcactggcacgatcttggctcaccacaacctctgcctcctgggttcaagtgattctcctgcctcagcctccggggtagctgggattacaggcgccgcccccgccccgccccgccgccaccacccgctaattttgttatttttagtagagacggggtttctcagtgttgatcaggctggtctcaaactcctgacctcaggtgatccgcccacctcagcctcccaaagtgctgggattacaggtatgaacctccgcgaccagcctatttgaaataattcttaacatgagcatttcttcagatttcaagttgatattacagaagcgcaagtgcttcatagaaacttgaaattattttaaaaaaatgtttaactctcaccaaggcacaagagaggttatactcttctcccaaacaagctattaaattgaaaggattttaaacttacccaaggttttttagagtagttttattattattattttatttattcgtttttttgagatgaagtcttgctttgtcaccaaggctggaatgcagaggtgtgatcggctcactgcagccccgacttactgggctcaagttatcctcctgcctcagcctcctgagtagtaaggactacatgtgtgtgccacagtgcccggctagttagagtaattttaaaacactgtgtcacttctctgatttctatactttactccatgagtggagaaataatatcaaagctaatacagaatgtgatagttattgaaataatactataaaaagtcaaaaactagacagcagattttatagtttttcagtgaatttaccagttaaaaaccttaaattttacttttcctaattgtatgtttataatgtttcaatgtaataacaattcatataatagcacattcaggatcatggcaaaatcagctaagtcatagttaacacacactccttgtctctacgtatgtggtgctaagtcatatttttggtatagctaacaaatgattttttgtctgtctgctggtggggttttaatctcctggatttcaactttggttaaagttaaaaaatacactatccagactttatacaggcatgaattggctttaattcacattcttttgctgcaggagagctgcagaaatatggacctcactcagggatgatactgttttagaaaggagaagggacaggctgtataacattgtccagagtggagttttcatgttgcgagaaagccatgtataggccggagtacatgagtaaaaggaataacaactcccccatcccctgccacaaaggaacaagacaggagagccaacaatagtattttgactattagttgacgagtatggattctaaaaatatctttacataattgcagaaattgaggaacaatctaaatgtttaaaaatgagattgataaataaattttggtatatctatatgttggaaagctatgcagatgttaaaaacaggttttcaaaactattcagtaacatgaaaaaatggtcattataaactactgagtgacaaaaataagatataaaactatatgtagtaattagcaactatatattttaaatacaggaaggaaacatgaatgttaacattggtttttctctggctggtgggattacagatgacaatacttttgtggtttccaacatttctctagttaacacattctgtttacaattttaaacattactttcaaagaaaaaatgtgatatatgtaaatatggttatataaaatctgtatacatatgtattttatttatgtatatcaaaaccagaccaaaaatactgagtttgatagttttcagattgacactgtaacagaatactttccttgaccctcattttatgttgagatctttatggcagtgaaagggctagagagaggcatgtactttcagagtttctgaaatgacatgtatagtatgaaaaagcatagaagcattcctcaattttcacatcttgaattttaatacaacctgtaattttgtacatactaaatgaatgtattagttttccaagctacagcattggtggccagttagcagttaataataatatttttcaaaggataataaatgaaaatattgttggccaggtgcggtggctcacacctgtaatctcagcactttgggaaaccaacgcaggtggatcgcttgggtccaggagttcttgaccagcctggggcacacagcgaaatcccggctctacaaaaaaaaactaaaaaaattagtggggcatggtggcatgcgcctgtaatccaagctactcaggaggttgaggtgggaggatcacttgagcctgggaggcggaggttgcagtgagccgagatcctgccacttcactccagcctgggcaacagagtgagataccatctcaggaaaaaaaaaaaaaaaagttgaatatactagagatccaaactatttggaggaataattgattttctgggcaaagctaagaaatagaagttattcatactattggctacaaatttgcaaatatattggattatactccctcccaaatcataactcttaatcctgcagttttattgcatttttctgggtatttagttttgtgatgcttttctgggagactaagttaagagacccaaactcagattttaaaattagttcattttttttttgttttacatttttctaattatttctatcaatgaaactgtggcatattacaaaatttcaagataaataattttctgtcatgtttcataggtcaagtaaaaaaaaggttctgcagctaaaataaggcttaagggggaaaagtggccagcagcacattcaaagtttatgagcacagacttggggaatcggatagatgtaggttcaaattcttatactgggggtaggcaagaaagatgcataaacagtgaattttaaagtttggagggattttagagatcatttaatcaaaatccattgttttgcaaaggaaactaacaccctggaaagttaaatatctcacctaaagtttcaatcccagcattgctactcatgttatctaggtttgcttacttcccaaattcagcactctttactttctactacaatatgctacatttgaggttggaggagaccagattatagaaagtactgaaaattagaccaaagagtttgaatttactttaaatctgtctgtcttcattattattattattatttggaggagtggtactgggcacaatggaatgataatgatcagagtcataaaagatgtatagagatcctatgtttcctgaaaattctgtatcatactcagtacaactttaaacattctaggggagaacccaactcatttctttgtcttatttaaataatactgagtaatggaactgactagattacagttgataactattttattttttcacttgcttttgtcattttattccatgaattaatggtatacatgtgagattaaactgatgctgagttgggaggcaacactgtttggttctgaagagcagacttttccttaaaagttaaaatattaagaataaaatcaaaacaaaaaccttgagtctaaatttgaatatgactctcaactttaaaaggtagtccacataaatttttctccttagatttatttttgatattaaaatatatacagaattaaaagagaaatttaattttttacagcaaaatttttaccagataatgaagcttaaaaatgctgaccttttagctcatttctaggaatttattctagtttaggaaaatagatttatgcataaaaaagctcatggcaatattatttgtaagtaaagaaaataaataaccacttacaaggaacattatgcagacactgaaacttttgaggagttttcaatttatgatacatttgaggaaacatttatgatacgttgtcatataaaaaggcagtgtacacaagcaatttaaacttcatcagcttaaacaactgcctggaaatatgtcaactctcaacagttgcctctaaataaaggaactattggttattttttcctggtgtcctttaaatttttttttctttattttaacctattttcacactttcttcacttaccatgtactacttctataatcagatacgtgtttgtatcctaatgatatgttttcagtatcatcacgagtataaacatatgtgtgtatgtgtatgtgtgtgtacattgttgaccaagagaaaagttgatattacttaaatccaaataatgaaatttccaaaaaaacgcatacatatcctacaacttataaaattataatggtttaatacaatgtactaagtattctgacatagcaggctttcagtatattagttgatgatgaagataattagagaagggatacctcaattaatttaccaagttccttgagtctgtcagcaactctcccaccaagaatttaacaatataatatgacattaaaaagctggtttgtgtggtgcatttttgcaaactattattttgtatttttatttttttttttgagacggagtctcattctgtcatccagactggagtgcagtgccgcgatctcggctcactgcaacctctgactctggggttcaagggactcttctgcctcagcctttcaagtagctgggattacaggcacacgccaccaagcctggctaattttttttgtatttttagtagagatggggtttcgctatgttgcccaggctggtcttgaactcctggcctcaagtgatcctcctgccttggcctcccaaaatgctgggattacaggtgtgagccactgtacctggccttaaatgctaagttttgacacacaaaaaagaaaaatttgtccttaccttgttcattttgatcagctatgtgaggttcaggtaagattttacgatcagtaaaaaaggtttcttgtggaagtaactggaaataagatttaccttgtagggtcattataagttttggagatcatgtatgtaaagtgcctagcatagtgcctggctcacaggcactcagtaaatggtggctattataatacataatattaatatgactccttttgttatatttctatacataaggtgatctgaaaaaaatatgaagtgtagtcccccatttaaaaacatgattctagggctggatgcagtggctcatccctataatcccagtactttgagaggccgaggtgggaggatcacttaagcccaggaggtcgaggctgcaaggaagtgtgattgtgccactgcactcctgcctgggcaatagagtgagaccttgtctcataaataaatagatagttaaataaataagtaaacaacacatttctagacttctagataaaatggggagtgaaagcagaccatagaatctctctgcacatatactttacaagaagtatacaacagtatactttgtatactggaaaaacaacaataagaactcctttaaaagcattactagaatcagctagaaaaagaaaatgtccacaacctaaggcaacagaggccaaaagaatgcaattatttcaaaataaatttggaacagcaagaaatgaaataagacatagctggaaaagtcaaattctcaccaagaaggaagactggcagtcccagaacattcccctaatgaattcattcttttcttcttcaacatgattatgtcccatgtcttctctcctaaatctcccacatctctatgctcctcacttcaaatcttgtttcattgataaatagaagttgttacaagagaaacttatcttcccatatcaaatctaccaatgtgcttttatctgtactcaaatatactttcttcctgttacaaagatcaactatccttgctattatctaaggcaagcccctctactgtgtcctaggtcccatcttctcttgcatattcaaacattttgttcctgtgattatcccctccatatcctgcatcctcagtttctccctcatcaccctacagtccatatccacatctgcttacaaagggaacagaaggccctttatatcaaagttcttcaaagactctataattgcaatcttcacttccttacattatctcttgaatccattccagtttggattattgtctccacagcaccacttaaagtgctcttgttgagattaccaactaccttattgacagatcattttcctcttctcaaatgtctgcgagtcccagacatattcctcatacccaccatcaacatttccctccaaggtcatgtcttcaatctcttggtgttaaatactgtctaccatcataggactcctaacatttatattctatccctgatccctctgtggagctctggactcacatacaactgcttgtccagcaactccgctcaaatgtctaaagagaacctcaaagttagcacatttaaaataaatctcttgattttcttctcctccacattttacttctccctaagtcttccctcatgtcaatatatggcataatttctagttactatgggcaaacatgtagaaatcgtccttaattcctctttatcccagttattaagctgttatctttcagcaataaacctttccataaacactgctttgtgatgctgggactgggactctgcaaactatatttttactttgccagctgaattcctgctatgtttcatcaatatagagtagtagaggaaaactagaagtcaagaagaagggaaaataacttgccctccctcataggccttctgtacctgtcagtgttgccccagctgtgggccttcaccctgacaatggtagttagctcaaaattgcaactatgtttggctctcctagaccagtcccaacagaccctctcaggagtaccagcagcagatgggcagcacttccttgtcggaggtcagagttccagctctgccaagtccctcctcctagctcctgggttctaagaacttgaggtctttctgtgtttacccagtaccaggggcagtagctgcttccccaagttactctgttatctcagtgctctcttttcgcttttttcagtcctgcaacacccatttaaccaatctcttatactcagtgattgctcttgaaatacttaacagcagccagagtggttcttctatggcataaaccatctgcctgctcctcatcacacttagaacaaacatcaaattctttcctagggtgtacagctcctttggtgatctggcctacccatttctctagtctcatctcccacctgcttcccgttactcgtttggctccaatcactctctcttgaacacactgcttttccacctcagggcctttgtatgtgctcttctcatacctggactgcccaggtctttgcctagctcactgccttacttcactcaggcctattctcaaatgtcctcttagagatgcctgccctaactactctatctaaaatgcacaatcctctctgtacccacccccaacccgccccaattccttacctccatttctttttcttatcactacaagtttatttcttcctcttccatcctcaactgaaatgtaagcttcataaaggcagggatgtgatcatatttatcactggtgcctggcatatatagtaggtactcaaattctagttaataaatgaatttaagaaattctagaaattaataaattgtaatgaatgtagtagaaaagtagaccaaagaaattgcaaagaagataatgtggaagtaagacaaagctgacataatataagctgatccatctccctgcatatataatgcaacaaatgaatcagaaaaggcacttaaagatgtaatagaggagaatttccacaaaataaacaagtctgcagaataaaatgttcaatgtaaaatggacgtatattcaacattgaggcatatgctcataaagaatgaagaaaaaacttttcaaatctcttggcagaaaactaaatcacttacaagagggaggaaatcaagctggccttagacttcctctaagcaatattcgaagccagaaaacaaaggaaaaatgtctgcacagttttaaggcaaagccagcatgacccaaaactattatatctaaataagtaccgttcacgaattaacgaaaaaggcaaatatagcatctatgagtccatgtaggggaaaaaaaacttcttagtaaagagcagatgactaagtgatgaatcaaaattaataaggaagatatagagaagcaaggcatgttgtaagctctggatttttaagtacagatcaagatgagataactaaagaaatgaaagttacaaaacaaataaaccttaaaacttgactttgtaaaaataataacataaccaataaatatatatttttcatagcagagtctgctggcatttctgaatttgaaacatacggattaaaaagtctctaaagccttaatttttaaaatcttgggtattttaggaactaagctctcttgtgatgacgaaacattttcaaaaattcagcagttccttccatttctcttccaccaaattagaataattttaaatttaatactttccaatttaaaagtactgtgatgttctcggctgggcgcggtgggtcatgcctgtaatcccagcactttgggaggccgaggtgggcagatcacgaggtcaggagattgagaccatcctggctaacacagcgaaaccccgtctctactaaaaatacaaaaaaaaaaaaaattagctgggcttggtgacgggcgcctgtagtcccagctacttgggagactgaggcaggagaatggtgtgaacccgggaagcagggagcttgcagtgagccgagactgcgccactgcactccagcttgggcaacagagcgagactcgtctcaaaaaaaaaaaaaaaaaaaagtactgtgatgttctcatcttaaataaaatgatcttatctgtataaatgcatagaaatatatcctaaactgatattcatttattttgatggtaaaatctaggatctgaggagatttaaaaactttcctgtaactttctatattgtttgaattatttataaatgagcatgtatttttataaaatcaatagccattatccataaaatagcattatacacaacaatgtgaatatacttaacactactgaactgtacccttaaaaatggtgaagatggtaaatttatatttaccatttataacttttgccacaattaaaaataataaattttaaaaatactattgtaaaatttataaaatagctaatgcacaatagctttacagatgaatttacagattctaccaacatttgcccgaacaacttttccaccaaaatgtgaaacctcagattatacccttgcataatactctatatttgcctatacattattttagtaagcagagattattcactggcagatactgttataactatgccaaatgaaaagttacttatgaaaagtaactaataagttatgttactttattaactatccttgtgctgtaaagttgtaaatatgtcatttgatttaaatattcagaagaaaatcttttagctttaatgatttttttcctgattgttaaaataatatgtgctcattttagaaaatatacaaaggtaaaaatgaccataatcacagagtacattttggtgtactttttccacccttttcctatgcattttacatatatattatatatgcatttcctatgcatttttaaataaatgagaaagttttataaactaaaaatcttagtgtatattaaacattaatatttgtgtcattaagtatttttaatagatacatattttgttagattgatacaccatggtttattaaaccactctcccactgctgaatattcagattgtttcctctgtatagatactctagtgaatatgcataaatctgtgatttcatatctgattatctccttcaaattggttcctgttagtgcaactactgtgtcaaagaattggacatttttaagaccccagaaaggtaatagataagactgaaagttttttttttcttttttttttcttttgagaccaagtgttgctctgttgcccaggctgcagtgcagtggcacgatcttggctcactgcaacctccacctcccgggttcaagtgattctcctgcctcagcctcccgagtagctgggattacaggcacaggccaccctgcccggctaatttttatattttttttagtacagatggagtttcaccatgttggccaggctggtctcaaactcctgtcctcgtgatccgcccgccacggcctctcaaagtgctgggattacaggcgtgagccacctcgcccagacaagactgaaagttttattgcactcttagtggcactggttatcagcacttattttcaatctttgtcaatctgacgggggaggggtctctttctgtaatttaattaggcaaagttgaatttttactcacatattcataggaataactttactaccttaaggacttgtaattctttgtttttttacttaagaagattgcatttagttcttaatgtatttgtagacagagcattattactatttttttttttttttttttttttttgagacggagtctcgctgtcgcccaggctggagtgcagtggcgcaatctcggctcactgcaggctccgccccctggggttcacgccattctcctgcctcagcctcccgagtagctgggactacaggcgcccgccacctcgcccggctaattttttgtatttttagtagagacggggtttcaccgtgttagccaggatggtctcgatctcctgacctcgtgatccgcccgcctcggcctcccaaagtgctgggattacaggcgtgagccaccgcgcccggccgcattattactattagctagcaagatcatattttctttttttaagaccctaagctatgtgatcctggtatcatattttctgtattgaatttatttctccatgtgccagtttcactacactttccaaagtgctactaaatgcttagtttataaggttttaaaaaactcactgcataattactttaaaataatttcctcaaccctgccttcattcaaaatgtctggagacagactggcccacttccaattttctttcacgttatcattactgtgaagtcattctatagataggagagcattctggcatacagaaaaacagcatctgtgaaactatatggcacagtttggttggggttgttgctccttcagaaccgcattatgtaattttagtgtttacttaagctcctttgggctgcctccgtggtagctatgagctcacagagaagtaagtacagtttagatctgatagcaaagtctatcagtttatcctgaatgctgcatcctttttttgttgttgttgttaaatcattactgtatgagaaactttaaaaacaaaggtatagtttcttcattttattttttaaaaaagctacttcaaacatcattaagtaatacaccaaaaaataaagggttcataaatatatatttgctccttatctggacgtacttatttaaaaactcatattctacagtatgaacttacagtgtgattttgactcaacataaatataaatatgcaaaattaccaaaattagagggattagcctttaggaaagtacaaattattaaaatggcctaagcactatttctatttctaagtcatagaggaagcacatttaatatttcttaaaaaaaacaaaaaacaccaaagatgtataagttaatatcagcttagggagaattttacaagatactaggttataagaaaagattatttaaccttgattatttcaatgaaaagtagtattttcagttttttagagcgataactcttgagtctctctaccaaacaaataattatatatgctggtttaaaataaaaataaatcagtctgcattataaaggtgggagaagtatccatttttttattgtaataatcaagtgttacgtcgccttcataggaaacatgcatactcttataaaatacttaaaagcctcaactgttcctttagaattactgattttgatgaataaacaagccccaataaagtcaatatcgtaacatctaaaagcatattgtcccttttgggaaatgtcattttgttttaattattattataaaattacttactggaatattctccatagcattttgctttttaattttgagaaggacattatgccattgattgccagcgatcctatgaggtccaaagttgggataactcatggagggcaaagaaaaaagttttcatcaccgtggaggtacagctactgtgaatgtcctacctagtttgggagagaagggtatgtgtgcacaggaggcctgacctggagggaatggacacagggagaagaaaggtgcaggaagattatgagacagactgcctactcaagttggctcaggattagctttgctggaacatttaaatgtttgggtttttatatttcattctaatataaaaaagagggtatttattaggtttcttatgtttaaacttttctaatgtacaaatgtactgtttataaatctatttatcagaagttacatgtggtgattttaaacatgttgcaaattgacactcctaccattaaaaggtggagtctaattcccctccccagaacacatatggccttagtaatttgcttttaacaaacggaagtgatggatatgatgctgcatggcttctaagactaggttataaaaaatgatacagttttaccaggtgtgatggctcacgcctgtaatccaaacactttgggaggccgaggcgggcggatcacaaggtcaggagatcgagaccatcctggctaacacggtgaaaccccctctctattaaaaatacaaaaatcagccaggcgtggtggcacgtgcttgtagtcccagctgctcaggatgctgaggcaggagaatcacttgaacctaggaggcataggttgcagtgaactgagatcgcgccactgcactccagcctgggtgacagagtgagactctgtgatacagtttccatctggctctcagtcttaggacctgtggaactagccaccctgttgtgaggcagccagaccacatggagaggccatgtgtaggtgttctggctgatagccccagccatcagtcagtattaaccactagacaagcaagtggacaagccttcagatgatgccagctccagcctttgagctgccccagctgtcatccagtggattagaaacaagttttctctactaggcaaggtaatgttgttttaagccactaaattttggggtggtttctgtacttaagtcactgcttccaataaatccctagtcaggttaactgtaacgggttaacctgttggaaggaaggaaatggaagaggcaaaggaaaaccctttccttccacgcttccttatttccttagccagactgtgagtttagcaccttctgctactaactgttggagattaagtgtgcttttgaagtgcaaaaaacaccatcatggggactcagtctatcccaacacctttccttgagggcttagagactgagcaggggaaagacaaagtttgatttcttccatttctccttttcttcttccttaggtatctctagtttcaaaaaaagggagaagcaagatttcatcctctcctatcttcactgtccttctaaattcaaatctccagaaagacaattatggtttctttttcactgaaagagaacacagctttttcagtcatataaagggaacaaagcagcaacatgtttctattatcaaggaagcaggattttattcatcagttatatgctacggacactgctctgtctttagtcactcatcacggttcttcaaagattccttctgctccccttcttcccctgaatatgggtgttcccagggttccctcctcagaccacttcttacagggcaccctttgtggtccatctaagcccctcccactgctttagctatcacctacattttaatgactccagagagccaaactacttcaacaccccctgctcccccagtagttctctgatacttcagattctacagggacaaaacagagttccttcccctagacttgaggcctacttctccttttagtccacaccctaaaccagaaatctgggtatcccttgctcttgccctttacagccaaccagttttcccattccaccaacagaattccaccaatttaattacttccttgaattcctcttttctctatccccactatccctaggtacacagcggtggtcctaattgattgttacttaggtcacaggctgttttacattccatcttcaagtctccaggacttcaaccagtgtacacctcaatatgacatttccaaaactcctttcatggctctccctttcctatgttttagtcctgaggcagaataggaatttactcataaagcaagtaacccccctaaaattgtatgcaaaattttagtataggtatgtaagcgcattttttttttcctagagaaagagcccattgctttttattttcctcaaaaggtatgtgtttcccccaaaacttgtaggtctcaggctaaagtccaaattcttcagcatgcagggtatatacaaagccctgcccgacctggcctcttgcctccctgcagctaacctggcaattgctctctcttaacatctacctcctggatttacaaactggggtggaggtgggaaaaaagaatcaaaatcataaagtgaagccaaaactgtttgtgtagcatttatacactgttgaagaatcaaaggcctttttttcatagtgcttttcgggagggagaaattggattgtaaacatgtaatttacaatctccacattttttattctagataaatgccacacacaccttcctgttacagaatattgcatagcaactttcaacatcattcagttttttaatacctatccacatatgatgttatgtattttacaaatcctgcaactaacaacgcagttcttgatagactgcgatctactgggaggactgctcggttttcacctgaattattgctcgtggttcacacactaacacccaaaaagacactctacgggtcatgacgtgtccctaaaatcctccatctactccagaaaacgttctaactttttgagacgaactgttgtaactagtctcctggcgaggcctgctatgtcttataccacaggctctaactgccaaatctttttcagaagtctttcagttgttgcctccaaacggagctctttgcagtcctcgggcggacgaatggacggattcgagcgaagcttatttcccttctcctaacgcatctacctataaatagcgctcaccgcgctgagtcaccaaaaccccgagtttccccaaatagcgcgtaacgactgctgggatcgcgtccctcggggctctgtgacagactccaaccacacacccgctgggctggactgcgggcccacacggcccagcgggtctctcaccacccggcgccccagggacgcgggcgaggccgcggtgtccggaccgagtcgacagcgtcggacttcccgcgcgcggacggcgctctggggaaggaggagccggcgggcggctggacctggccttgactgcgcggggtccgcccccgccccctcgggagcgcagagttgcggggggccggcaccagcctccgccctgcgccgcccgctcacacaatgggacgcgtcgggagggggcggccgcggctcccattccggtcccagggcggggactccgggcggcgggagaagcagtcgggctggggccagaaggaaaacccctctctccctctgcccactcaaactgcgaaagggctccagccggcggtgccaggggctggggagcagctggggagggagcggaagtgccaccccctgcagtcaagggtggtgacgtcacccctgcagccagcctgtagcgggggtgtctgtacatcacatgacccggcccccctctccccgccgaagcccgcgcgcgcgctctctcccccagccccgactcccacctctcccccgccccctctccccaactttcgccctccccgctccggcaccgctgtcaacagcgccagctccgccccctccccgcgccctgtggaaccgccacggcggcgcggcgggcgctcgcgctcaggtccgaggctccgagaagcgagcgtgccccggttccaccctgccccccagctcagtgcttgctggctgcgtgggcaccagagccagggggcacggcggcgtgcagcgacagcgcttctctgctccatcctcccacagcagttagaggacgaagctgaggcgccgggtccgagctcggagggagcgaggcgcatgcagcggcctccgggccctgacgcgtagcctccgggggtcggcccacgggcgagagaagcagccgggagcccctcctcgaccccagcaaggcggcccgcgcctccgctctccctaccgcccgggtggcgcacgccagtcctccgtctttggctgcggcgcaggcaccggccatacgacgaggggccaggcggggaccgcctccttgagccccctcggccacccctgccgtgtggactgctggggttgcagatttgctggctgttgctgcagcgcctcgttctatttttcctctcagttcccttctaaaagtggaggctcgggggaggaaaaagaaagcccacagtgttgaaaggggcggtacggactgacctgtcaacggcggaggaggaagacccccgttcggggcgagctctcgagcccgcgcagggatcggagctctgggctcgcgcggaaaggcacggcggcagctgtgcctcagccaggtgtcccccctcggcggggcccgcgccgccgcgcccgccccctcccccggcgcagcgctccccgccccatcgccggggaccagggaaccccccggctcgattttttgtgcagtttcagcaaagctccgaggaagttggtccttttgttccactatttatagattgcgtcaacattgcgaaaaggagaaggcggagcggtggcccctccccctcccctccccccgccggctcctgggagagaaaagccccagcacacgacctaagtacacagcgcgccagccgcccgcccgcggccttctgctccccgcttcttccccctcccagccggggcccgaacgctgccaaccccgtcacgtgcccgcccgggaaaaccagctccccggggctccgcgccgcccgccaggcttcgtggcggcggcggcggcagcggcctcacccagctcgtgggctcgggccgcggctcaggcgtcacgcatagcgtgggcacccacgccctcgccacccgacgaggatctcgggctccgcgacctgtgggagtgctgcggggcgtcccgcacttccgccctctctcgtctccggctccccagtcgccgccccgctcgccgagtgtgcgcgcattcgggcctcgcctcggagccgggaggctgtcctgtccccaggcccctcgcgcggccgctcttccaggcattgcggtgctagccccctctcccgcgcacgactggggagggcagaggtgtgagggatgcgggggtggctcgcagccgttcgcgggcaggcgggcggagcgcgggaagcgcggtgcgggcgttccatggcgcacccagacgctctccctcctccgcaggtgcagcggggcgttgcgcgagctcgagtcccccttcccggacagctagggagaagggagtttgcagaccggagctacagttggaagaatatagtttttgagaagttactggaagttagatgtgagacaaaaacagacgaactttccttcaaagccttatgacgaaatgataggccttgccatacccttgaaatgaaactgagctccctaccggcctaaagccgctgttcctgagcttcatgtaaacaaggagggcggtaaacaccagaggaaggccttacaacaataccaagtgcaagtagctcatttgagtgttatttatcttagcagcttccctgagtgatttatgtatattgcagtttaactttacagggtgggaataaaataatttggcttctcagctcactggcggaagaaactagagctgagctgggacgagggcaagaagcgcgtcgcacctttcctggcagctgaacagtgtgatgaacagtctggaagggttatgttattacttaaggggtttggggaaaccgttcccgcgcacagaccctcattcgggccaactgcaggccgtgggggactcttcaaggactcgcgcaacccgagccgagcttcctggctgggcactgggctcagccagtgctgagagcgctttcgctgggccagtcaagacagcaataagtttgcctctatttgggaaacctttccaggcttgcctgccctcttttaagagggagactaggtggtgggatcgtcagctgccaatgtgtgcactcgttctaaagaaggcgagaggaagtaaagcgaacctgtgcagtgtttgctgggcttccaaaacgcggaacttagtcgaccccccagcgaaccggacggcgctttggtcccctcacacctaacggtactcagagcctggtgcgggagctggcgcgctcgctcctggtttccttccaatttaggcaaaggccctggccgcccgtcttcctgcttctgctgtgccctgccacagcactcctaagacggcgaattcgtttctgcgccaattttgttttgaatatctacaaaccacttttccttgcatgaagaaaacaaggcagggccccctggcccgtcccacacctgcgagaggcagagatacagaggcctcgggcctcagccttcatttccccgccctagcttcgcgccaagctgcagtgtccccgacacactgtcaggacacgcgcttttcgcccctactttgttcttgcgcagtcttcccagctgcggagaggagggagcgaaagcaaaacgaaagcacccggggcgcatcagttgcaatagcttccctgagcgcggccgtgggaggccaagatctgaggtcgcgaggcgacggtgggggcccgagctgcgcagaaactgggtgggggcggtccctggagggcgcccgggagctgctagaagttgtccggagcccctcaacccccttggaaaagcgaacgcggatgttaatataccaactccgcagggaacttttggcccgggtcttgagctgaaattccagactgaatgggaccgtgctgaaagttcgacgaggcaaaggagtatggcgcgggggcaagctttgacccccggcttcgtatcctcgggagaggccgggactccggctcgcccagcgagggtgcgcagaggcctcctgggattctaggcccacagaatttttgctccagtgaagttggataagcactccgcctccccgcaaaaaccagagttctcggcttataaacacttcaataaactctggtgacattctccgcgctcgctccttgccctcgcggcagtcactgcagggacaaaggcggcctgcgcagacttggaagaggcgcggcccgcgtgggcggctttaccggccaaagacgttttcagttaaggggaggcatcttcagagctgagggtaactccccacagccaccccgcaggtagggcagccaaccccaatctggtcagcttaaaagtgtcctcggtttcgccccctttcccagcgaaccaacactggcagattggcctgcgagccgctcgctctgttgctctagcacatttatgtagccaaacggtcgaagagccccatctttaagcccaataaacacttaactttattctatttaataacacattttgttgtggcaatatttgtggattttggcaggtattaaaatctggtgatcctaaatgagtccaatgtggaaatgcagtattctctacgagtaaatagttctgtgcttcctctcactggcacctgacgcaaggcgcagccaaggactattacacctctggctgctcggacgcatcttcgcactgcgccccctcgctctttaaacctgggagacttgtaattgtgtacctgtttgcattgtttagcctatgcatcgcagattattcattttactaacaggactcaaaaacagctgtaattttcaaagatgcacgatggagttcgcttaggcgaacctcgggaaggcagtcttggtttcctgctaatgttttgccggtaacaggcagtagtcaatcccagactagctttgttggtttttattcctcccctctttaccacaacggcaaataccagaaagtcccaactgtaaaaagggcggcccactccgcccaaatttctctatacgatgctgagaggcgagctacaggtgaaatagactcctaggcacttctcttagaaaaagccttctatttcctctttgaaaatacttagcaaaagctgtttttgacttaacagactataaaaatgcctactttcaccatgctcgccctttggtttcatacgaagccacttttctcactttcttgcaagttctttttttcctttgtaatatatttttgtgaaacaggttcgattgggttatcttgctaaactgtccgtctaaaattatgaagttgatgttttctactctcctttgtttaaacaaaaaggacgcacacggatgtgaaagcccgtggttgcctttattctgcacgccacctttttttttttttctctgcgttcacaaatgatgctttgcctgggctaggttcagacttcagtacctaaaacgttatgcgtctgggcagtccccaagagctatcgaaaggccagccttgctcaccccattggaaccagcatcagaaacctcgatttagagtccaatttggaaacagatccgtgcctttctcggtgaaatgggaagttgcctaaacgatgcatctggctttagattttatggggaatatgatctggaaaagggaacgcctgtttcagctggggcaacacgccccgcgcgggtcccctggggcttctcctgcaaacaacgcgcgggatctcgacccgcagggcctcagtcgacctctgcgcgccaggcttggggttgaccccacaccagcgcgctcccttcctggcctcgcctggggtctctggcagtggctgacgaggctttttgaccaaaggagaaagtttgaggctgcagatcacatgtccttaaaggatctggggagagggagaggctctttgcaattggtgccaagaaactcgaacatcccgcgctcgccgcgaggcgaaaagaactatcctgggggagcacaagtgttcccgagactttgccaaagtttccagagtccggaggtagcttgcctcccacccccgcccaccactgggttatttcctaatcccctctaggctgcctcgggcgaggacccaggcggggcccggggtggcggagcagggagagtggtggggaagatggaccttccttgtggccggctccttcggcagtggaaacctctaaggggttaaaatggcgcggctggatgggcgtggggaatgttgccagtgttcggtcccgactcaggggagaaacggggtgggggtgtggggatcccggaaagggccggaaaagccgggagcaccgggaggtgtgaggccagagtttctgctactgggggctcttccagggaagacgctggcgggaataggatggggctggcagctggggagcctcgcggtggctattgcacgtctcggcccccctggacagggttatgtcaggagagcgccctggcaccgagctctggccgctggataagatactccctcgccggctccctccgtgagcggggctgggcgggtgcggaggggcgggcggtgcgcctcgccgagcccggggcgctgaggtcggcaagtagtcttcggaactggcggcggcgcttctccagtcgacgtggaaaaaaaaatcgtctcaaatagcacccctcggtctgcagccctttaacactggtaaagtagataacaaggaactctgctgaacgagggaaactcagtttagaacgtcccagagtttccaagtttgtcaagcgactgggaatcttggtcgccgcgtggagagtgcgcccatttccccttccagaagaaaactgaaggcgtattcctccaaaggaaggctgcagtcaggcgccacacagaacacaggcagtcctctccggccgatctcgggctcgcctctcccagggccgtagggagcatcttttctgagcagccccgggagggcagctccgggcgctctccgcgctgggccctgccgcggccggtgcgttacatcaggaaacgcttggtccggttttctgtctgctagtcaaaacaattggctgaatctcgaaataacttttttgatagtccggaaaagaaacatgacaaatagactcaccatcaggcttgcgtcagagaaccattttccccagactatagtgagattgtttttttcattagttgcaggaactgatttttttatgatttacctacctgctgcagttgctgaatgtattcttctcccctccttttccccacttcatctggttgtcaactcctttccctccccgcccccatcccccatcccttttaaagctccgggtactggagtccatcgtatccagtttgtgtgtgtgtgtgtgtgtgtgtgtgtgtgtgtgtgtgtgtatcccgctagtctagcccagcgtttattaatggtcaatataagccacagtgtttgcatagccctcacaaaatgggtcatgttttcggttcctttgatctgcagcgacggaaaagttttgctttgcatattctcttttttgcacatcgagtttagtgacggtgctctcctcacaagttacaagttccctcccctttcaaacagttatagggatctatttttacagggacccaaagagttaggagaaatccagcatgtgctaaggctcaccttcactttttttttttccacacaaggattaacattaacgatgtaatgagttaaaacagactttaataccactaagcatggatttccccattaaccttggcaattatgtcacttcaaagaaggaagtatcaataacgaaattcttttgaattaaataaaattatggaaattgtccatctgaggtctgggcgcagaagaaggaggtttcggtattttaaagaagaactcttattggtggataattattaatatgaaatgaaatttgtaaagctagccctatcagggtacctatatatataggtgcttgatgagtatttagtctccctcacaccattttctaattcccatccttgaaaattttggcaggaaatacagacttcccagtggctaaaaaattatgctgaaacttctcttgtggttcaggtaacctccacttacttaaaaacacacacacacacacacacacacacacacacacacaaaatttatccagggaactttaatagcttattaaaccttaatggaactatctaggcaaaataaaaataatggtgattacgtattctaaatccaaaacacattaaattaactcgaattttttgatggttccaataggtaactattaccacctgatttcgtttacgagtttccacagtaaaaacgaaatttgtcagcactcgtttgcttctagcatttctgctacagcaggcttcgccggcagactgatctttctagaccttgtctctttcagagcgccaattttatattgaggctattcagttctccacttttaagagagacgggtgcacttttttttcctttaaaaatcaaatgagaaaatggagaaagagtttgtagcactcacgggtggagaaaacccatctgcctgatccttttgtcccggtgcggagtcgctggagaggagagtctcctggagccgcttcgcggatcccactgggtcacctggtcctggcttattttctttgaggcccattctcggggagtaaatagacagtagcgagtttcctggcaactttgcactactctttaaatagaagagaattcctccagtttgcctccccttataggctttcccgcctcaaattgttttaaatgctcctcacagtctttttgccccttctcccaatgacaaggcaagtctcagcgggtgaccttggtgtgtgccgcagggttcaggctcttggagcccagctgccctgctgagagagcgggaggatagtcgcacctaattagtacgcggctccggcggagatgagtgcgtgggcactgtgcgtgcatcttgcacatgacacccaagttcaaagcgccctgcttatgaaaacttggggcatcaatatcgtctcatcactcaggcgcccttagcgaatctggacagatcgaggggcgcagtcttggcttccggaccaggactttctttttttcagatctatttagctagtttagaaaaatacaccttatgcgaacatatacagctattttctcgccctccactccagtggtctgcaagcccctggtgctagtgtgaatattcctgagtcctgagcgggttcccgcccgtgcagagccaagaacactgagcggaggtcactgtaagttcagagccgtgcatcctggttagaattgggagaaaaaattctaagcccgcccggagctgctcagaaaagatgggtctcggtccagcgcccccttaaagtcctcagtgcgcgaaagtcttggattactgtgctttgcgcaaattggacgccacgcctgaagggcccgcggaatcaatcgcttgccttctgtggggtcctggcatcagcgtgaccaggacatgctattattattgcaaaccgagacttgaagtggacccccagcctccacccaagccctgcggccagggaataattctaagggctctcccctttggatgtctagggtcggggcggtctcggctccctggatcctctggtgtcccggcaccgaggggcgctcggcagcggggcagaggggacggcctcgcgaccccgccaggggcacgaaggaacggcggccgagggaagtccacgcgggctctggcgcagcagcgaagctggaggcgtttgctccgctctgcccggagcaaggggcgcgcaggggaaaccgcttctagagcttcgcggggaagggatcaggggcggagggaattctgtattctagttgtggatctttcgggtctctgtcagttaacagaagcctttggggtgtgggtccgggacgccgctcggagccgtaaaaccttgcctgacccggcgctcccagccactgcggtgcagccgccttcgccttctgggtgcgggacacaatctggcccaaggtcgttcaaatcggggccggcctacccctcagagagagcctccgcccatggtccagtggcagggaagcctcaggctacggcctagatggagcattcacaagggcgtttccaggccccagtggcctctgagcaggggttaactgaggttcaggtttcttctgaaaacctgaactgaggttcaggttcacaaaaagaattacacaagtttcccaactctacaatctgttaactcaaggccgattaccttctcagaatcctctaagtatttttgcctgtaaagtgaatttggactttcttcttctcttcctcacacagctggtcacagacaaaaggtgggttacaggcctggaaaagattcatcccctgctcacacatgtgcctctttcttgggacgttgtgtgttctccacactcctgggccggtcaggaggggtcttgtgctctgctagggaggtgggcttccctgtaggaagagtgtggagggaaaggcctagctggcccacttggtagggagggtcccacgtggcctgcagaaaggcatgaaaatgaccaggagacaggacctgggccgatatgtgtgaagggtggggatctggaggcattgggaaaactctctcccagtgaaaaagaggcccaagaagttctgctgcctgttctaagaagacaggatgctcagtctcaaggtgggacaaggccagagttccttgcgaccaaactgggatcggaaatctgtattttcctggctaaacttcttgtattttaagcttctttctcatttgctttccgtttactctttagtcaagtgtttctgaaaatcttgccaaaaggaagtcattcagttaacagatatttattgagagaccactgcatgtcaggcacaggaataggacggtgaagaagacagctcttgtccttacagcttacaatccaatttttatcttaagagaataaaagcaattaaaggatgccatgaaaaagatacctgggtagatccaaggtgaagggagcatggctatttggggctacttacaagaacttcagtatccttgaaacttagagggcagaggacctgctgggggagcagagagacagcttgaggagaggagcctgggccctgagagggggacccggggtgaatagttcatcatggggctttcatggtgcacagcaggtgaagccgagggctgtgttagatccgatgccccctaggtttccttctggtgtgaagatttgaaggattcacttttatcaagggagctgatgtttccttgccaggcaccacatatatccctgtgctattacacatgattaatactgcagactttaaaataacaatatgcaactaaaaagtactttcaagagaactcatctagcagaacgttttgtaagaatattgtagttagagaattgtgttggagattaaatcatacatagtgaacaagacactgtccagtcctcacaatttaccatccagtggaagatacagagaaatatatatgagacattcgaattcactggagaatagagagcaggctttatgctctcaggaagttgggttatagggttggggcatttagttcaaggtagcttggggaggtcccatgaagaaatctgggagatgattcatagaagaacggcttttgtgtattgactgagcccttattcttatatggcattcaaaatcctcctgcaaacacagtatttctggggctcagaattgccctgaattaataactgtgctagaaagacaaaagaaagttcttgcaactgatgagacttaaaaaagtcccctctggaaatgttaaggccttcacaatatttctagggctcaggattgtcaaaggctactaactctgccagagagacaaaagaaagatcttgcaactaactagactaaaaaaagtgctagtttgatgttacagtgattaattatgaaaatactcaggcatgatgcttttaattgaatccttttgtagcattattggtaggggcaggagggaacagcaattccttgaatgcctgctgttccataggcccttgacatatattgtctcttttaatgctcatgacaactccatcaagtcggtatttttatttccattttttagattagaaaaatgaggttcagtgaggttatgcaaggccacttggggagtaagtggcagacccatctgacttcaagcctgtgttctcttcccttttctcatggagtgccttcccaacccagagggtgatgagtctaaaaaggaatcatattaagagaattcacatttgcaaattttaaattcctataaaaaaataggcttggatgaacttataatatctctataaattatattttagggttgccaatataaaaaattaaggagatcaaaataaacatcaagaatgctttatacaaattaaattaacagaatgcaattaatgtctctttaccgttgcttgctagaaaattttcagaataaagagatgcttatccattagttttgctttattacacagagaaacacatgcgtgtctagccttacacttaagtggaaattcccttaggtcactttccctgggttgtgactaaaggcggctgtcattatcatgtaggccatgtgaggtttgtgactggagaagggattatggtcatgttataatgttataagttgataaaattttataggtacaagtaaaagctttttacttaaaacgaaaatcctaggattacatcaatcaatcaattcagcaaatatctgttgaacatcttctgcctgccaaggaccgtgctgtgtgctgaggatataacgttgatcaagacaaactgagtccttgctactggagacagccgatcaggaaggaaggaaaacaagacttgcttggcttctgccgtgtgccaaacactctcctagattcatttaatccttcagatgagcctgctgtctgtccctgtatatgcagaacatgcgcagaaaaaaagtgagcctcagaaaaattaaatagcttgttcaaggtcatacagcttgtaaatgacagagctccaattcaaacccagcaataaagacaaagttcttttcactatgctacactacatccttgactatgaaaatactaaaaattgtgagtacttgttagtcattttatccctccttggcttgtttcctcaattaaaacagctgggtgactattcttatactattcacctcatagaacactcttaaaacccaaagcactgtaaaaaagtttttttacagtgctttttaattgtttagcttaatttaattttataggagaaaaagcatatgaaccctaataacaggtgtgtcataataatctattggtagaaaaaaaatcctagttcgataggattagattttgacaaattattattgttgcttttcttttattaatttaacaccaaacatttattggaaatagtagaattatgccaagcctatagatacagagatttctgagcctgtagatacagagatacaggataagggcaaattccttatccaacaaggacctccaagtctagtgggtgagagacatacctatttaggtaaattataaaaatgtgctgtaacagatgcccaaggtctctgttgcacagactggagtgcggtggtgctatcatggctcactgcagcctcaaactcctgggctcaatcgatcgtcccatctcagcctctcaagtagctgggaccacaggtatgcgctaccatgccaggctaatattttgattttctgtagagacggggtctccctgtgttgcccaggctagtctcaaactcctaggctcaagcagcctcccaaagtgctgggattataggtgtgagctactgtgcctggccccaactcttcattttaaagttttccaatagttcttgtaaagtctgcttacacaggcattggggaaagagagctagaccacttgattaaagtgaggtggcctagagaaaaacagctttacagcctctgacaatgttgacaaggatgtggttatattctactagcatagattaaggattcaaacagatttagataattcagtgtgccatggatgggaaaggttgatgggaagtcttcaaagtagatataggcaacataaattataaaacattatatggcggggggcattttggctaatagttttacccctgagttcatttaaaactgtcagtggatgccactcatttctagggcatctagtcgatccaataagagtacagcaaagacaggagttcaagaccagcctggacaacatggcaaaaccacaaaaatacaacaaatacaacaaaaaatacaacaattagctgggtgcagtagcacgtggctatagtctcagctattctggggctgagatgggaggatcacttgagcctgagaggtcaaggcttcagtgagctgagatagcaccactgccctccagcctgggcaacagagtgagaccctgtctcaaaaaaacaaaaagtacagtaaaaagttctgaacatattttttctaagcaaaggaatgttttattcaaatgaaactttaacaaaaatctagtatataaagaactgcagtagctgaagaagatggatgaggaggagggacgccctgacaaccaccagaacagccatgcattcagtagactgaggggcctggcatcaagtcttgccttctgtgtattccaggtctggaaataggcagccacatctgaggtgcacagtaagtatatgatgactgactgaataaatgaatgaaatgccatcattttgcctctaaatgtaattgaggaacacaaagccgctaacattttcattagtgaaaaccaaggtaatgaatccatttaatagctcattttcatcaccagattcttctggccactcacggtccttacttgccttctttgaacatgagcttatgaagcatttggtttttacagtccaatttcctctaggactgtttccatttgacataatcaggaaaagtacccacctgagttcaggaaacttggtgaaattcaggctgcattttagggggtgagtggtgggataggaccaagagggagaaagaaaacaattttcttgtaaggatcacacacggctaattttaaaaataaaattattcatctaattatataaataatgtattgtcattgtagaaagtttggaaaatacaggaaaacctaacgaaggaaataaaatttactttccctgccatcacccagagataatgctgtcattgatgtctatccctccgttcatgtctttatgaagcaggataacatatataacatccaaatatgttttaacttgcttttatgactacataatatatgcaaatattttatgttgttaaatattgttctagaacatgatttttaaatttctgtatcatcaccgatggaagaatgtaccacattttgtctaacaaatttcttttatttattatttatttatttattttttaaattttttattttattttattttattattattacactttaagttttacggcacatgttcttattgttgaaagtttgacttatttcccctcttttttctattatgaatagtgctacattgagtatcctgtagtctgagtgtgtgtctgtttagtatttatggcatgctacttatttttttatttttatttttaattgttgtgggtacatacacagtaggcgtatctatttatggggtacaatggcatgctacttttttttttttagacagggtctcactctgttgcccagtctggggtgcagtggagtgtgatcacagctcactgcagcctcaacctcctgggctcaggtgatcttctcacctcagtctccagagtagctgagaccacaggcatgcgccaccacacactgctatttttgcattttttgtagagatgggggtctcaccatgttgcccaggctggtctcaaactcctgggctcaagtgatctgcccgcctctagcctcccaaagtgctggattacaggtgtgagccattgtgcctggacggcatgctactttttaaggcttttgatgcacatgggcaaattctagaatggctgtactgaagtagacattgtggacaatgcatttgggttcttgtttcacacaccagagcttcacttttcatctgcaacggcattctgaccatttttaatgagcattagttatttgacactgagcataccactttcctaactttgagaagaaagagaggtattaaagtcttgggtgtggctgtttttcagaatttacaattaaaaatctatctcaatattttgctgtctttaaaaagcagtgaagtctgaggaaggatattagtggattcagtggctgctgttcataatgcctgcaggacattttgagtgtttccttcctgagttcagagcctcatcctcgcatctcaatgagacattaccctagaacctctaccaccatgactaccagcacttctgaattgaaactgtctttggctgtcaatttgctttggggaccttttctagaagttaaattcatttttgtggaggctaaaactagtcactcgatcacatttgtgatatgagtcatgttagaataaagatctagaagagtggtagatcctatctaacttgcacaatagtagaaagtgaggtacaaacaatatttctcctagtccctctgagttcaatctggatttgagatttacttttcatgatctgacacaaagtatgtgtgtgtatgtgtattttgaaaaatttggacaggagtcccatatgatgttgaattaatcaaatataaatacacacacacacacacacacacagacacacacaaacacagagacacacactttattccattagggaaagtatgctttcttttttttctttgctcacaaaactgagaaattggcagaatattttacttgtaacttggcagtattgcaatttacagacgagaaaggcaagccaaattgggtgaaaattgtttgagattttttttcccagttttagacagtgaaaatcatgtagctgagcatgcacattcagccgttttctgcttgatttttaaccgcgtttgttcattggcactgccagagctagttacaacttcccggtgcaagcatgtgatggccaggggaaggtgtggggattcgtggctgtcctccccatgctgttaatgttaaaataactgttgtttgaattgttttgagatactgattagagaaatatgaaatgtgatattatttgagcttcataaatccatcttaattatcaatatataaacacagacttaggagtgggagatccagatcagacatgtttacaggcctgagctttttccgtgagtttctggaacattgtggtgcctgagacacagcgggaatccgacgactctgagaacggactttcccttttaaatgctggaggctttgaaatcgtcttcacaatgagggaggattcatgaagtaatgaaaagctgtttcctctttaaaacgttcagacagcagcacaaacatctgggaatttgtttgaatatttgggttccctgaattacccatttccttaacatacattttacttacttttccaagggagatacatttccacctcatgtttttcccagtttagctgtgttaggctcttcactttagcatttaggttgctttgtatttaaggacacaggttaaggccgtattatgaaaggtatgatttgggtttgggggagcaggatgttgttatgcgtgaggggcaaagtgatttttgtgtgtgacacaagtttcaattacatcatggtgtcatccttataaattaaatttaaaaacagttgtgccaaaaaaatagccactaatgtttcttttaaaaaatgattaagcaacaatatttactcaatatttgaattaagcaaaactgtcatcttctttctccttttcagaacataattcctctttcaacttcagaagtcatgagacttccctttctttctccattctcttcctcacactgcagtgtctcaaagggtgaaaatgtctgtgtgtgggagagggtggtggtggtagggcagtggtcagaacattctggaatccaggataagaaaaaccagcttgatttctgcacttaggacattgttgatgtttatttagggatgtgctatctggattgatggaaaaatttggaaatacttaaatatttcggtatgtaatatcggatgatgagacagtgcagcactgatagcttcctggttgtcagtgtggctctgtatctctgttttacttgtcataatttgtactaagacaggtgtggttttaaacggtcagtattgaactatttttgactaattagatgcgttacgtgtgacttgccagtttataattagttaacatatgataaaaaatatgagatatattgattggtataactatactaaatataatttaatctagttgacttttttaataggcattttaggataccacaattactgctgtgaacttcaatgggttatgaatgacaattgttactctggagcatcaggcatgtagaaagtatagggattgggcttaatacaaatttagtggcataacctggcagtcgcctatttgattataattctgctgttattctgaatgctgttcatctgcccttatctcatacaagtaggttgcagaacatatttttaaaaatctggccgggcacagtggctcatgtctgtaatcctagcaccaattccgaggttggaggttggcccgaggtcaggagttcaagaccagcctgggcaacatagttagaccctatctctacaaaaacttaaaaaaaaatgaggttgggtgtggtggctcacgcctgtaactccagcactttgggaggttgaggcgggcggatcacaaggtcaggagatcaagagcatcttggctaacatggtgaaacccagtctctactaaaaatacaaaaaattagccgggtgtggtggtgggcgcccataattctagctgctggggaggctgaggcaggagaatggcgtgaacccaggaggcggagcttgcagtgagccgagattgcctcactgcactccagcctgggcgacagagtaagactccatctcaaaaacaaaacaaaacaaaacaaaacaaaacaacaaaaaagagctgggcgtggtggtgcacacctgtaggcccagctactcaggaggctgagatgggaggatcactagagcccaagagttggaggctgcaatgagctatgattgtgccactgtactccagcctggatgacagagtgagaccctgtctctctaaaataaataaataaataaataaaaatctggctatatgagctggcaagtttgtttatttactttaaaagttaaacagcagttaattgtgatttgtggatcacttcttccccattgatttaatctctgcttgcttaaataaattaaggtactgtatattctggattatacttcctccgcctcaaatttaggaatattgtgaagtgagactatgatacttgactgtggaaagggatatatttgtaccccattaccaagttttcttcttggtgtctttctctagttcagatggaactatcatttatatctaggtctgatgaaataaaactgagggagaggggcttccaggtccccatttcttaaaacgtcatgttgcctgacatgaatgaatgcatagccacactcttgttctctgaatctgtcagtcaattatgtgcatagttcgcaactaggacgggatgtcctgtgaagaaaagataggcattaagcccctgtaagtatgaggattgcttgcgacatgtcccaagcaattgtagttcatcgctgagatcaagaatgacatgtttggctgggctcggtggctcacacctgtaatcccagcactttggaagggtgaggagggcagatcacctgaggtctggagttcaagaccagtctggccaacatggtgaaaccccatctctactaaaaatacaaaaattagccacacgtggtggctcactcctgtaatcccagctactcaggaggctgaggcaggagaatcatttgaacccgggaggcaaaggttgcagtgaaccgagattgcgccattgcactccagcctgggtgacagagtgactccgtctcaaaaaaaaaaaaaagaaaacatgtttggctttgtggtacaaagcaaagttttcattagcaaaggtgaaagtgcccaatatcctgttatatcaaactcgattgattaatgagagggatgaaggttatggatgtttttgtttgttttggagggtgtgtatgtgtgtaggggatgtttaatgtgagtcaggcagtgtgagaatagtttctggggtctggtcccattgagaacaacctgattctggtaatctttgaatatcatttaacacattacgtggctcttaataaatgggtctgcttcatagttacaatagaaattgacccctctgccatgtggtcccctccttccctccatttggctttttatccttggatttgggtcacaacctttggggaagggtggaaacaaagcagaactggcaattatcccagtgatctggattctaattaattaaggcctactttttttctccttttttggagaattgtgcctgtaggcattttgtgggaaggatgcctttcttattgaataactatacctcaagctttttttttttttttttttttggacccaggaagggatataaaaaataattagttatgaggggcaccactgaaagtagaagatttacactcaagccaggaatttatttgcatatcaaataaaggacagagtcatgcatgatgtctcagaatctctagttatcctaatcagtaaagaaaatgaaaccagatgtgttcatttcagctttgaattgtgttactattagaataaaaattaagttcccttaagtatccttttaggtcaaatctaatcatttctctagatataattctcagaaaagccagtggcattttgatagtggaacctggtattttgctggacttaacagttctctgtgaagctacatacaaattttatccattgaccattatgctgtacatttcttaaagtgctatttttgttgtggtttcagtgattctcatccgaaacatagctgcatcatgtcatggaaaaacactggactgggagttagaatcattctcctctcagctcttccattaaatgaaaagatttgtgcttttggaaaatcactttaactctttggacttcagttttgttggcctgctacataaggtctctaccatcattgaacagtttaggtctttattagaacatgcacaacatagtgagctaaattgcaaactcatctgtaaaaatttgacatcttaagcttcagagtaaccctgtttagtatttaaaagcaaatgtcaatgtcagaaggttgaagtcctaacagtattagaaaagcaaatgccatcaacttattgaacctacagtttttaaaaatttgtgtcttaataatatttaatgtttttatccgttatactggtaatccatgttcactgagaaagtttataaaactcaaaaaaaatcgatcttaatctcaccactcagaactaactagcaatattttgatgtttccattccttttggttctctgtatttctcttatattctatgccatgtatgatttatttttacaaagttggaatcatagtttttctatcatttgtttgtttgttttttgtttgttttctttttgtttttttttagagggagtctcactgcaatgcccaggctggagtgcaatgatgtgatctcggctcactgcaacctctgcttcccaagttcaaacgattctcctgcctcagcctcctgagtagctgggattacaggagcgtggcaccatggctggctaatttttgtatttttagtagagatggggtttcaccatattggctaggctggtctgaaactcctgacctcaagtgatttgtctgcttcagcctcccaaagtgctcagattacaggcgtgagccaccgcgcccggctgtttctgtttttttcacttggggaaacattgtgagttgcttcccatgtctttattccaaaagatggtttttaaaggcttttaatttttgtttttgaattacatatacttatatataattataattatatatatgtagttttattttatgaagcagaaaattaaactttctctctccctgcattctgccaacccactctctctttctcagtcacattccctgtagggaagtccatttatagtttgaggtatattcttaaggtccgtaatagatgtaagtatatacatgtaatagatgtaagtatatacgtgtaataggtgtaagttcataaatgtaatagatgtaagtatttaaatatgtatgtatggccatatgtgagagttttttacttaaatcaggccattccattcacactactctgcactctgtgatctttcatgctgcattactgggagtgaggaggtattttctagttaatatctactgccctagctagttcacagtaatggctccacagtgattcccactgtggatgtctgtttttttttttttttttttcttgatggagtctagctctattgcccaggctggagtgcagtggtgtgatcttggctcgctgcaacctctgcctcatgggttcaagcgattctcctgcctcagcctcctgagcagctgggattacaggtgcatgccaccatgcccggctaatttttttgtattttttagtagagatggggtttcaccacattggccaggcttgtcttgaactcctgacctcatgaaccacctgcttcagcctcccaaagtgttgggattacagacatgagccaccgcacccgaccggatgtctgtttttatttaatcaatcacctattgctggacattgtggttggttgaagttattttattttgttttaaaaagggttgcataatatcttgtatccaaatctttgggtgcatctttgattatttccctaggatgaagtcctgagtccactgggacgtacgtgtggcttttgatattgccagtttccctacagaaaggtcatcctgttttacattcctgtaaaatgtgtatgagaggcccttctctgaccttttcccactctgaactagtcaaaacttaaggcacatttttcatcattattgtaccagtttttatctcaatttgagtccaggacattcctttcagagtatggggaaaaaggtcatccagattctctggtgccttgatcatctttgacttttctaatgagactttgtaaagaatcctgggaagttataagttccactatacggtatttctatttttatttgtcatgatgaactcatagattaataatttattccttttcttaaatttagaaactagctgacttagatttcctctcttattaaaatataaagtcctttgggaatggtaacatattatcgaacgttgtgatttgtattccaggaactagagtctgttttgattgagcgtctaaaaatccttgctagggagggaggagaaaagtgcccaagatcagtgggtagggcccctggtcctagggaaagagtcattgttgatttaccaccattagtaataagccattcattaaatccatgaagacaaatcatgtgttacattttagttgtaagtttcttgatctttagattttgtgactctgaagatacacttcagttattgctatgctttttttttaaggaaagaaagttcacaaataggcaatgttttgatatatggccaataccattttaatatagcactccactgtgggggttcagtttatgacaatggaatacagccataactagtcacaaaggaaccgagatcatgatataatggggaacaggtacaaccctaatgcaggatgcttgcattagattcttggccctgtgcaattagtatcctgaattactctaggcaggtaacttaggtcatgacaatacatgctttatatacttctaataaatagcactgtaaccaagcagttcaaagtgggctcctaacactccatgacatcttcattagatcagatgatcacaatacaactggataaaaagatcaccttgtcactgcattcagtttgtgctgtacagataggccttttattcctctgtcttaatttttccatctacagaaaaatattggtgccaatataacatgagattcagaaactgactttttgtcttcatttactcagcaaatgcttatttgaacatggctatgtcgactatgtgccaggtcctgtgctatccacttcagtttacagtggtgggagtcagaggagtcaggccaaagacacataaaaggagcccactctacatctggcacccctggattctacattgcaatgtaaatgtccctgtcaagaccttcactacctcctgctctgcagcaggaggtaagagcccatctgtgcaatttgctgcccgactttctttcagtacctggaggttggaaggggggaaaaaagcaaactttgggtatcaaaaatatccctctccttatcaatcttgatttctgaatttcattatggtgttaataccattcgtcatttattatacagatggcaacaatttgtttttgataagcaactcagtgcctttcaatcagtggctaagaccaactcgttgaacacaatgggatggttaattaaagacacattttaaatacacacacaactcacagatgtatgcagggacatgcatacaactgttaaggcagcctgctttggtcctgaagaatataatttgatttacagttgagaaatacaaactaaactctgtttggggaaaaattatgccctaaaaaaatgactggggtagaaatactgtatttgagaaatgagaactttaaaacactccactttgtctttgttaaaatgggagtaatagaagtagaattttgccaagatgtttaaccttattgaggccacaaagtaggaaaggtttcatttttaattttgcaaaacccaactttctttcttcctctttatttccttgttttcctcccatctccctccctccttccttcccaccttcctttcttctttccttctgtcttttcttctatctttccttccttttttctttctctgtactctcctgtcataatcaagagtaaaaagtttaactttatgcatctgaatacatttattcatggattcttatttaataaaaatagaaaaaaaaacactcgtaaagaaaactcttggtgagttacaaatggcacgcttcctttggggcgcaggaactcagggtgctcttaaacaccttgacattttcaggactttctgccacctgggatttagatcaaaactgcagtgcgtgtcagaccatctcagaacaaggaatgtttgtctcagacattattatgccctatctcttgatgaaagactgggatagagtcaaatcatgtgtcttggtgtttgtttaatatttgtgttccgcatttattagctgatgagttactggagatttgcattcttctgagtcagccagtatgacctattttattgcagtctaaagttgtactgaagggtgccttggaaaacatgttctccaaatgttggtcaagactgacattcacagaatttaaagctggatgtaatgttatccaatgacagcttcggaaatatgatgactctgcaagaaatcaggggaaattcagaatggctgttaagaccactcctaagactatcttgactatgtgaattctttctccagttttttctgtgtcatcccagcttgccatctctagctcctgcttcaacaggcctcgaactacctctccagtccacttcagtgccttaacagctcagatttcacttccagtagtctagggcttttacataaattagagcaagaagagaatacagtggggagaacaaaactgattaaaaggttggaaaaataagacttatgaagaaaggttaaaggagctaggattattcagcttggaaaagagaaactagtgggtggcttaataaaagttttcaagtatatgaaaggttattatatggagactggcgaccagctgttctcctgctgctgagaagagaacaaaaggaaattatctttaacttctgcagcggggagctagcttggaaataaaggatttcccagtggtgaggtttgttaaacattagaatgcattaccatggcatctctttttctggagatctttggaaataagacagggactggtgtggaagggatggtttagataggtggaggcttgcctaagttactggagaatcaaccagatgacctgtggaagctctttgctggtcctttgagtctacaccaagccaactggacctcagccagaaaagatatggagaagagccaggctagttcatgcctttgactgtttcagcagaggcagagccagtgttcaccttgtcacaggcttagttttcttgatatctaattgttatttggtggtaagtagtgattggagcagggatgggaaggaggttaaaaaattcaaccagctaaaacatacataagatctccctcaaagaatatttcagtgagtaagggtgaggcctatgaaatatgaagtgcccttgtaatttttttttaagacttcaaacgtttttcctcaacactataccttctatgtgttcatgtaaactgctcctttaagcttttgagatatagaagtgtatgtgtgtctctaaaaaatggaagaagtgttccatttagttcttattaataaatggataaggattatgggattttggactcagatggaatgttggagagatcatttagtttaacacagtggatgagtttttctggacttctaggcttaataatcccaaaattatattgccatgacataaatatagtattatacttaccacaagaatttaagtataatataatcatgttaacaaaaacatctcagtgcatttattatttttgtcaaacaatatgttagtaaaatatttttcaaagaattgaactctgttttttaaatttagttcattatttagacataacctaaaagatgttgacaatacattccttttttttttttagattgaagcgttttttaaattgtggtaaaaaattccacaatattaaatttactatcttaacttttcttttttttttttaaattgaaacagggtctcactctgttgcccaggctagagtgtagtggtacgaacatggctcactgcagccttgacctcctggggtcaagtgatcctccttccaccacagcctcctgagtagctgggactgcaggcacatgcccccaggcctggcgaattttttaattttttgtacaaatggggtctctccatgttgccaaggctgatcttgaactcctggtctcaagcgatcctcctgccttggcctccaaaactgctgggattacaggcatgagccactgtgcctgcccattttaaccatttacaatgtatatttcactagtgttaagtatattcatattgttgtgcagcagatctctagacctttttcaatacgcaaaacagaaactatatccactaaacaccgattccctctctcctccctgccagcccttaggaactccctttctactttctgtttgtatgattttaactactttatatacttcatttgagtggaataatacaatatttgtcctttgagactggcttgctttgctttgcgtaatatctttgtggattatatggtagttctatttttaatctttttgagggaactccatacagtttttcataatgactgcaccattttacattcccaccaacagtgcacaaagattccaatttctccccatcctcactaatacttgttattttctgttcttttgatagtgaccatcttaatgagtgtgaagtgatatcttattgtggttttgatttgcatttctcttatgattagtgatgctgagtatcttttcctgtgcttgttggtcatttgtgtatcttttttggagaaatgtctattcaagtcttttgtacatttttaaatcaggtgttttttttgttgttgttgtaaaaacacaagtttcttagatattctggatattaaccccttatcagatatatgatttgtgaattctcccattccataggttatcttttcatcttttggttgttccctttgaatgcacagaagttataaataatttactaagctttaagtattgaaatttgaatcgaggttaaaaattttcttgattacttcaaacatattatttcaataaaaccacaaaaggtattgattcagtatgaatcactgattatgaacacacacacacacacacacacacacacacacacacaagcaaacataaaccttttattcctgaacagttataagaaaagattatactacttcagttgttatcctagagatttttctttcaactatttaagaagtttgagattagactgttttaaacttctgataccattctacaaaaatgtgattaaagaaaatgaaagtaactttttactgtgcagcgtcagaataatgaacatggtgtattctttctcttttaatcatttcatttaatgcttcattcacaaagattcttaaagaagcaaccacagtgaggacgtgctttggcaggcaaggagaggacttgcactctgtctcccactccactgtctaactttgaactattaatgtaaatcccagaaacctgaactgttaccatttccttgcccaataggggtaaccagacctattctcactaacttggtgaatgtccgaaaaatacataggtcagtctgatatttttgggacttcctaaattttctttgcttttgcaagacactcagatctatacagcctaatttgtttttacgaacactagcagagtacttcaggttggagtttttgcctaaagaatataacaaatggggagtaagttggagaaaccagagggagcctggtgcttctggcacaggtaacacagttaactgaagtcttttggcttcactaacaatggccacctgaagcttggccaaccctctgtatatgccctttctctaatcagaaaggtcatatgccacggaagatttttctcagtttttaaaaatcccctggctggttatcctgattccttaaaacagttttttgaaagtaacaaaagtagaatgtttgatgcattttatgagtccatggtaaagttagatacatgtgcatatgaacacgtgttcttaagactcctgtgtagtcaagagagctgagtgttcagaactcaaagttggcctaataaaagacaccagactatagtacttgctttgtttgttccgtttgactgaaccaaatgtcttcaagtttcgttttcaatttttatcgtaaaaaccgtgaaaagcaaggtgtttgcttactgctgggatttgattccatcttaaagacctggagcagaagtttatatggatttcagaaagcagctgttttatgtgcatacatagtacaaggtagaaaaatgtaatgtaacccagtaagattaaataacagcataacaaaaacttaaaaaattcaaagttgaatatgtagtacacctctcacagtggaagtcctggcttttaagaaattgctgcaagcatttaacatgagaaatctgtgaatgttcattcctagcagaaaaaagatcggatatgattgtaggtttctgtgttgttgctcatattgagccagctattcatgtattcagattcatgggagaatttctagcatgagttctgtctggtatatcactctgtgttatggtttctctatctacctttacaatgcacatcctgttgattctacttattatggcagaataaggaaatatatgtgcattacgatagtgctattgatatgcacttgatactctggctaagataaacataaatcaggtaaagccaagtgtattttagcctttaaactgggatatgcattccccacctgctcagactgaaaactgtcttgtaggattaagaggatggggagggtgcatggaaaattattttttaaaggaagaggaataatatgtagagttaggaacattatagactgttaaaggaccaatgtttcaatgcaaatgacctccaagttatataaaagccctgtgtatgatatgtttattgttattagtttttagcctttgcagtcttcggagactttgctggcctggatttcgagtttagtagagtacattcagctgcattgtgcatttcagctctatggaaccgttgtgcttcgtccctgtttacctcatcctgtgggcaagcatctgcttttgcgtcttacttcttagaactgcagctggatttctggaattctgtggctgtgtggtattttctcctgcatattaataagattaaattgaccaaaaggtttcttttttccttcaaaaattttcctaatatttttagagtatgaagattatatagctttattgtaaaaatattcaagcagtattgaaaaatacaaagatcaataataacaacagtcccagagataaccactagtagtataacatattggtgatcatccttacagatgactctcataaagatcaatactaacaacaacaatcctagagataaccatgggtaatataacatattggtggtcatctttacagatgattctcaatgcatatatattcacatataaatatatataagtaaatatatacatactcttacaaaatgaaaaaatacaatacaaacttttgtaaccttttccatactaatcactatagatctacatcattattttaatggatgcattatatatattgtatatagaatactatctggcactcagtaggccctcaaccaatggttgaatgaatgagcaataatttatttaaccaatcttctattagtggacataatttattttctgtttttcactattataaatcacatggcaattaatatgtttttgcatcttctttgttcacatgtacaattatctgtttaaggaaaccttaaaagttgggtcaaaaggtggaaacatttaacaatttgatagtgataaacttgctgagttggctgagtttatgctcaagtcatacaaatttacattatcatcagcaatacacaaaggtgtttgtttccgcacattcccctgcatgcctacattgctgtcagtcttttagagtttgccatcctgatagaaaaattgctgtactggttttccttgcattatttacattacaagcaaggctgagcatctctttgtatatttattggccattaggtatttcttttacgcattgtctgttctttgtccagtggttttgtcttgaaacaccagagacctattttatcttaatgaagtcatttacttttataattctatcatatgcccccaaacagggaaagatgcatcttttaggtgggtatactgataagtgaacttgtgtggacccgtagttctcatttgtcagaggtagcaacgtagggaatttgaatatttttacctctaggtcggtgtctttttttttttgtttggagatgaagtctcactctgtcacccaggcaggagtgcagtggtacgatctcagctcactgcaacctccacctcccaggtccaagcgattctcctgcctcagcctcccgagtagctgggataacaggcatgcgccaccacacctggctaattttttttttttttttttttgtatttttagtagagacagaatttcaccatgttggcaaggctggtctcgaaatcctgacctcaggtaatctgcctgcctcaacctccctaagtgctgggattacaggcatgagccaccgtgcccagacccagtgtctttttgtgtgaggaccactactaaagttttaagagatttcttaaaaaggcaatcgtcattctgaggcaaagattaccaacatctggattccaaaaagtggggaaaaatcagttattcatatatattaaaatgacacacttcatttccaactaccaagtacaatgttcacctttattctgtttgttttcgctttgtcgtgctactgaaatatgtgtgcatgtgtatttaaccaaagagaaactcactcctaaccccatatttagtggtgggaccatcccttatttagtgaggctgttttttttccccccagacccgagttgttgttgcccatgctgctgaattcccaatatgaataaatcataatcatatgattatactaaatcagaggtttcagtacccttccacaaagtgacaataaaatgctcattaaaaaaaagagtaggttgtgttcaatggtgttaatttaaaattttaatgctcaggccaaaatgccagaaagtgaacctcagtttcttggtaataataaggtgaactggcttccagcagagagattttgtggcttctgtatcctgccgctgcacttctcccttctccagcctcctttctatttggtggtgcagaatcaccttggtcagccctttgaccttgcctggaaaaaagtcctcatcagtgagtgagtgtgaggttagagtgataaagattctaaaggaatgccttgttttgattcaaatagttggattagtcacagagttacttaatccacacacatagtagaatcctccagcaagcttctttgttttcatcagagcttttgagagattattatattatatctctatcttttaaagatagagtagaaatccatctatgaagaatagttttaggtgcattcctgcctgaacacacatttggacagtcttataattatgtatcttcccgagatgcattttgagccatttctacccagaacttaaaaaaatatttcctatgagtgctggaggttcttgcttctcttaacccactaactttttgaagccataagaatatcttattaaggattatgcaaaataacgtcctacaaatcctgatattattacactgcccaaaaaacttcaaagcatcaggaaagtgttgtgtttttttttttttttttttttttttaactaaaccagattcagctggctaccccacttggctacagagtactaaagaagagactgaacttgatcctgctgcccttgcatacacaacactcccattgacgctagtgaagacttaagcgcatgaaaggattccaggatcaaaaggttagctctatggggagctgtgtctggctcaagcaatccatttttttctattgacagtgaaaacgttttatagttctttttcaaagttttcccaaacttttacaataacaggcaacttgtgaaaaagtgagaaggcatctaattgaactatatccagaggagatcatggcagagaccaacaggaagaaaaacatttccaaaccacagcgatattggtcaaatcaattgtatttgaagaataaagcatttgaggcgtcggctgagaaaaattttcattatgaaacttggttggactatgaagcagaatgtgagataaaataaaacacagagctcatgagtttttatctttgtctgctaatgacttatgctagcaggattatactttttttttgcattttatgagatgtatgaactaggaagaaaatacatgctatatctaaatggattagacgtgcagattcttaactaacatttaattcattgctagtaaaacaaatgccttaaaacatttaaaaaagtgaaattatcttaaggagataattaacaagcagagtagaatagcatttttgaagaaagtgtaatatggttctacactggcattttctgcatttattgaagatacttagtctatccaacaattcactcattcattctttcatgaaaccctgtctctactaaaaatacaaaaaaaaattagctgggcacgggggtaggcccttgtagtcccagctactcgggaggctgaggcaggagaatggcgtgaacccgggaggcagagcttgtagtgaaccaagatcgcgtcactgcactccagcctaggtgacagagcgagactccgtctcaaaacaacaacaacaacaacaacaacaacaacaacaacaacaacaacaaatttctttgtgcacttactatatgcccaatgctaatctaatagttttacaagacctcaattgaacaagtgtctgaggaaatggattgcatctaataaagcaagacacaccaactgtggatgggtggtgtgtctagagtattttgcattcctaaatcactcttctggagaaaatttgtatcaataattttgtctagcttcacctggagttacacattttgattggtaagtggcttctgtgatttgcctcttagaaatacattataatgttatcctaatatatgtactaggacagacaatgctacgttgaactaacttgaatagcatattttataatcataaaactgatataatattatagttttgatcttaatcctcctctattgtatgagcaatggaaagtcttggtgaggagcttgtctaaacatttctcttgcattttcacataattgggcttgacagtttcctgccattgtataggataacttcagttgatggtgatcatgtttttgcttaagggtcattgaattgtattagaaattttataccatattcttgtaatcctataagtcatttttgagttacattattgaaagtgaacaataatgtaccacaaaacaaaagttactcatgcagttaaagcttttttttgtacctaggtttagaaactacaagtccacagagaatagggctcgtgaaataaatgaaaatacacgctcatctccacccactccttgttgttggggcctggtcagatctggtgaaaacattaagccatttgccttaagtggtattggcaagttaatttattcaccttctggaaggtaccaggctagtgcttgcagaggcaagattttttttgggtgaagggagcaaacttttccacttaacatgtgcccatggaaatcaggtacttcttttttcagctaccttagcttctgttgggaatttgagggtgttttatgggttatgttcttatacggtggttaagtaggcttgctgaaatggatctagaaaagacccaggtcagtcactggttgaaaaagggttgacagaaaattaaggagatatgactgagagcagtttctctttcaggtccccaaatttctcctctagccaattcacattaaggtctgaaatttcccccattggtgtcattccggccattgtttccagaagggactttcaaaaatgcaaatatgttcctgtggagcatttgcacatttggtgagtttgtcagcctaaatgagcagttatctttggaactaagaaagaagggtcttaacagagaaccaggttggaggaagaaagatcctgagaacattcatgggaggtaggccaggggaagacatacagcatgaaactttggcagtttagaaacaagggggataactcttgttaagagagcttaagggtcacagaagacaaatataggtcatttcacagcctaatttggagtttgatcttcacagtagctctttatgggagatcagaaggccttagctcaggtatggggaaaagacttcctgtgaagtctttattctgcttgatcaaggctgcttgagggtgccaaggggttcaagagaagttctgaggccaagttcaaactcaagggaaataattctctcatttcatgatttgtgccatggatccatgaaggagtggtcatcacgacctcagactctgctgcatttttggagggtttagtaagtcggcaatggcagtgacagctcagtccagttctcacagtgtgagaagaacttgggacatccagctaatggatctacaagagttccaggtggccctgaagaacttcagcacttctccttgcatatttgtattaacctggaaaattgcttcttgaagagaaaaggaagtgatatttttagaacaggatcagtatttccagcacatttattaatgggctagctcctcagtgtttacatggcaacaggataaactattattagtactgctcacatcatgaggtatcaggatgttttttggcgtggtagaccatctattcagatgaggaagtagagtgcatccatttatgaatttattgttgacatttcaactgtaattctttctcagtttcttccctaatgtcaggatacaaattttcatatccttgagagaggattttttgggaggggcaataaagacaaattttaaaattgaaaataaataaactggcaatcccataaagctcttgatcatatttagaccagtgagtgtttcctgaatgtttttgatgtttctgatcctgtgctgagcactgtgggggatgcaaatgaaagaaataatacatggtttctaccctcaaggaacttataatttattaagacacataaggcacttgaaccagttaaataatgagaaaagacagtatatgacacataaatgctttagaagtttagaaaaaggaaggaacagcagggttatttaaagagctaaaattcctgtagcttgcttctcttactttattggtggatgactccaaaactctgtaagaaggggaatagggagaatggaaggagtcttacccatctcttacttccttatgcaatgttgttcatgtacagtcagtgtctacggaaacttgaggactgatgggaaaattattttcagaaatggaggtgaatgaaaacagtcatggtggaatattttccaaccataactcttgccttctgttcatccatccgctcagagagccaagtgtacgtatgtagtcttctagctactaaattccattcctagatagtcataggtcttccaaggcccaaaggcttaccttgatttctgtttttttggataagtcccagtcaaatggctgccacagaagacagaaagtcatatatagattctccctttcctcctcattgcttcttcccttctctcacccccatgccccattccttatctttttactgatttctctctccgccctcctcctagtcatacatctacttttttctagtattcctagtttttttttttttcctcacagttgttcatggctctttgcacaccactgtctaagtctgaagaagtaaaaagagaatgaaataagtgttgccaagcaagacccttctcttctttccatgtttggaaaacaacctcttggaatacagctcttgaaatgtattgaattatctttgtgttttgtacacagcccagtgtacaaaactgggattgagggattgaattatctttgtgttttgtacacagcccggagtgctcaagacattccaaaaaggttaaatgacagcagtagcagtcacccctcttatgcaagacattctgggcttcatccaagataggtggagcattgctgtatcactctcatgcattcatttgctcatttattctctaaataaagagataagcagaggccagattccgttaggccttccagaccataatgaagaatttggttttgattctaagaactgtgggaggccaggggactgacatggtctgatttgtgtttttaaaagctatctctggctgcagtatgagaatggttgatagaggtcaaggtcaggagcaggagatcagttagagaagctattgcagaattccaggctacagataatggtggcttagactaggatggttgaagtggaaatgaagagaagtggaccaattcttgccaaaacatatatctgtaagccgaaccctatttcttatattagtgttgccttcatttaaggctgggggctggctccagcattttgatgcttgggttagtgtgctagaagctggcctggaagcctagaagtctggccccattggaccaccttactgggtcagatgtaatcctggcccactagccactcatgcctcttgcagggtcatgaagctgcttaaaatgtttgttcggtaacttaattactgtttcacctacattccattggcttaaattcttttcttttcttttttttttttaaataaaagagatgctggaagcgatggtttaatacattttaaaattcttttcccacctatttcctactctgtttgcattgtcatttgggatatttcatgcaagcaatctgttgaaatgagaattttaatgttgcgggcataatgttgctagtattgctttgaaaacaccacatcagctgtcaccaacactggacacggcagagtttatttcacagatatttgctaagggctgggtgtgcggaaaaaaaaaaaaaaggtatggcctctgcttccaaggagcttgagaggaagggaaagtaatacaaattcttgaacatcttttaactgctagccttttacatccacgactcattcagctgttgcaatacctctgaggtgagtgttactcttatccttgtcttaggatgaggaaaggggcccagccatctgtctcaaatcatactgctgtcgtgtacaagccgtgagctaagcccaaagtccatggccttcccaccttatgctgtaggtacacttcaaaagctgtcatgtcttctgtttgaataccacccctgccccttcacagccgcaagatcttgggaaaaatgtcttcatctctgtgagcctcagtttccttatctttaaaatatagataatagtatttacctcaaaagggtatgcatgaagcatatatgaaagttcttggcacatagtagccaggaactaaatattgttagtttccttttttggtgaaccagtgtatggcaagagaatttgtgatgtgattttggtgtagagtcttaagcaagcatggcaagtattttttgtttgttttcaacttcacagatgttagaaaagcttgtgttgtacatttatgtttagacattaggagagagattctttcttgggttgcaagattgtaggatttgtttgcagagtatctgtatctggacagagaggcattctcaagctcctggcccatcctacccaattcaggtagcaacaggaggggaaagaggcagttgtttgtataaggcatgtaaatgaaggctgaaaatcctgtagggtcaattcgtgtgtcctttggagctgaaattaatggatattttcctttgaaggatcgactctccaggctatatccaatacaatacagggacctcacactgtctttttgtgagggatcatatttattttttcaggccttgatgaaaaccaatttgcctttcctgaaactagacatttaagctttgatgagctgacaaaggggggatgggcagacaacaataaccttgcagtctattttaggctcttaaaaataatatatgggacaatagtattgctagcttctccacaaagtgcccctttataagcatgtgtacaagataggaaactaccaacatgaggggaaaaaaggccaaaaggctgatcttaattattgaactgtgctgtattggtttcttttagagtggattgtggaggtcacatttgtaggagattctcagttggtttactgtagtttgttaaaattattgagacataggtgatttcaactctttttttttttttttttttgagacagagttacactctttcacccaggctggagtgaagtggcgtgatttcagctcactgcaacctctgtcccctgggttcaagcaattctactgcctcagcctcccaagtagctaggattataggtgcctgccaccatacctggctaatttttgtattgttggtagagacgggttttcgctatgttggccaggctggtcttgaactcctaacctcaggtgatccacccgcctcggcctcccaaagtgctaggattacaggtgtgagccaccgcgtctggccaattttaaccctttaacatttacttttactctttaagaacgacatttactctttaagaagaacttttcttcccttacacagtgtctgctttgaaccgagtctttgatatacagagaccctattagacccatcaaatgtcctctcagcccttggattatttctcttccaactctgttttcctataatatgatctactacataccagcagccagtctcgggcaatataacgaaggctagcagtatgttcacatggtcatgtgtatttctaaattttgcaaaaccaagatgtgttaagtgctgtcactgaagatcactttctttttccattctgacttcctcaccgtcatcattcgcctcctgtcagatagtatctgagtgatgggcacgttttggatctggctagaggaagttgaattggggatacatgtattttagtgtgatattttaatgtagtttgcagtccctttcatagtcatctgggtgaggaatggcttgtaggaatattcttaccacccattggacagctcaccagcatggatggagagcaaaggtgaaggccataggtcctaaggctaggagccagtcctatggcactcatcctagaaatatggggtagtggagaaaaatgaggctggaaacaaggtttgagaagctcaaatgtaggaaattcttacctctgtagacataaaattgtgagcagaagaattgatgccagccaaatatattctctcctgtttggaatatatgcagtgatactgagtatacaattataaactcactatgtgtgtgtatttgtgtgtgtatatacatacttttaattttcttttttgttgagaatagtgtggaattgattttgtcagaatccctatgtttgtagggcacgagcctgaaggcatggagcaagaatgtctgtgtgagaagacacatgatttctgcctcctattctggatctcatatatgtatcttattgcatctgttgcatcttgtcctgagacagcctgatggttccagaggaaagtgtgcaaaattgccactaaagcaagagacatgctctgagaaacaagcattccatgacaaactgtcacacattttcatcaataagtcacggtatatagtataagaggaattcaatgaatttctcttatgtagcttagtgcagtgtaggaacgtttgaattgttctcgtatatgccttaatttcaggttaattgtgtatttttttttcagaattactgttcatatcaaaattcagatatgatttgggtaatgggttcattagaagcccaaaccccagcatcacacaatatacccaagtaacaaacctgtacatgtacctcctgaatctataaaaaaacaaaaatagctgggcacggtggctcacagctgtaatctcagcactttgggtagccgaagcaggtggataacctgaggtcaggagtttgagaccagcctggtcaacatggtgaaacgctgtctctactaaaaatacaaaaattagctgggtgtggtggtgggcgcctgtaataccagctacttgggaggctgaggtaggagatttgcttgaacttgggaggcggaggttgcagtgagccaagattgcgccactgcactccagcctgggagacagagtgagaccctgtctcagaaaaaaaaaaaaaaaaagataaaaagaaaacaaaacagatatgacaggaaggacatattcctgttgaaagccatagtgtaacaatcactacaaagagaataaaatacctaggaatccaacttacaaggtatgtgaaggacctcgtcaaggagaactacaaaccactgctcaacgaaataaaagaggacacaaacaaatggaagaacattccatgctcatgggtaggaagaatcaatatcatgaaaatggccatactgcccaaagtaatttatagattcaatgccatccccatcaagctaccaatgactttcttcacagaattggaaaaactactttaaagttcatatggaaccaaaaaagagcccgcatagccaagacaatcctaagcaaaaagaacaaagctggaggcatcatgctacctgacttcaaactatactgcaaggctacagtaaccaaaacagcatggtactggtaccaaaacagagtatagaccaatggaacagaacagaggcctcagaaataacaccacacatctacaaccatctgatctttgataaacctgacaaaaacaagaaatggggaaaggattccctatttaataaatggtgctgggaaaactggctagccatatgtagaaagctgaaactggatcccttccttacaccttatatgaaaattaactcaagatggattaaagacttaaatgtaagacctaaaatcataaaaaccctagaagaaaacctaggcaataccattcaggacataggcatgggcaaagacttcatgactaaaacaccaaaagcaatggcaacaaaagccaaaatagacaaatgggatctaattaaactaaagagcttctgcacagcaaaagaaactaccatcagagtgaacaggcaacttacagattgggggaaaatttttgcaatctacccatctgacaaagggctaatatccagaatctacaaagaatttaaacaaatttacaagaaaaaaacaaacaaccccatcaaaaagtgggcaaaggttatgaacagacacttctcaaaagaagacatttatgcggccaacagacatatgaaaaaatgctcatcatcactggtcatcagagaaatgcaaatcaaaaccacaatgagataccatctcatgccaattacaatggcgatcattaaaaagtcaggaaacaacagatgctggagaggttgtggagaaataggaacgtttttacactgttggtgggggtgtaaactagttcaaccattatggatgacagtgtggcatttcctcaaggatctagaactagaaataccatttgacccagcaatcccattactgggtatatacccaaaggattataaatcatgctgctataaagacacatgcacacgtttgtttaatgtggcactattcacaatagcaaagacttggaaccaacccaaatgtccatcaatgatagactggatttaagaaaatgtggcacgtatacaccatggaatactatgcagccgtaaaaaggatgagttcatgtccttatagggacatggatgaagctggaaaccatcattctcagcaaactatcaccaaagacagaaaaccaaacactgcatgttctcactcataggtgggaactgacaatgagaacacttggacacagggtggggaacaacacacattggggcctgttagggggtggggggctgggggagagatagcattaggagaaatacctaatgtcaatgatgagttgatgggtgtggcaaaccaccatggcacatgtatacctatgtaacaaacctgcacattgtgcacatgtatcctagaacttaaagtataataataaaaaaagaaaaaagaaagaaagagatagaggaaacaaaaaggatgccataagtataagttgaaagaaaatatttgtggtatttgccagctttaaaaaagtttgtaagttgtgtgatttctgtactcattctcaataaatgttcattatttgtatctaattttatgtattttttcttaaagagggacacaaaatttgcatatgctttaggtttcataaagcctggacttgccctgtttcataccaatgttgtggacatattcatagcagtctgacagtacctgtgagatgaggaagcaacatgctgtagtggaagaagcagccttgattctaccactaggagctgtgtaacttcagcttgtttcttagcctctgtgaattttggtgtcctcagctgtcaagtttggatgttgatccatcacagaattgttgagacttaaaggaaccctcagtgtacttcttggcatgtgataaacactcaataaatataatttccttttttcacttgagctctctctgatggtttacagatttatcttaggtcagggacccaggtgaggaaatgcgttgtcctttcaaaatgaattttgatctgagggtagtaggtagagagttggggtttcccctgggattcttgtctttaataaacccgagacaaaatgaatcacaatggtgttttctctagatgtaaaacaaagtatgcagtgccttcatcagctgtgtagagtattgggctgaaagtattccaatttagtgtgtctgccactacacacacacacacacacacactcatttggtatgacccaaggattacattattctgaatcactgcagttttttgacatagcttcattcttcaatcaaaaatattgatgaacaaagccctgggccaggtgctggattcccttgaaatgtaggagtctgggaactaggatttggcattcacgggtgtcctaatgagcctggagcagcacattctttccaatatgtgtgctttggctatatgtaccagcgatagcctctatgaggtggggatgggacgggaaccccaggttagctaaatactgacttgctgtcagggtatgatttagtcatcatagcagactgggttaatacctatgatactggactatgaactcttttctttaaggacaagacacaagactacttttttcagtgcccgccatggctagtacatagtaggtgtttgtagcatttattgaattgatttacagtctacattcagtaggagtaaaaaaagccttttaaagtgcccaaaggattttcctttttgaaacaaaattgcagctttttgctgggcgcggtggctcacagctgtaatcccagcagtttgggaggccaaggcggatggatcacctgaagtcaagagttcgagaccagcctggccaacatggtgaaaccccgtctctactaaaaatacaaaaattagccacacgtggtggcaggcacctgtaatcccagctacttgggaggctgaggcaggagaattgcttgaacccaggaggcagaagttgcagtgagccgagattgcgccactgtactccagcctgggtgacagagtgagacatcatctcaaaaaaaaaaaaagaaaaaaaaaaaagagaaagaaaaaagaaaaagaaaattgcagcttttgatgaatagcctgataattatgtcccttagcctgctgttgtggaggaataggagtcattttgaaatggggaatcagaagcagtctgtttcacactttgctcacaagtgattcctctgagtgaaagaagtcaaaccaaagcaagtccagggaagtctgagaagttagcatacttgcaaagacaaaacagccacaagtcaactgacagctgagtgagtgcctgtctggacgttatcctgcaggcagttaggaagaaacattgtttgaagacgcctgtcaccagcacacatgactgatttctcatcagaagagggattgtgagtgaaataagaaaaagtctgtgtaatatgtgtcatgatgagttatacatttacctattaactgtatacaaaacctttatgcatatagattatccatattttatttgggggccatctggttaatttgcctgctttctaaactattgagtcaaataagctcactcaggtattgtcagaatgaacccacctaatctggttaacattttggtgtctgggcaaggtctacccaggatcaaatctgttgacgcccttctctccaaccccagccctgtccctacctacacacacgctttgtttaaaaatactcattggtgcttactctgtgtcaggtgtcaggtagtgtgctagcactgaggatgcatagtcctttccctcttttttttttttctttgggacagtgtcttactctgtcacccaagctggagtgcagtggtgtgatcgtggctcactgcagccttatccttgacctcctgggctcagctgatcttcccacctcagtacctcctgagtaactgggactacagctgtgcactaccaccgggctaatttttcagttttatgtttttgtagacatggggtcttactatgttgcctaggctgatcttgaactcctggactcaagcaatcctcctccctcagcctcccaaactgctgggattacagttgtgagccactgtacccggcctcatcatatccctcttgaagcttgcagtgtaggacaggtgaacccagcagccacatctcttatttgggtattgcgggagacctggcatagtcagcatccagcagtgtttccagagtggctggccttgctgcttctcctcacttgctcctcaagggcaagatgatatgcaggttaccactgaagcaaatgtcccatccattgtcttctggtccgcttaaaccttgatctagtaattaattatatgaaagaacagaaaaagtttcagagaatgataatctgttttaaaattttcttattcatttttaatagttgtgtttttggggtacatatgatttttgatatgtgtatacaatgtgtaatgatcaaatcagggtaattggggtatctgtcacctcaaacatttattttttctttgtgttgggaacattgcaattcttctcttctagttattttgaaatatacaataaattatcattaactataatttccctactgtagtatcaaatactagaacttattccttataatgataatctctttaatagtcatatttaaatgccaatttacaaatggagtaaaatatttaacagaattgaattgataattttgaggcctttgttaataactactcttaattgcagcaattttgttttggacagagattatgggaataaattttaattctggttggaaaatagtactgaaacagcacttgtcttattctttcaaatttttagtacttgggtatttggagtcattgagatttactctttgtatatgcaggaacattagttgtttcagactggacaatggctggttataagtagttgaataaaatccctgcagttcatccattcttctcctaccagcaggtgtcattatggaaatatgaaaatagtgtaaattccagagttgtaggaactagctgtgagaaagaaaagtaacactttggatattaaaaaacaacaaaaaatgaaaaaatcatttggcactaagcaaggatggcatgtttaattactgatttggcagtgttctacagtatgatgtaataggattttaaagcacataatttattttaattagattaagtaaatatttataagaaccattctaggctcataggagtcacaaaagaaaagtaagatgtgattcttatcctcgaggagccgacatgatatctgaggatacattaatgaaataattagttcatagaatgaatcaatctttcttttttacatgctggattgaagaacatagacagtaaaagttgcaaaagctggagggactgagtagtgtttttgattgtgggttaatcaaagaaaaagttttaaaaattcaagtagggaggaacttcaaaataatttggtaacttgatagctcattccttcctttcttgctaactgcctatctctcgctataatctaaagtaataattataataattacatattacatatgtatccaaggatgtaacaattggatttaacagtttactataatcggccgggcgcggtggctcatgcctataatcccagcactttgggaggccgaggcgggcagatcacgaggtgaagagatggagaccatcctggccaacatggtgaaaccccatctctactaaaaatacaaaaattagctgggggtggtgatgcgtgcctgcagtcccagctactcgggaggctgaggcaggagaatcgcttgaacccgggaggcggaggttgcagtgagccgagatcgcgccactgcactccagcctgggagacagagtgagactccatctcaaaacaaaagaaaatgaaaaaacaaaacaaaaaaatggttttctataatcaagcgactaatatgatcaaatctttctaaaaactaaggtaaacattataagtgagcatttgtattaggagacttttccaggaacctggatcaggttctaagtgtgctcggtcagggtcagtgcttcattcaccctgttttcccctctagactgtgaggttttctaaggcatgggatatgtggcattcctctttgcattcctggcactcttaattctgcctctggatctgtagtgagctcttagtacatgtttgttgaatgacagtatcaccaaaggatagggtatttacagtcctttgtacattatattgttagaatgaatgcatattgatactagactaggcaacctcaggttgaatatttcagaaaactggattgagaaacctggcttgaaaagttgatagcataggcagccgcccccttctgcgctgtcacgccgagccagcgcctgggcctggaaccgggccgcagccccccggcttcgcccaccatctccctaccatggacccccgcaaagtgaacgagcttcgggcctttgtgaaaatgtgtaagaaggatccaagcattctgcacacccaggaaatgcgcttcctgagggagtgggtggagagcatgggaggtactgctactcagaaagctaaatcagaagaaaataccaaggaagaaaaacctgatagtaaggtggaggaagacttaaaggcagacgaaccatcaagtgaggaaagtgatctagaaattgataaagaaggtgtgattgaaccagacactgatgctcctcaagaaatgggagatgaaaatgcggagataacagaggaggtgatggatcaggcaaatgataaaaaagtggctgctattgaagccctaaatgatggtgaactccagaaagccattgacttattcacagatgccatcaagctgaatcctcgcttggccattttgtatgccaagagggccagtgtcttcgtcaaattacagaagccaaatgcagccatccgagactgtgacagagccattgaaataaatcctgattcagctcagccttacaagaggcgggggaaagcacacagacttctaggccactgggaagaagcagcccatgatcttgcccttgcctgtaaattcgattatgatgaagatgctagtgcaatgctgaaagaagttcaacctagggcacagaaaattgcagaacatcagagaaagtatgagcgaaaacgtgaagagtgagagatcaaagaaagaatagaacgagttaagaaggctcgaaaagagcatgagagagcccagagggaggaagaagccagatgacagtcaggagctcagtatggctcttttccaggtggctttcctgggggaatgcctggtaattttcctggaggaatggctggaatgggagggggcatacctggaatggccggaatgcctggactcaatgaaattcttagtgatccagaggttcttgcagccatgcaggatccagaagttatggtggccttccaggatgtggctcagaacccagcaaatatgtcaaagtaccagagcaacccaaaggttatgaatctcatcagtaaattgtcagccaaatttggaggtcaagcataacgcccttctgataaataaagcccttgctgaaggaaaagcaacctagatcacattatggatgtcgcaataatacaaaccaatgtacctctgaccttctcatcaagagagctggggtgctttgaagataatccctacccctctcccccaaatgcagctgaagcattttacagtggtttgccattagggtattcattcagataatgttttcctactaggaattacaaactttaaacactttttaaatcttcaaaatatttaaaacaaatttaaagggtctgttaattcttatatttttctttactaatcattttggatttttttctttgaattattgggcagggaagatacttatgtgtggaagattattgctctaatttgagtgaaataaaagttattagtgcgaggcaaacataactcatttgaggataaaaaaaaaagaaaagttgatagcatagattctgaagttttctcttttgattccacttctccatccgaggacatatatttcaaaaagtatttcagtaagcgatgtgattacaggacattgtccatgagatatagaggacattgtacttcatctaaataaaactgggcctaattttaggcagaaggatgtacgtagtgttattttattaccttttcaacaactttcttagtaatcagtcattttcaatgaagacagtttgttcaccaccatatttgaagactattattaatttaccagctgctatatggtaaggggtctgtcctcagcctacctttggtagtttgaactagttatactttgttcatcattttctgacatctccagctgcttactagacttctctgttttgattttccattgtcacctcctatgtaacatgtcaaatagggaaatcatcgcttttacctataaaccacatcttcctttaaggccataccttttcttttaatgttaccatttattttccagttccccaggtgaaaaactttgatgtttccttgttctcaaccccttccccgatccaatcaatcaaaatagtatctatacttcctttgtgatgcctatgataaccattcttttcttcctttctgtttctattaccaagaccctggattagaccacgcatgaatgacatagcttcttgaatcatcctattagcgttttctcctcttttaccccctattagtgagtaggaacattttagttagaattactcaaatatcggtaccaagtccacacccttaatcagagttgctagggcccttcatgacttgctgatgatcactctaactcaactcttgtacccttaaaactgtttgctctggtcatatagaaaaatgcaattttccaatctagccatgttctctttgacttccagattatttgtattgtggtagaatacacataacataaaattgaccattttaaccattttgaagtgcacagttcagtggcactaagtatattcccattgttctgcaaccatcaccatcatccatctcgagaaatgtttcatcttcctaaacagaaactctgtacccattaaacactaattacctatttcccctcctcccagcttctggcagccactattctactttctatctctatgaatttaactactcaaagtacctcatataagtggaagtatacaatataggtccttttgtggctggcttgtttcactttgcataatgtcctcaaagttcatctatgttgtagcatgtgtcagaatttccttcctttttaaggctgaataatattccattatatgtctatgccacattttgtttattcattcatccactgagagacatttgggttgcagtttcttctctttaagtgtattctgctaattaaaaacaggttactcttcctgccacttctttcagtcatgttactttgctgctcagaagccttcaatgagttcctttttacagatagggtaagtcgcagcatgcacagcataacactcaaggctcttgcctctctgggccctgacctatgtataaaacctttctgttaattattagtcttcaacatttattcatgaaacatagtttttgagtgtctggtatgtgttgggccttggggtaagtgcagagtaaaccaaatagatattgtcccttaccctatggaactgactttggagttaagtgattccttcgctcaagccagaaggctctcctttttaccttggaagctggctacttcacccaacatgaatataccaaagaccatttggtaaatgaccagctcaccaaagctaattctgcaaaaatcacttgaccaaataatgattttgctgaaaaattgaggtttatattttttactttgtccctgtcatcactgctgttctcttcctgggcatgcattggccaactgctgtttaatatgaactttgcctgtttttcacattccagactctgagaatttttagaatggtcaacattttctacgggatggtcaagtgttttccatttgtttgtttattttttaaagcactgttttttgtcttaattacttttgcctctgtccctattgcttctgcttctgcaccttcctgtgccctggtgcaatggctatgagaaattgctctaaaccctgtgtaaaggatttgccagatgattgctcagtgaattgttcattcgttgagttagtcagtaagaagatgatcatttggcaaattagtttccaaacattttaaaatttcttctctcccttgtaggaaatcaaagggaagcattttctactatttttttcaggtctatcctctctgtttgaaccataatatctttttttgagatggagtcttgctttgttgcccagctggagtgcagtcacacgatctgggctcattacagcttctgcctcccaggtttaagcgattgcagcgcctcagcctcccaagaagctgggattacaggcatgtgccaccacacccaactagtttttgtatttttagtagaaatggggttttatcatgttggccaggctggtctggaactcctgacctcaagtgatccacctgccttggcctcccaaaatgctgggattacaggcatgagccactgtgcccagccaaaccataatctcttttaatagctctgttgatttgtttttgggagtagccttcttgtgagtaggcttcttgggagtagccttcttacatcttgtgctcagaatcagtagttgcttggttaatctaaagaagctggttaaggtgtagaatcataaaaacaatatagacacatcttttaaaataaaactccaatgtgcattctattaaccaatcctttaggatcaagacattttcttccaaaatgggtccactaattattcatatcatctctctttcataaaccatactcattatgaattacctatgatttccagtttcagtttctttagacaggagcaagatcttaaagacactgtgatacaatgagtaaagaatcctggtgtatttttactatttttccctgccattaacacttgtcatatacagtttaagagcagattatcttagcaacatatctgtattgattctttaaaaggattcaacctattttttaatgtaactatttttattgtcacattcatcagacaacatatttaagtaaatatgattataataacaaatacaagtggcacaacttttctatcaattgcctgttggtaagcgaaccatgcaattgctgggagtagaagcctacaggcttacaagggaggaggctgcgagccaggagcactgagcatgcctggtatcagccagtatgtttccctgaggacatagggagcactggttaaatgtatagtcatttagtgcaggttggctatacaggcttttactgtatttgttcatccttatagacaaagctgtgttattgcttactatcttgtaataaagtaggagttgaggtgagatctagcagaaattgatatggggaactgcacaaatccttcaggttcaaatgacaagaacagggaatatttacatttgatgtaaatttgcatcacttcatcagaggtccagaacctgtgggaatgggggtgcagagagtgaagaagcagttttagactgacatcgttggcaactttatcttggggcagacggaccatctctgccaggaactctactcctctgcctaaatgaccatgcggccccccttccaagggaagtctctaggtggacatcatgtgactgcccaccccttggactgcacccaccttccatgtaaggaagtgctagtggccttctatcagggtctcttccactgacttctgtatgtatatgtgtgtgggaaggaattgtgtgttgggggtaggaggtggggtcagggctctgtgcctctgcagtgcatccagaaattcctcaacatttttgacagtgtatatgccctctctagtttccagtactgataaaagcttttccctgtttttgtattccgcttgtcacttccctggaaatccacatagaagcgattggaagtctgtcctcttttattccaaatcttcctcttccccttcacctcaaactttgtattttaggctcttaaacgggtctgtacataactttttcctctgctataagcacataactaataaactatgggttagagtaaggtaattggcagttctgtttctcagtgttcataccattaaaatgatttttccaaatcagactcaaggcaatggaataataataatgagaagttattttgcactgtgctttatggttttaccatgatttagtgcttcatttaatgagacaaataaccagacaaggccgggggtggtggctcacgcctgtaatcccagcactttgggagatcaaggtgggaggattacttgaggtcaggagttcaagaccagccttggcaacatggtgaaaccccgtctctacaaaaaattaaaaaattagcagggcgtcgtggcgcatgcctgtacctgtagtccaagctacttgggaggctgaggtgggaggatcacttgagcctgggaggtcgaggctgcagtgagctatgatcgtgccactgtactccagcctgagcaacagagcaagatcctgtctcaaaaaaaaaaatttaaaaaaaataaaataaaataacaagactacttgagtggagtgtttttggaacaaaacattacctgagatgagagaggcattatcgtctgctttcagcaggacactctgcttggagccctggtctgggtactcttggattttctgctctcagcattgtctcatgtaggtacagttacatcaggtcattatcttgttggggctattactttaaaaaaatagatacagtttttgacaaaaaagaaagatagacaaataaaatgtcaaggacagccaagacagaccctagcttcaatcttgaggatggctttcagaaaatcacggctggatttccttgcctgtgatcttgtttttgaactgcctaaacctgcactgtcacaaatgggcacatttttgctcgaccaaagaaaagatgaatttggtggctttggaacaacattttcttcatttgctcaaccacagggagaataagggctatttgagaaatagcccttggacagcaggcatctttcttctaacagaagacgaaatggatcctccatctgtctcaccatacaacccttgctgtatgtgtcaacttgggttgaaatcttatagatgctgttgtcgatctctgaactcaaaaatctcttgtattactataaattaccctcattgacttccctaagtgttctcagatttctcttctaaaactgtccctccagggatctgcagggaagatgaagattttttgtttgtttgtttgtttgttttttgggtgggtaggggggacaccaaatgccatgaactcagtccctgctttgatttgggaagctggaccatatctgaggcaattctcctacagctgtggttcaattctcctcttcttttcattacctcccaggctaggagcctctgattgtgtgaaggtggggtaagtagcatgactctccataaagaaaagcccatgcttactcccaagatgaggcagtgagccttaataaaaaaggtgctggaagtaatcccccttaaagacagtctaacatgagaaatgctcaagagaatattgtgcacatattagacacccaatcagtatttgttgagtgagtacatgaatgcagcagtgggtggcagtcatgctaggccatttctggtgcagcctccatgtctgtttacctcttcagaccttaattcttcatctcctttcctctccttatcatggttccattgttgctctgctttttcttgctaactcaggggaaaagacaagggctagtttggggattacatttcaaggctgcactgaactgatggcaattgaaggacagagaatgggaactacaaaggatgcttctgaaccagattcctatataacttctctcaaatgcagacatagatgcctgcctctgccagtcttgatgctaggatagggctgatggtcataggttgccaaagagttttttttttttttttttggagacagagtctcacacagtggtgccgtctcagctcattgcaacctccaactcccaggttcaagtgattctcctgcctcagcctcctgagtagctgggactacaggcatgaaccactgcacctggctaatttttgtacttttagtggagacagagttttgccatgttggccaagctgatcttgaactcctggcctcaagtgatccacccagattggcctcccaaaatgctgggattacaggcatgagccaccattcccagccccaaagagctttcttagaagagcagctgctcagtgccccagctgggtttctaatactttataaactaaggtgtttaaagtgtgctcatgtcacatatccttgttctagcattgttaggatgaattgtgaacttttgactctgaaactgggaagtgctctcttttaacttctcagtttttaaaaacatggcttgtgtctgttcccattgtcatttctggccttcatatggccacaactacctgttaagtcagtggaaaacagactgtggcttttcttaggtgttttcttctttttttttttttggttagggttttttttttttttattatactttaagttttagggtacatgtgcacattgtgcaggttagttacatatgtatacatgtgccatgctggtgcgctgcacccactaactcgtcatctagcattaggtatatctcccaatgctacccctcccccctccccccaccccaccacagtccccagagtgtgatattccccttcctgtgtccatgtgatctcattgttcaattcccacctatgagtgagaatatgcggtgtttggtttttggttcttgcgatagtttactgacaatgatgatttccaatttcatccatgtccctacaaaggacatgaactcatcattttttatggctgcatagtattccatggtgtatatgtgccacattttcttaatccagtctatcattgttggacgtttgggttggttccaagtctttgctattgtgaataatgccgcaataaacatacgtgtgcatgtgtctttatagcagcatgatttatagtcctttgggtatatacccagtaatgggatggctgggtcaaatgatatttccagttctagatccctgaggaatcgccacactgacttccacaatggttgaactagtttacagtcccaccaacagtgtaaaagtgttcctatttctccacatcctctccagcacctgttgtttcctgactttttaatgattgccattctaactggtgtgagatggtatctcattgtggttttgatttgcatttctctgatggccagtgatgatgagcattttttcatgtgttttttggctgcataaatgtcttcttttgagaagtgtctgttcatgtcctttgcccactttttgatggggttgtttgtttttttcttgtaaatttgtttgagttcattgtagattctggatattagcccttcgtcagatgagtaggttgtgaaaattttctcccattttgtaggttgcctgttcactctgatggtagtttcttttgctgtgcagaagctctttagtttaattagatcccatttgtcaattttgtcttttattgccattgcttttggtgttttagacatgaagtccttgcccatgcctatgtcctgaatggtattgcctaggttttcttctagggtttttatggttttaggtctaatgtttaagtctttaatccatcttgaattgatttttgtataaggtgtaaggaagggatccagtttcagctttctacatatggctagccagttttcccagcaccatttattaaatagggaatcctttccccattgcttgtttttctcaggtttgtcaaagatcagatagttgtagatatgcggcattatttctgagggctctgttctgttccattggtctatatctctgttttggtaccagtaccatgctgttttggttactgtagccttgtagtatagtttgaagtcaggtagcgtgatgcctccagctttgttcttttggcttgggattgccttggcgatgcaggctcttttttggttccatatgaactttaaagtagtttttttccaattctgtgaagaaagtcattggtagcttgatggggatggcattgaatctataaaattaccttgggcagtatggccattttcacgatattgattcttcctacccatgagcatggaatgttcttccatttgtttgtatcctcttttatttccttgagcagtggtttgtagttctccttgaagaggtccttcacatcccttgtaagttggattcctaggtattttattctctttgaagcaattgtgaatgggagttcactcatgatttggctctctgtttgtctgttgttggtgtataagaatgcttgtgatttttgtacattgattttgtatcctgagactttgctgaagttgcttatcagcttaaggagattttgggctgagacaatggggttttctagacatacaatcatgtcgtctgcaaacagggacaatttgacttcctcttttcctaattgaataccctttatttccttctcctgcctaattgccctggccagaacttccaacactatgttgaataggagcggtgagagagggcatccctgtcttgtgccagttttcaaagggaatgcttccagtttttgcccatttagtatgatattggctgtgggtttgtcatagatagctcttattattttgaaatacgtcccatcaatacctaatttattgagagtttttagcatgaagggttgttgaattttgtcaaaggccttttctgcatctattgagataatcatgtggtttttgtctttggctctgtttatatgctggattacatttattgatttgcatatattgaaccagccttgcatcccagggatgaagcccacttgatcatggtggataagctttttgatgtgctgctggattcgttttgccagtattttattgaggatttttgcatcaatgttcatcaaggatattggtctaaaattctcttttttggttgtgtctctgcccggctttggtatcagaatgatgctggcctcataaaatgagttagggaggattccctctttttctattgattggaatagtttcagaaggaatggtaccagttcctccttgtacctctggtagcattcggctgtgaatccatctggtcctggactctttttggttggtaaactattgattattgccacaatttcagctcctgttattgatctattcagagattcaacttcttcctggtttagtcttgggagagtgtatgtgtcgaggaatttatccatttcttctagattttctagtttatttgcgtagaggtgtttgtagtattctctgatggtagtttgtatttctgtgggatcagtggtgatatcccctttatcattttttattgtgtctatttgattcttctctctttttttctttattagtcttgctagcggtctatcaattttgttgatcctttcaaaaaaccagctcctggattcattaattttttgaagggttttttgtgtctctatttccttcagttctgctctgattttagttatttcttgccttctgctagcttttgaatgtgtttgctcttgcttttctagttcttttaattgtgatgttagggtgtcaatttcggatctttcctgctttctcttgtgggcatttagtactataaatttccctctacacactgctttgaatgtgtcccagagattctgttatgttgtgtctttgttctcattggtttcaaagaacatctttatttctgccttcatttcgttatgtatccagtagtcattcaggagcaggttgttcagtttccatgtagttgagcggttttgagtgagattcttaattctgagttctagtttgattgcactgtggtctgagagatagtttgttataatctctgttcttttacatttgctgaggagtgctttacttccaagtatgtggtcaattttggaataggtgtggtgtggtgctgaaaaaaatgtatattctgttgatttggggtggagagttctgtagatgtctattaggtctgcttggtgcagagctgagttcaattcctgggtatccttgttgactttctgtctcgttgatctgtctaatgttgacagtggggtgttagagtctcccattattaatgtgtgggagtctaagtctctttgaaggtcactcaggacttgctttatgaatctgggtgctcctgtattgggtgcatatatatttaggatagttagctcttcttgttgaattgatcccttttacattatgtaatggccttctttgtctcttttgatctttgttggtttaaagtctattttatcagagactaggattgcaacccctgccttttttttgttttccatttgcttggtagatcttcctccatccttttattttgagcctatgtgtgtctctgcacatgagatgggtttcctgaatacagcacactgatgggtattgactctttatccaatttgccagtctgtgtcttttaattggagcatttagtccatttacatttaaagttaatatggttatgtgtgaatttgatcctgtcattatgatgttagctggtttttttgctcgttagttgatgcagtttcttcctcgtcttgatggtctttacattttggcatgattttgcagcggctggtaccagttgttcctttccatgtttagcgcttccttcaggaggtcttttagggcaggcctggtggtgacaaaatctctcagcatttgcttgtctgtaaagtattttatttctccttcacttatgaagcttagtttggctggatatgaaattctgggttgaaaattcttttctttaagaatgttgaatattggcccccactctcttctggcttgtagagtttctgcccagagatccgctgttagtctgatgggcttccctttgagggtaacccgacctttctctctggctgcccttaacattttttccttcatttcaactttggtgaatctgacaattatgtgtcttggagttgctcttctcgaggagtatctttgtggcgttctctgtatttcctgaatctgaacgttggcctgccttgctagattggggaagttctcctggataatatcctgcagagtgttttccaacttggttccattctccccatcactttcaggtacaccaatcagatgtagatttggtcttttcacatagtcccatatttcttggaggctttgctcatttctttttattcttttttctctaaacttcccttctcgcttcatttcattcatttgatcttccatcactgataccctttcttccagttgatcgcattggctcctgaggcttctgcattcttcacgtagttctcgagccttggttttcatctccatcagctcctttaagcacttctctgtattggttattctagttatacattcttctaaatttttttcaaagttttcaacttctttgcctttggtttgaatgtcctccagtagctcagagtaatttgatcgtctgaagccttcttctctcagctcgtcaaagtcattctccatccagctttgttccgttgctggtgaggaactgcgttcctttggaggaggagaagcgctctgcgttttagagtttcccgtttttctgttctgtttttttccccatctttgtggttttatctacttttggtctttgatgatggtgatgtacagatgggtttttggtgtggatgtcctttctgtttgttagttttccttctaacggacaggaccctcagctgcaggtctgttggagtacccggccgtgtgaggtgtcagtctgcccctgctggggggtgcctcccagttaggctgctcgggggtcaggggtcagggacccacttgaggaggcagtctgccggttctcagatctccagctgcgtgctgggagaaccactgctctcttcaaagctgtcaaacagggacatttaagtctgcagaggttactgctgtctttttgtttgtctgtgccctgcccccagaggtggagcctacagaggcaggcaggcctccttgagctgtggtgggctccacccaattcgagcttcctggctgctttgtttacctaagcaagcctgggcaatggcgggcgcccctcccccagcctcgctgccgccttgcagtttgatctcagactgctgtgctagcaatcagcgagactccgtgggcgtagcaccctccgagccaggtgtgggatataatctcgtggtgcaccgttttttaagctggtccaaaaagcgcagtattcggatgggagtgacccgattttccaggtgagtccgtcacccctttctttgactcggaaagggaactccctgaccccttgcgcttcccaagtgaggcaatgccttaccctgcttcggctcgcgcacggtgcgcgcacccactggcctgcgcccactgtctggcactccctagtgagatgaacccggtacctcagatggaaatgcagaaatcacccgtcttctgcgttgctcacgctgggagctgtagaccggagctgttcctattcggccatcttggctcctccttcaggtgttttcttaaattaacttctggggcaacatcaactctggaggcactgtctcctttctctaccttaaggataattctgagactctaaggacagaatggtttctttatagactttcagccaggtgcatttgctgtgaggctaaacatccaaacagatttagagtgagcgacagtgggtattcaggtcaagtccaccagtttgatgttccttcttttccatgcttttttccttcagaatacagtcaagtctccaaaaaatgtatgtgtagcttaaacaaattccgttatatgatataattttgctttccattccagccagtgagtgttttccctagagtatgcagaagatgatagaaaagaacctgttgttacctttatcatttttgttcccatgtgctgctcagagtgtgacgttttcattgtgccaagtataattctaatatttattgatacaacttgttgccatagtttctatacacgatcttagccaaaaggccgagaggcaataccacatgtctctaagtggaagctagttctctggtctcaaccaaagtcatagtcatttgttccaactttggaggaaaatctggatgtgttggacttaactgagaaatgtatctccaacatggtgccttccttagggattttcaagggttaattttgaagatatgtaattttagtcctaagtgctgacttttgaatgtaactgtgacctaagatattatacaacagtagtgtctgattcctctttatagtgtcttttgtgataggtaattcacagactggttacagtctgttttccttttcttttttaacctaaaatattttctagttttctcaggtgatgaaattgtaggttaagctgggatttgtaaccttctctacatttgctatatagcgtctatgtaatctttctattggtctgagacattgcagaggaaacctatagccatgcctggagccaaaatgttggacataacccaatttgcttttttttttgttttgtcttgtttttagagttagttgatgggtgctgagatactaaggtactaagaatgacaaaaataaggaaagacttctgaaatagacaacacaaaataccaaagctcaattctttcacttttcttgatgatgaccacactgtttacaatggattgtaggttgttatagtgatgggaaaggtctgtgctgatgggcattgggaaagatgttgcaatctgaagatggactttgtctaatgcagtgtaaccgacaaagccaggtctcctggtatgggctcagtctctttgtagtttaacattcaaagaaacaacagtccaacttgagaaactttgaagaataatgtaaatatttgctgtaagttttatttttaggaggctttgcatagggattttatatagtgaaaggatacagaaagcttcctaaacagttccttgacacctctttccttcttgccagtttccgctcatgacaactatgaaaatctctctcttgctctgcctacagtgtcctcactctgggtggttctctcatcctttgtgcccctgcacaccacactgaccttccctggtgtatgcagtcctctggaacatgttctgtctagctctggtgagttttcttgtgagaataagccacattgctccagaattttggtaaatgaaattttcgtattagtaggaatattttgcttatttaaaactctttgatcttggcttgagacatattgcttgttctcactttgatatgatgtgttcaataaagtcatctaagaccctgcaaaccagatccatctgccttcacactttcattaaattagtaaggtcactatgaggagaggtatacagttactgttacagtatttaccaaacagtgggcccacagccacactcctcacttctccttttggtctctccttagaaataaagttgtttaaaaccatttgcttccagaaggccatatataaaggtagtaaatttaggtgttaattctgagcatggtagtggtgctgtgcctcattgctttccagtctgaggatgacttctaccccaaattattctttgagttactcctagcaggatgagagcaggacacagggctctaggggagaggaaaatgactaagatgatttagcatatctttatcctttacacagctttgctataaatttatagatgcatctgtattattcagggctttccacagaacagaaacaataggagcgatataggttctccatatatacatacatacacatatctctctctctctgtatataaatacattcattataaggaattggctcatgtgattgtagaacttgacaagtcccaaaagtccaaagatttgcagggtgagttgttaaactgggacccaggagagctgatgggtcttaagttttactctaaaacttccctgcaggctcaagactgaggaagagctgatatttcagtttgagtccaaaagcaggaaaagacacatgtcccagcttgaaggtagtcagacagaaggaattctctctcattcagcctttttgttctgttcagtcttcaactgattggatgaagcccacatacattagggagggtgatctgctttactcactctaccaattcaaatgttaatctcacccacaaacattcttatagacacactcaaaagagtgtttggccaaatgtccaggcaccgtatggcccagtcaagttgacacattaaaattaaccatcacagcatccatggagagtataggaacatgtaaattacaattgaattcccatgcatatatatgggtattacttgatggatatgatcatgtttttagagctcagtgaaaaataaggcattagagaattgcaataaataataaaattatttattttgggtgcttttgtcaaagaggtatattaatctcttgatccctttcctctgcttcatctaactcgtaggggatatactttatattgctgtgcttggcatcagcaactgatgtgacagctcttcctctgttctatgaaaaggtgatgtactttaaaaaaaatgtttctgtagaaagtgcttatatccactcaataaaatctctaacaggtctagctactttaaaaggaacagttaggagagatgttttgcttgaatgatagtttaaagaattcctgtgttttttcccattagctccatctaacttgggttgtctcagagaaatccactggagctgatcttcctcagtaagatgtcttttggttttgttttatcatcattcctcatctgagaaccagagagagaaagctgtcaacaagttataggttcgtccagttggtggagctgtttgggccacagcacagggacatatcttttgggtggcaagttctaggtatggggctctttcatttgcaggtggcttatccaagagggctggagatgtagctcctaatattcttaatccagttaaccgggatgctaacatgttgtactgatgttacttctgtggcaaaacttctcagagatcttgggcccagtaactggtccaaaagaaagacttgagaggaagaatggctttacctgaagtctatggtcattcttattgctgttttttgtgcgttcaattcagactttcagcttggtcactgttcttctcttcttccccttcctctatgtggttggggactggaaaagggtgtcctagttgttcgagaccctatcctggactgctctttgctcctatctatccaacttctcaaagttcagctttgcttttcctttcctgccttgtactcacccctttgggctaatgagattctcagctttttccaaacgctgactcttctctcatctctaggtcctttgggtaaacatctcttccaaccttgatctaatttttaaaaaactgccccttatcactaattttagaagcagcaaactcattatatagtaatttagattaaaatatatatataattattgtattcctggattttgttctttttttcttgtttagttctgaattttgctcctctaggatgttcttagtaaatctctaaggaaaatgcaaaatctgccactaataaaagcagccactgacatggatgggatctagggcgaaagcaaatggggaaaaatgggaaacttaaaaaataagagaaatgccttttttgttttttttttaaagccagagacatgatcttgctgtgttgtccaggcatttcaaactcctgggctcaagcaatcctcctgcctcaacctctcaaaatgctgggattataggcatgaaatgcctatttttgaatggatacttttaaaattatctacttatctagtatgctcccagcatctgaagagcagataggattcattgatgaaagggtgaggtggttaaaacatacaggaggccaagactagtagttagccctgtgtaggtatcacaggattacttgggtcagagactcaagcagaagtctctttaaagcttttctaaatgataaacattgttggaatggggtaaagttgttctactgcaagaaaactcttcatcagaagaaattaagaattaattatccttatctaattagactaggtgtttctcaataacaagaaaaagtagttgctgcttgcattgcttttactctggcactagtataatgcagtcattattggtcataaagcactctaaaaccaattaatttgtaaagcttattttgacaagaagtaaatacaaaggtaaggcatagttagcataatgctgctatcatggcactcttgggcataatttatatacataaaaaatacaagggcaagtataactttcaagctgattgcctgtaaaagacttaattgaaaacagttttctgcttttaaaaagtgatttattttagatgtgctttaaaaaacaaaggtcttattgataaccattttgagtatattatctcgatgtgggatttaagtaaaaggtcaaatcttatagaagtatttttggtatgactcaattctgatcacagataaactttatcaagaaaatgaaattagttaaacattttcatgcctgagcactagtttaaagaggcagcaatttttttttttcacaaagacttcaagaagagaactttggttgagaaacctagaaaacaaagaactcaagatgttatcgtataaatgttctttaaacaagttaatattatgagaggggaaaagcattagatatgtttcactagaagaataaacaattcacatgtgtaatttttgcagtggatagacaaatctcagatcttttctgcctgatatcatttgcatttattcagcttattcaagtaaaagacttatattttatttcagaaaagctaacatggaacttttaattttacatttaagtcctgtttagttgtaattctcactcccccagcccctgtagcctcctgaacagctctgacttgctttttttctgaatccagcatcagtcctacaattagtccattggccaggtgatggtcatgtgcctggttagagtagggcaggctccatttgctgatgggctgtgcgactcaatgttcacaaatgtttagtcattcagctccttttcaaggaataagcctggatcaggcaagtaattaacctttgctagtcccaaggtttgttcattagaggcagggaaggaggaatcttctcacttttcttctcagtcctactgctcgccccagctttatgaaacatgagctatgtcctaagggaagagcaagtgggcctcaggtcctcagaaagcaccacaaaactcttaaaatattaagcgtaagagtctattgttcctttgttttcctggacagggaaacctctttaacattggacttcattgtctgtaccccatttcctgttcttacagtggctgttcagtcagcatgatggccggtgggacctggaggtccagcagcagctaagatgtccaggccctactcgtttgtacccctggtagcattctgccttagatatgagagacacttccaggctcttcctgcatttccatcttatgctctggcaagcaaatgccaatcttggctcttttccacttaaaatagtccttctactttttatctgctgtgtaaattggggttagaaatattgacttaaactgcaccagactctgctgccagcttgcccattctccattacccaagtcttcctccctaacagaacccagagtttgttcatatattggcagcaatgtactcagcccgggcaatggatcttgactggtttcagccaatcagaatatcttctattaaggataaggatagcttccctgcagctaggggtggctgagtaaccttgttctgaccagtaagatttaagcagcagaagtccactgggaagaagggaatggggaaggaagactcctgggaaagcttttgtgctcttaataaaagagcagagaaactgctgtgctgcttgccccttcatcttggcttgaaaacaaatgtattgcctggagctgaggcagctattttctgaccatgaagtaataagccttattgtttgacatgtgaatgcaataaacctctacccacataagctacctccattgaaggattccatacttggcacagaatttctaactgacacacactaaaattcagatataaaaaaaaaatagtttctgtaacgttttggtaactgatttcatctcttcctgaacctttgaggttgaaagtggtggcagcagaggtggcagtagccacttacctttatcattaatgataagttaatttattttggggaaatgactcagttgttcaattttccttccacttgcctcttcgagatgatatctgtggtaaatgggtgtgagctcttaagcagtagcatgatctactggctcacgcttgcttttcagagctgattgttaagtttaggggaattctgcaagtcacttgttatatgcaaccattattagataagttatataaacttacaatattaaaaagaaaggtagtactcaaaactcaccactttttaattatttaagtacattttactattattcttgcaattgaagttatttatgtctttttgtttgttttagagacagggtcttgctctgttacccaggttggaagcccaggccggagtgcagtggcacaatcatagctcactgcagcctcaaagctctgagctcaagtgatcttcccagctcagcctcccatgtaggtggaactatagacactagccaccacgcctggctaattaaaacaattttttttttagagactggggtcttactgtgttgcccagactggtcttgaactcctggcctcaagtgatcttccagactcagtctcccaaagtgctgagatgacagacctgagccaccacacccagcctatttgtgtctattgtatctgtaaatggaaatactatataatgccgcagttagcatgagagtacagatatctctttgacatactgatttcatttcctttggatgtatacccaggagtgggattgctggatcatatggtagttctatttttaattttttgaggagcctgcatactgttttcataatggctatgctaatttacatttccaccaacagtgtacaagggtttctttttctccacatccttgccaacatttcttgtctcttgtctttttgataaaagccattctaatgggtgtgaagtgatatctcattgtggttttgattttcatttctctgatgattagtgattttgagcattttttttcatgtagctgttggccatttgtaagtcttcttttgagaaatgtctattaagatattttgcccatttttaaatagaaaaatcctctacttttgacttttcccttaaccttcacctaaaacctctcaatttgagatttaggtccaaggcaaagaaaccatgttttcctgcttatgtctccatctttttaacgtcttcttacccatcaccatgagcttttcttttcccttctgtttggtagaaaatagttttaagttatttcattctccttcctgaggagttgctttttccctttctctgaggccatattggtgaaaaggctgcagagaacctgattcataggggagaatgaattaaaaatacattttaatgtatataaaaaactatcaccatcacgcttgtaactatgagtcaccttgtccacccttccactcctcactactccagggttccacagacctgagagtagggactgtggtgaagaatgactggcagatatacagcaactgaaaaggcaccacgcttttatctcagttgcattaccctttgtatatcagcacttaaaaagggatcttttaaataacatccttgaatccttttgggtggtagaagtaaaattggggctaagcaagaatgaaatggacttttagaagttaaaataggatgttgtatgggcaaatgtatgaggtaggaaaataatgttgtcactgctttgctatctccattttcaacagctctctcagtgcctctggcatctccttcttttgctatgtaccagccctgtcacctagtccctcccactattaatcattaatgacttaagatgttaccacctccttaattgtatttaaaagttaaaaaaaacatgcttttattctttcccattacaaataacaattcatattccttttagaaaaatacagataaacataataaaagtcacttacaatccattgccttgaaacaactattactaccctagtatacatcttttattaaacattcttctacagattattattattattatggttatttttaataaccaaagacccaagagagggtcttgctctgctgcccaggcccgagtgcagtggcacaatgatagctcactactacattgaacccctgggctcaagccatcctcccattttagcctcctgagtagctgggactacgggcacatgccaccatgctgggctaattttttcttttttgcagggacagagcttcactatgttgaccaggctggtctagaacttctgggttcaagtgatcctcctgcctcggcctcccaaagttctgggattacaggcatgagccactgtgtccagtctacaaattacttcaaatggctgcagggcagaggtcacattcatccttatcaactgtaaatagcaatttatttgtggtcaaataataacttcaaaaccattagctaatattcagaatctattgacaaatgatggggaaaatctttttgtcagggaggtctttctggtgcacctcgaatcactccatgcctttgttgttgttttgcttgtcaaacctggaaatctttttcctctctttcacatctatcaaaatctttcctgtcttttaggtccaccaatgtttttacctgcccaacctcctttaaacttgcttctcatagtattcatcccttcccctgaatccttgatcacttgtactgctcatctagcactcatttgtacattttctcaaattgttgccaaactgtttaatgggtcatataagtgtttagggccaggaataactttggtgatcatccagtgtcttattctgttcctgctgctataataaaatattacacactgggtaatttataaagaatagaaatttatttctcatagttctggaggctggaaaatccaagatcaaagtaccagcagaatttggtgtctggtgagggcttgcaccttcttgctgcattctcacatggtggaaggggcaaagggaccaaactactcccttgagtctttttataagggcactaatcctatccttgaggcagagcccttatggcctaatcatattgtaaaggctgtacctcttaatattgttgcattgaggattaagtttcaacatgaattttagagtgacattgaactactacatggaactcctgggctcaagccttcctcccacatcaccctgctgagtagctgggactacaggcacattctaccatgccgggctaattttttttgggtctcactacgttggccaggctgctgtcaaacttctggggtcaaacaatcctcctacttggaggacacaaacatcagagggacacaaacattcaaaccatggcacccagcctatttaaaaatgagacccagagatcttgtgattacacaagattctgtagctaagattacatccctgttactctgactgtccccctgccggcccccaccaatccagctttcactatctcatattgcatctttctctacccaattagctagtaagccttaagcactagaagctattattagcatcatttctattttaaggatgaggaaactgaggtgcagataggtcaaataattcaacttaaggttaaacagtttgtaattggtggaaacaggactgtacccaggccactgactccaatgtccatgcttaatcctccttgtaccaccttacccatgtccatccatactgtagcttcagaaagattaagacctttggaggagaaataaagactgagtttgacaattaggaaattgttaacttttgccagggaattttcaacataggagtaggattgggagctaaattatgacaaattgagggatgaatggggaggtgaggcagtggagggcatgagtaccaaaaacaggtgggtactcatggaagggcagccatagggcggtggtttgatgagtatgtagaactgagggaaggcttgctttagtgattgattttttttggatgaagaagtctggagttcatgaaacatcctagaagaggaaggccaggatcaacatgctgatggattgactggccctggatagaagtagggtactttctttttgaacaagaagtggggaaggtaagtggaagtaaaacttgaaagggataaaaattgtggatgactgctttttttttcttggacattaggaagctgtgttgtcttgtgagggtcaaggggctagggttggggtagggaacttgagcaacatggaacaaatttggaaatgctgctgtaaggaaacacaatacaggaatatgcagggcagaactgaggtttgagctttaaaacgtaatttagataatcaacatagttttatgattttcttttccaacagtggcagaatattcagaattggagaaaacagagttgctgtggaatgtcaagggtgagcagaaggactgggcaagagggcaagagaatggagatgttgagagtgttgttgaagcgattgactaggataggctctgaattattgatgaccaagagttcagaacttgttacatataggtctatctcatatgcttttgcatttttgtctgtcatattctttgtctaatgacaaagaacatacatgcttacctatgctttcacattaaactacagaattctactttgtttccctcctcaactcctcctgcaagccttagtcttgaagagggaagggaggtctctactgaagggcacactttactgtcacaatcactcagtggcagtgggtgcatgttgatggatggtaaagggagtgagaattttttccagccacttgtggaaaccctagggtgttgagtcaccgtcttcaagatggagggagagagcatgtctttcagtggatgccagcagtgacatcacggtcagaatgcactcttgctggatcaaacagccctgagaggaagcatggggcctcatttttatgagaccaactgggaatagccatggttcttatcatgtgccacctgccatcagctgttttctctccacttggttccaaccaatctatcacacttattaaagttcagcacttatatcaccattatagcattgcttacaattttaggcctagaggattttactaatttaatcagtagcctgatgatcaaagggagggagttcattgcatgggcactgagccaaagaaacagtcttatgaggattttctcagcatttcctctggccacaggtatggaaggaagaacatcaggaaggattgataaatttggaataaaagcaagcattgagaggttggacatttgatgaggccaaggaagaggtttggtggaagaggtcaaggcaagagtgtatggtcagagaccgggagtttcagggtttatatttcagatgtgttctgaggctgtgctataaagagaggagagcatggacttgggagtctgagcagcaggtttagaatcctagcccctatctagtcattatctctgtgacactgggccatctctacctaggagtgctatagcctgactttacattatctgtgagggttacggaaaatgatgtgaatttactagcatggtgcctgccacttggcaagttctgatatatagtcatgactattgttattattgcagggtgtggcctcaggaatgggttaccaaagatgaagatggccatatggaaacagaggaaatgagattggctaagtcatcaacatgaatgttgaaattaccccattaactggcaagagtccaggaaacggcaaaccagatattaaggctctcaggcacactgtgggagaggatgggaaagtgatggtgttacaggatagcctgtagttcaaaagaagagactactgaggaaggcaagaacagcaatattttggaaaagacaatgaagagtgagagggatggccttgtgatggggcaggcctggaggaatgtgtggcctctatgtctctacatcactcaaaggtctatctactccaaactccaggaccgggccagttcagatgctcatcctgcctctcaaatgttttggtttttgtttttcttctctgctgcaggctcctgggatagagtctacttttctttccttttaacagttgccaatactccttcttgcccttaggtttctggtctcctcaaaattagctgtagagtgggacacatttacctggttacccttcacttttctttattgaccttgaagactagcaaataccattaactttttttttttttcttagagtcttgctctgttgcccaggctggagtgcagtggcatgatctcggctcactgcaacctccacctcccagattcaagtgattctcaagcctcagcttcccaggtagctgggactacaggctaatttttgtattttcagtagagacagggttttgtcatgttggccaggctggtcttgaactcccgacctcaagtgatccgctcatctcggcctcccaaagtgctgggattacaggtgtgagccaccgtgcccggccccattaacttaaaaaaaattgttgtaaaatatgcataacataaaatataccattttaaccctttgtaagcatacagttgagtggcatcaagtacattcacattattgggcaaccatccccaccatccatctccaacactcttttcatcttgtaaagctgaaactctgtacccattaaacactaacttcccattatctactttgccagcccctggcaaccactgttttactttgtctctatgattctgtatgatttctttctctatttaatttttgttttaaagatttaagagctatttactacaaacgagtgaacagagaggagagcaaaaagaacaagtgcagaaggcagcaatggtagccttgtgttgtaggagctcctcctttcttacttctctaggtgtttattgccaatacagtgatacagaatttcaggaaatgtagacttgtctgttattcagggacaggttggggatgtcttggctgccgcaggactgtatcgaccccgccacccctaactcttgcagtcaaaagatacccaggcctccagctctgatcccattcatcaggccagtctttgccagagatagaggaccctggatgatgacatgatgattctgttcttcctcaagggcctcctgccttgaaagtcttccttaggcagaacccacataggatcatgatggatttgggtggttgatgtacctgcttggtatagaaggatcaagggttatgactttatccaacatactcattatctaattccccacagatagatatatttctttgggagaaaacatgctcagatatacttctttgggagaagacatgctgtccctcttggctggagctggagctcccccatcccgtgcctctctttcttgctcacgcccaatccttctctcctctttccagccccctctttcaagctccctgtcctgctgacctatgctttctcttgggaaggactgtccccatcctctggagggacatcctgctgctgtatcccttcttatgtcttgcacacttgagctcatcaggctttctggcagctaatggaatacccttccttgggggatggggtgacctctgggccttaatgcttggaaggggcttgctggcctctggaggtgggaactccagtgccttctctcttgtggcctgggtgggcttgcttgagctggactctgaggagcactggcggcagctctcatgtcgtctctgaaaggctgagctagccctgtctggcagaggccttcacttcacagcactctgttctgtcttgtatctctaggatcagacttctgtgtgtgtgagagaaatgtttagagcttccctgtttgctgaggaataaaattgaaaatgattgcagctcagctctatattctgaaatcacagccaatctgatagagccatttttaaattcagacgctgcttttttaatagtcaggcactgacatattttaattctcccttaccgaagtgaaaaggcacaagcagattaagaatttatggtttaaacaacaaaataaaacaatgtgttggcagcattatactccctagaatttcacacatttaattttgttatttttactttcttgtatcaggcctgttaaatcctggaaggagagcagacatttgagaaattttttttcctgttctgtttggaattcatttcccttagtgtgacagttgagataagctatttggactgcctccagggagtgctccagaggtgggcagggaggaggcctcctggttccatgactaaggtatggctgcgttgggagctcggctcagccatccctagtgaaatacagtggaaagcggcagctggaatcagatccacaaggaatagcctgagttctccagaccaaagttatattttttaggtttgcctagctgtttaaaccaagtcacaggcagggctatggtagtcattcctaggtatcatcccagtgggacttgtgtacctgggatccgatggtgggactgctggctctggagggctagctggtcagaacttctgatgtctgctttgggcatcaagtgggaacatttcctgtatctcacatgggctggcagatgcttccatttaccactctgtatttttgctgaaataattatacctgacgtcacatacgaggcttccttgcctagaacagtggttagagcaggagcctgtgtagttgcctgcctgggcttagagactggttttactccctaattggcaaattacttagccctttggtggctctctttttccatttatgaaagagggataacagcagccactgtttaagcttgtaaggatgaaatgagttaatacttaaaaagtgccgagacattgaaaatgttcaataaagctgcaattaccacgacatcttaaaagcactcgagagacaaagctctggctaaaattgttatttctgtgttaggcaaaatgttgggacaggctaagcatgaccttgagtccttttggatgtgctgtcttgtgaccctcttcttggtggcatctctccctctccctccaacctggggtagtgacacttttcgtcctcctggaaagagctcccgtttgctgaggaataaaatggaaaactattgcagctcagctctatattctgatatcacagccaatctgatagagccatttttaagttcagacactcagatggccagcaccctgagatgcaaatttcccagggacacacattttaacaaggacaaaaggatgagtgaggttgaggaaagcatttaggggacagcctaatggcttcacaggtccctgactatgctttagatccctgagagtggggacagtcactcagagccatcaagtaacaccaaaatgcactttactgaagtcatttgccccataaattctgccaagtagagattctttggcttacaaactcctcgggcattatatacacttttgtgtaaattgcttgaggtattcagattgctttcttctgaaaatctagcaacgatcccattctgaaggcccaggagttttgtttgtggatcaaggagaaatgaagtggcagagggtgcattttgtttggaacatgtggttctctgggggaggctggcttggcttggatagggtgctggagtaggggctgtggctgagggcagcatgggggccttgtgtatctgagggcagaggagaggcaaagggaaatggagctggagtgcaaagggaggggaaggcctgtcaaaggcaacacatagtagagtgactgtctttgaacagcttcgtgtcagaccttagccctttcgcctaatagctctgcgagcaaattatttcatttcccagtgataggaatttttctattctgggtcctaaacaaatagctgcctgatgtggtggctcactcctgtaatcctagcattttgaaaggccaaagtggggagagctcttgaacccaggagtttgagactaacctgagcaacataatgagaccttgagtctacaaaaaaaaaaaaaaaaaaaaaaattgttgagcatgtgcctgtagtcccagctacttgtaaggctgaggtgtgtgatcacttgaacctgggaggcagaggttgcagtgagctgtgattgctccactgtactcaaatctgggcgacagagtgagacctgatctcaaagaaaaaaaataaaaataaataaataaataaataaataaataaatctgatgctacgatttgatttctgtggcttaacattttttgtcttcaaacagaccaggattttggaaagtgaattattttattttttcagtgtttcacacctttcttctttctgatgttaaagggggctaaagagatgcattggtttgctcaggctgccacaaagtaccaaactgggtggtttggaactacagaaatgtattgtcttacagttctggaggccagaagtctaaatcagagcattggcaggattgcttccttctgaggactgtgagggagaaatgtgttctgtgcctctcttcgtttctggtggttatcttctttctgtgtttcttcacatcatcttacttctatatgtgtatgtctctgtgtccaaattctccattttttataaggacaccagtcacactgggtcatactggccctctctactccaatatgacatcatcctaacttaactaattgcttctgcaatggccctatttccaaataaggtcacattctgactggaggttaggactttgacatatggatttttgggagacacaattcaaatcacaacagggaatttggaagaagtcagggtaatttgacactttttttttttctcagtcagaaaggggaggatcatctctgtgcatcagggcttatacaataagaaccagttttctccagattctgttccttagttggaggccaaatcaacagatgtcatatgtttccatccttccccctaaggtgtctgttgcatatatagctgccatttgataatctcatcatctgcatgtattttgagaatgcagtggctatgataattctctgcgtgctaaggttttatctgatgatgactgcaagaattatttccccatgggtcagtccccttggggtagttgtataattacttgcctaattaatgtataaacataatttaacactgctaaatgtcagatgataggataaatatttggggctatctttactagcatctccattgtatggaccaatgtcgtagactatattgagtgaatctaacaccatccctggtgctccaaaagcagccatttcttctcacttgtacttttgacccaggggttcttgggctcattcacacacaaaattatacatttgaaagtagggcattaagcagactgcagagaaaggaagggcttttcagtttactcgtcgcttctagttggctaagggcatcttatttgagtaaatatgggtgtggtcataaggcttctgatttgaagaggatgcctggtgcccacaagaaacccaaaaaccctggaaaactaagtttagaatgctaagtttaagaagtcatgctgcagaaaagagtatggaagaatcactcaaaaatgtatctgattctatcttattatacacttcttaccaatgaaaaactccttctaatgagtggaacatcaaattttgaagagctttgggaatttatcctaaggagatgattggacaagtaaatatagatttatgtataaaagtgttcatttcagtatcttttatagtagccaaaccccagaaatcatttaaacacccagtggcaggggactgtttaaataaagtatgatggcatggccatctactggaatattacatggttattaaaatgatcctgtaaaatgtattgacattgacatatttataatattttgttaagtttacaaaatagctttataaataaatgaaacactttttactggatggaaatatggcaaaaaaatgacagtaattatcctagaagattgggttattaattaccctcttctttttcttttagagacagtgtctcgctctggcactcaagctggagtacagtggtgggatcatagctcacagcagcctcaaactcctgggcttaagtaatcctcccaactcagcctcccaagtagctgggactacaggtttgcactaccatgcccgactaatctgtgcattttttgtagaaacggggtctcactttgttgcccaggctggcgttgaacccctggcctcaagtgatcctcccaccttggtctcccaaagtggtgggattacaggcatgagccaccatgcctggccttaattaccttctattaaaaactattttgccatattttctgaatttttttgccataagcattttaataataaaaataacaatgaatgatatgaaaattgcctttggaatctcttgatggacacttgacatctggaagatttggttttcccaattccatagttcttgaacagttggccccattttagactctgacataataaacctccacacttttgatgaagaagcttacatttgataaagcttaaggatgaccttttgctaccaaaacagtttaatgcccattctacccagtcagccctgttcttccctaggttgctgactttgattaaattcatgggtctgagtccatctggatgagtccagagcagtctacctagttttcaaaaaagatcaatacctcaccatctgcttgtgagatttttgaagcatatggatcagctcacagcaccagcattccaggccctgcaagagcaaaccatcttgaattgtctgctcttcatcactttcatcaaaggttggctgagaaacgtgatatttatggaagatggtttagaatacatcctttccgctagacactacaagttctatgcttgaatcaagccaaactgacagaaatttccattcttggaatatgtgtctaagctgctcctgaaattaaatattcattggttgcattttagtaaaacaggaggtttattaaaaggccacaatggtgttatctcacagaactctctggaagaaagtccctaggcctcaaggagaccaggaagaggacccgaaggtcagaaggatgtctgtctccacctttagtttctgcttctccgtgtttcaaatttgttcagctctctctttgcagagccagccttctgagcatccctgatcctgtaactacatgtccacaagtagaacaaacaaggtggctagggtaccctctttcccaagattggccagggtaggggagagaagcaggtgatggggggattgggaatggtgttcagagaaagagcatctattacattatagaactttgaaagaaaaaattgttgtcatatttttctcatttatcgggcatagactatgagataaaatcttattttatttacttttattttatttacttctatctactctgaccacccttggaggttatctatatttgtattacccggaatttcctttactagaagttcttgcctttgggataaccattattgtgctctagattttttattcaacaatttgttgagaaacagatatagaataccttttactaaatcttatttctgtaggaatggtgttgagagggctgtcagtgatatcgctgaatattctccaaaagtttcaaggacaaaattgctttaaaacattgaattaaatattaaattagaaagttcagcataattgatagtttcttttctctgtgattcagagacaaatattatgttcaaatgtagctgttatcctaggctcccttgttgcatataatttgtgtttttctttttcttggtctaaaattaccactcttacttatattttccctagtcctgatgctctcttcttattatattttatcaattattgcacatatttttattggaagtacctcaaatccttaggagggaggccagtcataaataaaggccaagttattaatatccaataagaatttaatctctgtctctctcatctacctattcatctatctgctttaagttggttttctaaattgctgcttcttgtaatctaatctagaggcgttagtaatgcagaaatgtcatatagggatagacacaggggagatgtaagggaactgtttttactgccctgcttctaacatgatatattaatagcagctctttacaatacctgtccataagcttggtgatcagtgtatgtatttctgtgcatggtttttatgtgtaaaactgaattaacagataaaatgtctcatattgacagaagtctgtctatgtgataaaataaaatctacttgatgctcagtttgttaattcatatgatgccttttaaattactctattattttaatataaaactggaattttttactataaaactggaatatatgagtgtgtgtgtatctgtggcatatatacaagtaggttgtattctattaggctggtgcaaaagtaatcacagtttttgccattactaatatgtatatatcatatagatatgaaagtcagatgtaacacctgtcttcataatacctaaatataaaatctcatacccatcaataattctcaaatgctttaaaccgacattttataataaaattttcaaacttacagaaaagttggaacaatttgacagtgaacaacccagctggattatcatttagattctataattaacattttactatagtgtttcatcacatgtagatattcatctacctatccctctatccattcatcaacacatattatttttggaatatatttaaaagtaagttgcagattcatccttagacacttcagcatgcatatctctaactagatttaaataaatattttccatggttttttccctttgatgtcaaatctacatacactgaaatgcacatatcttaaaggtaccactgaaagaggtttgataaatgaatacagctgtgtaacccaaaccactattaaggtatagaacatatacattatcatcattccagaaagttccttcatgttcctccctagtcaacccccatcccctcacccccaaagctgttgatcatattttttcctatcatgtattagttttgcctgttctgaaacttacaacttgaatcatacaattgcttttgagaactaaaaggagtgttttctttttattgttaacactatttaaatttctgggatgatgaaacgtggcctcagtgtcctaaggtatatagaattatagattattataagtggggtgttatccagggcagagcagtagcttacccttgggtctcgttgacagagatggggtttcaccatgttggccaggctggtcttgaactcctgacgtcaaccaatctgcctgcctcggcctcccaaagtgctgggattacaggcgtgagcctccgcgcccagcctggatatggtgatatgattttttgtcagtcacagcctctggtgaggacagttggctaatttaaaaaatgcttggcacacacatgagcattgtatcctgctgacagccttccacagattcgtccttttgtctaacttagagttctcttggtgaagagatagcttgaagtatgttcttaggcaagtcacttccatgacatgttctcctttgtggagtgaaaaagtgaaaggcgtttggatgagaatctggtgagcaatcaaaaacacacaagtttataggcttcaggccaacatattttagtcagctgaaatcagggagacactgcctggttggctggctgcctccggaccggggcatcctgcagaggggccttcagctaggggaggggcagggaagaaaatctcaggaaagggtgggcagtccacttttgaccactccaccttatgcaattctttcttttcccttcttctcccttcactttctctgtcctcttgacctttcatttcctttcttttctgtcttccccgtggcagctgtgaacatgtggatcccttgtgcctgaggttctgctggtagctcctgcagcccgccagactccaggctcaaggcttaggggtgtttcttcccacagtcttctggagagtgtaccaacaatttctccacgctccctggggttgctcagctcagcagggctggggaagtgagagctgctaaccggctgtgtctgtgagtcagcatttctccccaccgactcaggtctggggagagaccctgggagaggatgtggaggaggcactttcctttcccagactggagatcaggcgtccccaggggcagggggctgggggtagaaggtcgaggagtgaggagttgtggagagtgagtggtgtctggagcataactgttgtatgtattcatgcatgcgcgtgtacacatcactgaatttgtttgtggtgactagagtcagttctaaaatgtgttcttgtaaagtcttaggctcctaaaaaaatcatttgaatatggattttaaatattctcagaagtttgagaaaatattcctactaactatgacagggaacaaatacatacaaattagttaataacatcatgctaaaacgtataatgtgattttcaaaacatgctaaagagttaaaaagtctttttaaaatttgtttattttttatttctcttccctcttagagcgtaaaaagttttaagagggttttttgttttttcttgatatttaaaattttggtttgatgctgagaaaagctttccacatactaggcacgtaatagatattcagtattatgtgatcacaggaagtaaaataagttagagagatcagagagattattctgtatttaaaggattgagattttctactatttttagccaaagaacaatatgcaaccttgagttaaaagattccttattactgattgggagtttgactgttttgcaaaaactgtgcttgccacatattgtcagatgatgatgaaaaatctaagtttaggcttgacatatagtgaattatgtggcttttccccaacttgaataaacatacttaaaaaaaatcccactggtttatttgtcttcatgtagcttgcttacctcacaaggtttatttcagtagtcatttaaaaccaaatttctgaattcttacattgtatagaaatatcccaggaaccatttttgggttgaacaagacttttatattagttccccagtcataacaatattttcttgaagttacagtaatatattcttgaaggcataataatacattcttgaatatattattgaaattcaacttatatgagaatatgttaagaatgtatgagaatatattaaagaatatattgaatggtggtattacttatatattatttatcaccatttctggatatagtgatatgcttttttttttttgagacagggtctcactctgtcacccaagctggaatgcagtggcaggatcgcggctcactgcaacctcggcctcctgggttcaagcaattctcatgcctcagcctctcaagtaactgggactacaggtgtgcaccaccgcacttggctaatttttgtattttttgtagagacagggtttcaccatgttggtcaggcttgtcttgaactcctgacctcaagcagtctgcccatcttggcctcccaaattgctgggattacaggcgtgagccaccatgcccagcctggatatggtgatatgatgtttagttagtcacagcctctggtgaggacagttgactaatttaaaaatgcttggcacacacatgagcattgtatcctgctgagagtcttccacagatttgtcctttggtctaacttatatttctcttggtgaagtttacactcatttctttttgttctacccttattggtgactaagagaccagctgtattccaacttctgaatactggcagaattctgaatcagtagctcttccaaaagggcctagcttacctcagagaatcagtctggcccttgtgtccttgtctcctctatggagaacatggagttgcttttctttgcagttggttgtagcttaaaccatagtgcattgctgagtcgtgtgatgtgtgattcatcaggcctcaggtgacaacggtggatttccttcaggaatgagtagcaaacattttggcccctctttgggtgccaagcaccatgaggtaagggagtactttacagacccctagagatccacgggtgctctagatatagccatatttcagcccctggatcctttgttagtgccatattaggagaatgcctgtggaaatggcttcttttctccacataaggcttttctttttctatttttaaaaatttggaccaccaggcaagaacacatcaggaatttttctgtttaatttgaacacatgtgttaagaggcagagtatagaaagtagtctgagactagagaatctaatggagtaactaagagggtttacacctaggatattggaattagctatgtcctaggctataaatctaaggtatctttgttctaaaatgaaacatgacacagacatgacagatgacaaagagtacactttattgtagatccatataatactgagaaaattatttttctgcaaatctccttggagatcaggatggggttgaacctcacctgaaccttaagtcatggaaagtgaaggagaattttaggatggcatacagtacaatgatctttaaaatgaactgcagggccaggcgcggtggctcatgcctgtaatcccattactttgggaggttgaggcgggcagatcacgaggtcaagagatcgagaccatcctggccaatatggtgaaaccctgtctctattaaaaatacaaaaattagctgggcgtggtggcacgcgcctgtagtcccagctactcaggagtctgaggcaggagaatcgcttgatcccaggaggcggaggttgtagtgaaccaagatcgtgccactgcaccccagcgtgggtgacagagcaagactccgtctcaaaaaaaaaaaaaaaaaaaagagagagagagaaagaaaatgaactgtagaacactgatgttcttctggcaagaccaagttgttttgccactaaaatattggaaaaataagtgtcttttcttgattttaagaaaaacactttcccagaattatgtatgcttttctcccaatactttttaaagctttggtgtttgtttctgtactagaatctagtgtaagaaagatctgactgagggcacatgttctcaggatctcctgagggctgtgtcacaggcaaaaacgtggaataaaataaaataaaatatccaattaagcataacacattaactttaaaaaaacctaagtgtagcagtatttcatagtgttttgcaaagatgctgttactttcatgacacctaccacctgaagaagtttgagaaggaccaggttctaattgtgcaactgccattaactagctagctgtccttggataagcctagaaaagctgcgtaaaggaggaaggatttgaattggaccctgaaagaaagtcagatcttagaaaagcagagaggggagggggaagttatttctaatgagagaagaggagggtaaggagatcaaagacctaagaagtataaagtttatgtgggtaatagagagaacatctgcttgccatgaatttctcttgagtttttttggccccagtgtagaactagtgtctctgttctctgctgtgacctcacctggaaatgtctattagtttatcatgccatgctggattaaagaaaaaccacagagagaggagttcagagatttatgtattatataatacatcataattatttttatttaaataattatttttatgaattaataaattagaaaagaatcatttgtattatttacgtgtatatcttccacctgaagtatgtttggcaatacattctctcagctttcttttgtctgaatctgtctttatttttgaaggagttttaaaattggatatagaattagacatagaattttaggttatagctttttttgcattgtttttgtgagaaatcagtggtacttcaagttattgctttcctatctgtaatatatcccttttctctggctgctttaaagattttcccattatcatttgttttcaacaacttgattataatgtgtcttggtgtttgagtctgtgtatttattttacttgtgatacattgagcttcttagagctaaggtcttgcagcaatccagggagcatttattcaagaaaaatggctgatttttggtaaaaaatacagagctttgtggtgctttaacttgtcctattacaatcccctccttctccaactccatagtagccttgaaaatcaacagcccataaatcacgatgaaaaccagcaggctggtagccacatgagagggaagaatagggttggagttccttcaaatccccattcctagagacttttattatttgacttgtctgattgttctctggaacatcccacttatggggctgtctttatttgacccgactcagaggtcatctaatgtgaacaggcttttccttaagggtgtttgttcaaaatgatgagaagcaaatgttgaaatttcaactgcctgaagcactgaataatagttgtggcaaacagtaggctaaccaaaaggcttaaaagaaaatgctggggaatgatatgttcataggggtctttggaaggctccagcatattcctcagaacctaaaaggtcacatgcacgtgtggggttgtttacaagcctagagcccatactcaggaaaggcctcaaaggtcccacctttggctttttgcttttatggctaatcaacaggttctgcacaagcaggaagtgaaggctaaggcagagttataaatggcctgttttagcattgcctgttgaaagcatgcctagacatgcagagttcttcagcaaagactggtaaactcattgattccagacatctaaggaagtctgtgtctaatcattagctgaccactattgtaactgagcagagatttcagtggcaaaacattacaaaatatacagactacagaattagttcaaaaaagtcactaaaccactaccaatactaccaccagcaaacagtaacaagcagaaaccacagggaaggaggggaatttgtattccaggctttccttattatattagttaaaatatatagttttcaacagaaaattatgagataaacaaataacaaagtatcagggaaaaaaagcagaccacagaaactgttcccaaagaagtttggactttctgaaaaaagactaaaaattagctattttaaatatatttcaggaactaaaggaatatatgagaacaatatctcaccaagtagagaatattaaagaaagatagaaatgataaaaggggcaaatagaaattattgagttgaaatttttaataattgaaataaaaaattcacttcagaagcaaagttgagtaagcagaaggcagaatgagcaaacttgaagataagtcaattgagattcagtctgagaagcagaaagcaaaaagaatggtgaaaaatgaaaaaactcagagacttatgggacatcatcaaaagtgccaacatatacataatgggagtctcagttcaggagagagttagagaagagaagaaaaaatattttaagaaataatggccccaaacctcccaaatttgaggaaaaatattaatctacatatccccaaagctcagtgaactccacataagataaatacctaaaaaaaaccccagatcataatctagggttgacagatcattatcatactatcaaaagccaaagataaagagaatctggaaagtagcaagagagaagtgactcatcatttacaagggactttcaataaaatcaacagctgatttctcattggaaaccctggatcccagaaggcactgagatgatatgtttaaattgttgaaagacagactgtcaaacaagaataaacaactatccttgaaagatggaggtgaaattaagacattcccagataaagaaaaacagaatttgttactatcagacctttcctataagaaatactacagggactccttcaggctgaaatgaaaggacaccagacagtaactaaaattcatatgaagaaataaagagcaccaccagtaaaggtaacaatataagtaaatataaatgtttaaatgtagtttttatttataacttttttctaacagatttaagcaataattgcataaagcaatgattatataactgtgttgatgggcataaaatatataaagaggtaatttgcatgacaacagcacaatagtgaaggggaaaatggtgttaaataagagcaatgtttttatatgctgttgaaattaagttgatattaatctaaactatattgttataagttaaggtattgtaatttgcagggcaacaactaaacaattaagttaaaaaatagtcaaagaagaacagagaattaaaatgctgtgttagaaaatattatttagcaagaaaaggtagtaatggaggaatagaggaacaaaaaagacctaacatatgtatatagaaaacaaataactaaattttaccttatcagtaaatacattaaatataaacagatagaacattccaattaaagacagatattgggaggcaaaaaaatcatgattaaactatatggcatctgcaagagacatactttagatttaaaaccacaaaaaggttcaaagttaaagggtggagaaagacataccacacaaattgtaaacaaaagagctggagtggctttgctactatgagacaaagtagattgtaagacaaaaattgctaccaggtacaaaaaagggtattttatattgattaaaaaggtcagtatatccagaagacataagaatgttacatagccacagagccccaaaatacatgaagcaaaacctgacagaattaaaggaagaattagaaaaatctaacaatatatagtcagagactttaatactgtactatcaataatagatagaacaactagacacaagatcaacaatgacagaattgagcaacgctataaaccaagtagatgtaacagacatctatagagcactccaccccaaaagagcataacatactttcttctcaaaatgcacatggaacatggagcatatgtcaagccatatagcatctcaataagtttaaaaggattgaaatcatacaaagcatgttctctgaccacaatggaatgcaattataaattagtaacaaaaagacatttgtgaaactcacaaatatgtggaaattaaacaacacactgataaatatctaaaaggtaaaagaagcagttacaaaggacataagaaaatgctttgagatgaatgaaaacaaagacacaacataccagaatttatgtgctgcaacaaaaacagtgcttaaagggaaatttacagctataaattcctgtattaaaaaagaagaaaaaatcttaacctaattggaataacctaattccttaagaaactagaaaaagaaaagcaaactgaacccaaaacaaacaaaagaaaggaattaataaagattacagtggaaataatggaaacagaggccagaaaaacaatagagaaaattagcaaaaccaaaagttagttctctgaaagatcaacaaaattaatgaacttttgtctagattgaccaagaagaggagagagaagactcaaattactgcactcaggaatgaaaggcaagacattactaccaaccttatagaaataaaaaggaatatacaggaacactatgaataattgtatgtcaacaagctagataacctagataaattggacaaattcttaggcacaatctactgaaatagactcaagaaatagaaaatatgagtagatctataacaaagaaagagtttgggtaaataatcagaaaacttcccacaaagaaaagcctaggcctgcgtggcttcatcagtaaattttaccatatgtttaaagaacaccaattcttcacaaacatttccagaaaaaccccacttatccactcattctaataccaaaactggacaaagacattacaaaaaaagaaaactatagaccagtaattcctatgagtataaatgcaaacatcctcaacaaaacacaagcaaaccaaatccagaagcatataaaaaggtttatatactcattagtaggtgagatgtattctaggaatgcaaggctggttcaacatgttgaaatcaatcaatcaatatatgtgtcattaatagaataaagttaaaaaattttatgatcatttcaatagatgcaggaaaagcatttgacaaaatccagtaccctttcataataaaaacattcaacaaactaggaacagaaggggacttcctcaaacagataaagaacatctacaaaaagcccaaaactaacattatacttaatacttatactcaataatgatagattgaaaacttccctcctaagattaggatcaaacaaggatatccactttcactgcttttatttgacattgtcctggaagttctagccagagtacttaggcaagaaaaagaaattggcattcacattgggaggaaagaattaaaatgatctctctttgtagacagcatgatcttatatctaataaaaattattagagcaaataaaacagttcagcaaatttacaggacacaagatggatatgcaaaaatcaattgtacagttgactcttcaacaatataggtttgaactgtgtgttcacttatatgattttcttctacctctgccatccctgagatagcaagaccaacacctcctttttctctcctcctcagcttactcaacatgcagacaataaagacttttaagataatctactttcacttaatgaataataaatatattttctcttgtgattttcttttttattcttttcttcttatttttagagacagggtcttgctctgtcacctaggctggagtgcagtggtggaatcatggctcactgcaaccttgagattctgggctcaagtgatcctcccaacctcagcctccccgatagctgggactacaggggcctgccaccatgcctggccagttttttatatttttttgtagagacagggtttcaccatttttcccagggtggtctggaactcctgggctcaagtaatctgcttgccttgtcctcccaaagtgctgggattacaggtgtgtgccaccacacctggctaagttttcttttttcttttttgtacagacagggtcttgcaatgttgcccaggctagtcttgaactccttcaacagcaggctattagtagtagttaagtttttggggagtcaaaagttacatgcagatttttgactgtgaaagggggtcagtactccaattcctagttgttcaaaggtcaattgtatttttatacactatcaataaatcattcaaaataatttaataaagcaattccttttttatgtttttgacagggtctacctctgttgctcaggctggaatgcagtggcacgatcttggctcactgcaaacctctgcctcccaggttcaagcaatcctcctgcctcagccttaggagtagctgggaatacaggtgcacaccaccctgactgactaatttttaaatgtttttgtagagacgaggtgtcactatattgcccaggttggaaaggaattccatttaaaagaggataaaaaaggataaaatacttaggaataaatttcacaaaggaagtacaagacttttatctttaaaagtacaaaacgttgtaatgaattaaagaacacctaaataaatggagcaatatttcaggtttatggattggaagacttaacattgttacattgttaagatggtcattctctcctattttatctacagttttagtgttatccttaaaagttcagtggtttttttcccccagatattaacaagctgatcctaaaatttatatggaaatgcaagggatttagagtagccaaaacaagattgacaaagtaaaacaaagataattcacacttcccaattttgaaatttaatacacagctgcagtaatcaagattatgtggtataagcatacatacagagatcaatggaatagaactgagagtccagaaatgaactcagacatttatggtcaattgatttttgacaagggtgccaagacaattcactggagatagaatagtattttcaacaaatggtgcaggaataacttgctattgatatgcaaaagaatgaagttagatccttaccttgtacaatatgtgaaaaataactaaaaatagatatcaaaaacctaactatgagagctaaaaatataattctcatagaaaaaaataggtttaaatttttgtgactttggattaggtaatggtttcagatatgacagccaaagtataagcagagaaaatatagataaactgaacttaatcaaaagttaaaacttttgaatttcaaaggacactatcaagaaggtgaaaataaactcacacaattggaaaaacgtttgcaaatgttttcacatctgataaagctgtagccagaatatgaaaaactgttacaacttaacaatgaaaagacaacccaattttaaaaatggacaatacatttgaatagacattcttcaaagaagtatatgaatgaccaataagcacatgaaaagatgctggacatcattagatactgggaaaatgcgattcaagactgcaatgtgatattgcctaatacctaccagaataggtaaaatagaaaagacaaacattagcaagtattgataaggatgtgtagaagttggaactctcatacattgctggtgggaatgaaaatgttgcatttactttggagaacagtttggtagttcctcaaaaacttaaagacagagttgctatacaactcaacaattccacttctacatatatacccaagagaactgaaaatatatgtccacacaaaagcttgtacaccaatgtcgatagcagcactatttattatagccaaaaagtaaaaacaaccgtatgtccatcaagtgatgactaaagtgttgtatatccatatgatggaatattatgcagccataaaaaggaattaagtcctcatatctgctacaacatgggtgaaccttgaatacattatgctaagtgaaaaaagtcagacacatgtcatatgatgccatttatctgaaaagttcagaataggcacatctataaagatagaaagcagattaatggttgataggggctgggcaatagggatatagtgagtgactgctaatgggtatcgggttttatttggatatgatgagagtattttggaattagatagtggtgacagttgtacaactatataaatgtattaaaaactactgcattgtatactttaaagggtcagttttatgacatgtgagttatatctcaatttttaaacaaccaattgagagacagtatacaaaatacctgatcattaatactcaaaactgttaaggtcatcaaaaccaaagaaaacctgagaacctgtcacaaccaagaacagccaaaggaaatgacaaaaaaatgaaatgtggtatcctggatgggatcccgggttagaaaaaggacattagtgataactgaggaattttgggtaaagtctctactttcgttgataataatgcatcaatattggctcattaatggtgacaaataaaccatactaaggggaagctcatgtaagagaactgtgtactaccatcacaatcatctaagtgttctaaaataaaaagattgcttgaaaaaaggctggccaggcgcggtggtttgcacctgtaatcccagcactttgggaggacgaggcggaggaccacttgaggtcaggagtttgagatcagcctgaccaatgtggtgaaacaccatctctactaaaaatacaaaaaaattagccaggcaaagtagcaggttcctgtaatcccagctacttgggaggctgaggcagcagaatggcttgaggtgggaggtgaaggttgcagtgaattgagatcacaccactacactccagcctgggcaacagagttatccccgtttaaaaaaaataaatgacagaggaaaaatataactaagagcctattgtattattcgacatgaactcctcgagataaatacaatcttgaagctccttctaactttagaaacctgtgatttcttgcatagtttggctagttgagttttgtactgtaagttccaccggtcagcttctcagccagacttgggtaatttatgtccagggtgacaggaagcactgaggaaagagcgttctcatcagtggtgatgtaataatatgtacaccaaaccctcatgacacatgtttatctatgtcacaaaccttcacatgtacccctaaacctaaaattaaaattagaaaaaaaagagtctctttctcagacccttccaaaccaacatgtgtgaaacatagtgagttgtccttttaaacttttatcatatcatgtaaaggtgatgtactccacaagtggcaggtatttactgagtgcctgtcatgtcaggcatctgggagagactagggtgaagccaggcacaaaaccacacattcaacagtgaattgcatgcatgatgtattaccattattatagtgagtatgatgaagaacaggatgttttgagagcatataacaggatctcacctgagttggcaattggggaaggtttctgaggcagggcagtgaagccaagaggaaggacctgtaggagaacctttggtgaagaggagggatgggcttttccagcagggggaatggcattgggatgttcccatgtctgaaggggacaaggagttgggaggaactgacaaaagaccactgaggcctgaggtgtggaggcaggtgctgcatgggcagttggagagggaagatgtgagattactctgagaagtagaaagggagctaggaaggcattgaaaacttttaagcatggcggtgtctgggctagatatgtattaaaaacaatactctgggccaggtgcggtggctcacacctgtaatcccagcactttaggaggctgaggcaggaggattgtttgagccctggagtttgagaccagcttgagcataacagagagaccctgtggtgtgcacctgtagtcccagccactcgggatgctgggaagatcctttgtgaccaggagttgaaggctgcagtgagctgtgaccatgctcctacatacagtgagtatgactgtactcctgggtgacaaaataagaccccatctcaaaataaacaaatgatactctaaatgcaacatatggaatggattttgggagcagtggtggagtgggagaccagttacaaggctaactgaatagccttttaaccagttaaaaggctaacaaataccaaaggcaaaaagtgatggggtggtggtgggggacagaagttgagttgagaacaaaattaagaggtggaattaacaaaaaagtttatggaggataaagaatataatttatagatgctgataaatacagaggtagctgtactaaaaaaaaaacctaaagtatttgttaaaaaacaaaagacaaaaccaccaactaaaacaaccaactaatcaacctaagattaaattaaaaccaagacccaggtctggaaaaaaaaaaaaagatcagctttaacaagtgaatacatggtatttttaaaaacacgattattccttcaaaatagtgcctacagtgtctttcaaaaagttgcctttctctttttcaaatcgtgtaagatgtgtcatataagatttgggtgttttccctttgccgatggttggagagtggtgatgtgtcttgcgaaattaaaccacagagaacgtcgatttgaaactttcggagtttcggagaaactggccctagctcagctgccagtgaccagtgagatggattcagaatgttgtcctagtgagggtgctcagtgacaacgcaggtcagaggcagggccggctgcgactccacagacagactcacagccacagcgtctacaatacacacagctgctgcctggctgcgtgacaaaggtgtcttggcagaagcattttggctgtctgaaatacagcctttgcacaatcctgagactatattttacaagttcattttctaacatccaggcacgcttttatggcatctggagcattttgctgaatgacttggtagtgcactgctgaccagacagcacatttccagatttagattataagagaaaaacagcaagtggtaagttcagctgcaggtcaatggatacttatactacagttccctcactgagcactgggctactttatcccatggggaccaatcctgtaaagtgtattcaacagagatggccctaggtgtttgcttttatggttgttagccacattcacactgggaatgtgctgttatcacattgtaaacattattcttaatatcagaaagaaaactggggagagtgtcaagaattggcatgcacaaactgatagaattgccagtggacgttcttattttctgagcatttatgagctgcaggaggtaggtgcagtctgtaaaacaaaggtggtgagaaacattaaccattttttattgattttatttcaaactgtgtacatcttacacgttttaggttctttgtaatgttgggataatttggaggggacataatgatgttcactgacaaatagctttctgaaaaagtcaggagttcatacattatcctgcattgatgaaagactttcagcctttcaaagcattattagacttactacttaaaatttttgcccagcttgttcaattttactcttaagaagaagggagggttaaaaaaatagtagtattaaatatatgaaatcttaattttaaatgatggctgtcatcaagtgtgccctcaatgagaacaaacatttttatacatttgtactagagatgcccagtattgcttgctcaccctcagtccctgttgtctttaataatcgtgttatatacaacacaatttcaccctgtctgttccttcagcctacccctgttccataccttccccagctattagacttgggtggtcccttgacttcacatccagaaatgtctacagctcagactgaccagttaccaggttctgtgtgcactggcctacacagatattatgagtccttcagaatcagaagatgggaaactgaagcctatgccagccaaccaaaaaggtcataggtagactgatagctaaggcagccattttggtcatgtgcaaggtatcagttggtaaagggaaaaaaatgaaactcacatgtagagagagatgtgattaaagaaagaaaagaagtaagtaactgcctgggatcctgatagtttctgagccagacctaggccatttatctttaaaataaatcgactttttccttgaggtaacctgaatgaggctcaatctttacagccaaagaaaaattatccttatcagtgatgtctgcctggtggctggtgaatggtaaaaactggcaggagagaccaatccgatgggaaatcaagttcaggtaggaaatttggttttaaaccatagagaatatttaagattgctacttccttattcagacctggtcactgtggagcaatcatcattactcccatttatccaaggcatagctgtacataagttttgtctcaccttgggtgagatttccttaaaataaaatactataatcataatggcttacttatgctttggctttcataaaacaaaacaacaactacgcaaaacctacctgtgtcctctgtggttggattgaaaaaaaagggggtaggttgtgaaattaagctgaggacgtgaccatgtgtctgatgactaagatggaacccatgtaggagttgagtcagtaataacatgcctcttgctgcagctcaagttgcctgcaaacccccacgctttttagcaaatattattttgaatgtcagagtgcacagagccgttctctagggttgggctaaatttgactctgtgggagaataaacctagaattccaaatgtggtgatcccaacagagtatgtgatgcaagaccaattttccacttgtgccgggtgggtttgttcaaatctcacacagaaatgagagatgccagacggggtgttgacttgccccaaacataaggtagtaatttaggttttattttaaataagaattagagtctgggtaatccaaaattttaatttagaaaggagcctgggagaatggcagaagacaagagctaggcagccctgtgaagaagggtcaggagtggagcgatgaggcctcgtgtgcttcagtccagttctggaagagctgatttgtagtaaaaaagaggcaactctaaatctgtgtcttagcatggttttgtagaaaagcctaaaggtgattctgggtgctgtgatttgaggtagtagtttctttctttaatgtgcagataatagagtaaactttaatgattaaagcattataagctgactgcagtgtttaaacactgacccagtttcagcagtgacctaataagggtggcctgggagaagggggggctcaggggcagcttggaagaaataggtcaaaaggatttctcccagttcttctcaggcagacacaatgggacttggcattctttgtgcaaagcctggcggttgcatgaagaattttctcctgaaatgctcctctatgcaatttactcttggttcaagtcgatgcttgtgatgctgggtcattcttttggtttgaggaggatgtagtgtattcattcaacaaatatttattgagcacctactatatctgaggtaccatgtggatggctaagaatacagtagtgaataaaacagtgtctgttctcatggagcttactttctagtggagaaaagcctgagttcaaatcctgactcaatcagttatcagcttggtgagttacttaaccttgggtaagttaacctgtctgtccctttggtttccatatctgtaaaatgggatgacaaaattgtacttaccccgtaagactgtcatgaggattaaattgaggccacacatgtaaagagcttacaacaatgaatgctttgtagcaaggacttcatataaacaattacatgtcaaagtgagtgaatgagctttagttgtccaaagatggaagaacaatgaaaacattcatatggaattctcatgggtctggaataagcatttaagcaaggccttctactgaatatggctatcaggtgtggagttcaaaatgtgtgaaaaaccaagagacccagaaaccctcatttaagcaaacagcctttgaaacagaagcctgactttagctatcacattcatattcttatgccaagagagatcctgcatagaattagtaggtaatattaaaactttggtttcttttagggagggagatgttacccttgtcccagtggaagacttgtcatgtgaatttgctggtagcctccctggggttgtgagacattgacaccacattatactttgcatggggaagagtgatttgctaactcagtttttatatgatatcctgagaaatctgtgatttctcatcctgctgtcaacgtgcattagactgttggagctgaactgtcactccaccacctttcagctcaatttctttatctgtaaaacaaaagaagctgaaagagtgaccttcggttaaagccgtaggaccctaggaaccagtccttcataaatttatgtccacatagctgagatacctgcaatattgcatcccagatatcaaagcacacatatctcactttaagttgatgcttactcatacctggagtagatgctgatgggtgttggttctgttatgtctatagacatgatgctctttaaatagaaaggcatttgttcatcccagatgcttcagtttgtatggtcttctcccttgagatttccaaatatggttctggaggaaatgggtacatattctttctttttggagcaaaggctttttggaacaagggccatgttgctgatgaaaatgttatattgggtctcatggcaattcctttattgctttcttgaccctgtgtcattcagggagtgtcaaaaaccacatggtgcttctgagacctacaatttttgcatttagttctctgatttagctgacagatgttaaaacacagatatagccagataactccccagtgacaacacagatgcaaaaactgaaaagtgcagttactccagcttggggagggattatattggatattcaaaattttccctactgaagcccttacatttttcatgtgtttctgttaggctaatgtggcttaggttagaggaaactgagtctctttccttctggttgattcaatcattcatatcctcaagaaaatgtgccaatctggagctcaggagatcctgagaatattaacaataacagcaggctcaagtctcttttatggctggcagggctctgacagaacaactttgggtctgaagagaaataaaacaaaaaagatctgagatctggagggaaatttcattgggacttacccagtcattttatggattaggaaatacgaggcctacagtgactttctcggggtcacagataggagtaacagaaccagggctagatctaggtctcctaacttgcaattgagtctttccccattggttcctggcctctcgtgtgtcccctgcatctccctgaggtttacccttgagattggtgttggggactgtgacacatggtggaggctgcagtagggcctctggctctctccagtcttgggcgtgcctcatctcagcccattgcctttggggaaatgctagccacaaacatagtgagttaaattcttggactatcagatatagctcagactttcaagatgataaatagagaaactgaggttcaaagagggaatgtgactcgctcagcaattcagaaaatcaattaacaaataattatggagcacttaggatgtgccgggcctgtggaaactgctggtgggtgggtgggtaggtgggggcggggggcggcatttgactaagaataagacagacaggttcttaccctggaagaatttaccatccaggaacaagagagcaaacagccacaagtgggaggaatatttagaagcgaggagtccccttggagaacttgacctggtctgacaatcaggagcagactcgaatcttctgttccctctgtcgagatgcctcgtctctctaggtcttgctgacttgaatgtgtgtggagagttcaaagccaggaaaggatatgtttgaggtaacctgctttcctaccctatttagattttaggttaattttaaaaatgtttcccttttgtataagattattttgatgcttttagaccctatacattaccctattatttattacactgaagaatctatttaaatattggcctcactacaggccaccctcaaagtgggccagttcttagggctcataggggaactatgacccagtgtacccctacagaaaagccactgtctccatggcttctggttgcctctagatagaaatctaaaagcccactgatgagtttgtgacatttagcaattgccaacctttgcctagactaccatcatgtgtcctgggaagatgcccccttcctgatccacagacctcttttctccatgttgtatttctcgggatttggaacttttctagatgacagttgtttttcttgctcaaagggagggtagcatgcctttctctgagccatgttcccccgcccccttccacttagagcctgcctctttctgaccagctccacctgcccctgcagcagccctactgccctatgtaccagctgcaactggttttgtgtatgattatgtatttaaaacaatttgtgttcctgtctcttttcattatgtccatcctctctactcctctggattacaagtgtcgtgagaaggggggttgaggctcctatttcctgtagggcttagattactgaggcgcagttggctggcggctgggcagactgaaccctgctgttcaaaggcagatgggagagccggggcgggggatctgagccaccagcccagtggtccagagcagttgtctgaggcaggacaccaggctgcaacactaatttgccatgtgactctattttattttattttatttttgagacagggtcttgctctgtcacctaggctggagtgcagtggcgtgatctcaactcactgcaacctccacctcctgggttcaagcaattctcctgcctcagcttcctaagtagctaggattacaggcatgcgccaacgcgaccagctaatttttgtatttctagtagaaacggggtttcactatgttggccaggctggttttgaactcctgatctcaagcaatctgcctgcctcagcctcccaaagtgctgggattacaggcgcaagccagagcgcccagccgccatgtgactttagactggatttcagtttccttgtctaagtgtctcctcatgtcgggatcctgtggtgtgatgtctgggagagtaccctgaacttagtacttaaagtattaagactatgtcataatgtctcattcttagaccctgtcgagtatgtgtagggccggaaaatgtccttcaggcttctttgagttgggtctggatcctgaaccactaggttttaatccttgtcctcatcagagggacagacagtattgagtgacccaggggacaaagtcaacatggctgtgggcactggcaagagaggaggctctcaaataaggaaacaatggcatgaaaaagttttaacattatatatatatatatatatatatatatagttaatacacatgcttgtatgtttttgtgtatgttcatgtgtgtatgtgtatgtatataaaagcatcaaaattgatatatatcatagggaaaaccaaaacttggtaagatttcattttacccgttttacagtctaaaccttaaaactgcttgcaattttaattatcaatgaggaatggacataataatctgttcagtgctcaggggctctgaagcccttaaattcttgatgtaggaactctccctccaacccagagtgccagggttttgcttgccacctcttctgatctgtccttaccttctccgtgttttccattggtgaagatacatctatgtctcagctcaagccctgctcccattgcattggaacagtgtgtagctgtgcacactgtccacacttaagaaagggtgatgccagactcaaaaagccttggggaagagaaagctcatcccctttagatgaaagaaatcctggagtgaggccaggtggaatattctcaagtcattcctgatgtgtcatttgtctacagcagagcaaattatggctgccttttatgggcatttgaaaggccaaaggcagcgatccactctgagtatataccccaaagaattgaaagcagggtcttgaagagatatttacatagtcatgttcacagtagcattattcacaatagccaagaatgttgattgcaacccaacccaaatgttcattgacagatgagtggataaaatatggtatgtacatattctatacatatgtctacattaggctaaatgaattagccagtcataaaaagataaaaactgtaggattctagttgtatgaggtacctagagtagtcaaattcatagaaacagaaagtggaacagtgattgcttggggttgtgggaaggaggaaatggagagttattgcttaatggatgtggagtttcagctttgcaagataaaaagagctctgaagattgcacaacagtgtgagtgtacttaacactaccgaactgtacacttaaaaatggttaagatggtgaattttatgttatatgtattttaccacaattaaaaacaaacaaatcctaatgcccaggctgcaccacagaccaattaaatcagaatctctgtgggtggctttcagatatccttattttttcaatttccccaggctaagctaaggtggagaaccactggaccagaggcaggaaatgcaatcttgaggtggtagctgtaaaccaggggtgaaatgaaaagaatggaatcacagggaataaaacaaattggatggtttggacagtcagtcttcagcgatagatcagatatggaacgaaggaaagaagaaggaaaaagaaaaataatggatcaaagaagtttccaagggcctagactaaattgtggatttatggaaaaactgaatgtttattggtaggtgttgggagtgattatttattttagtttatggtaatgcaggtagaaatttcttagaggcagctggaaattttcattgccaaaattattcatgtatttcccttgtagaagccagagtttcattttacagtaaaaatgaacttttaaaaaaacatttgttcatttatttgtttctttttaagtgtttaattgttagaggcagctggaaattttcatactcaaaattattcatgcatttcccccatggaagccagagtttcattttacattaaaaattaacttttaaaaaatatttgttcacttatttgcttctttttaagcatttaacggacagataaagagtgaatacattaaaattatacaacatgatgatttgatataagtatacattgtaatgattatcataatcaaattaatgaacacattcatcaccacccatgctgtacattagatccccagaccttgttcatcttataaactgaaagttcgtgccttttgatcaacatcctcccactttctccagtcccctggccctggcaaccagcattttactctctgtttctatgagtttgagttttttagattctaaatataattggggttatgcagtatttgtctttctgtgtctggctcatttgacttagcataatgtcttccaggttcatccatgttgttgcaaatgacaggatttccttcttttttatggcagaataatattcgattgcatatatgtatctgtatccattcatctgttgatggatgcttaggttaatcccatatcttgggtattttgaataatgctgcattgaacatatgattgcagatatttttttgagccatcgatttcattttctttggatatttttatccaaaaaaccccaaaacaacaacaacaacaacaaaagaagaaaaattgcccagggagcattatatcttcaggagccaagaataaacctagtttcagagttccttttggcaaagccatgaagttggagagctttgtctgtggcaatccttctcttgctgtctcctacctgcctctgaatgttctgtgggcctccactttctcaggatcccattcaagtcacattgccctgttcctcctctctttctagaaattcctggtaaacaagtaaatcccatagtaaacaaatttgcgtgaaggcaatagaaactcccacactattttttctaagagcattcacatttttaaaataaatggaatgaagagatcaatacttattataaaataataaaactagaatggtgatatttcaggaaggagaaattttggataagattgccatttctggcctcttggaagcacctctgtaaatagttctgcttaggtgttcagacctgggtgggcaagaggggtattcagtgatttgcatggacccagagagtcagcagatgggtgctgggaggaggatactgagtcacatatgtggtctagacatatggatgatgggaaagaaaagtcatttatgacattaaatatatcaccttccagtgccactaaatcatgttttctgagcagagcagagtcacagctccctactttaccctgtggtattcagcaggccaaagatttaaggaaggacttaaaaagtgtcctttggatgccttcatcacagtgcctgaaattgcatgctgtgactacaagcctttgtcatgtttactgatatggtttgactctgtccccacccaaatctcaacttgaattgtatctcccagaattcccacgtgttgttggagggacccaggggggaggtaattgaattatgggggctggtctattcttgtgatcatgaataaatctcatgagatctgatgggtttatcaggggtttccacttttgcttcttcctcatttttctcttgctgccaccatgtaagaagtgccttttgtctcctgccatgattctgaggcctccccagccacgtggaactgtaagcccaattaaacctctttttgttcccagtttcggctgtctttatcagcagtgtgaaaactgtattagtctgtaatacagtaaattggtaccagcacagtgaggtgctgctggaaagatacccaaaaatgtggaagcaactttggaactgggtaacaggcagaggttggaatagtttggagggctcagaagacaagaaaatgttgggaagtttggaacctcctggagacttgttgaatggttttgacaaaaatgctgatagtggtatgaacaataaggtccatggtgcggtggtctcagatggagatgaggaacttgttgggaactggaacaaaggtgactcttgctatgttttagcgaagagactggtggcattttactcctgccctagagatctgtggagctttgaacttgaaagagatgatttagggtatctggtggaagaaattcctaagcagcaaagcattcaaaaggtgacttgggtgctgttaaaagcattctgttttaaaagggaaacagaggataaaagttcagaaaatttgcagcctgacaatgcagtagaaaagaaaaaccaattttttttttaaggtgaaatttaaggcggctgcagaaatttgcataagtagcaagtaacctgttaatcccctagaccatggggaaaatgtctccaggccatgtcagagaccttcatggcagcccttcccatcacaggcccgggggcccaggaggaaaaagtggttttgtgggccaggcccagggtccccatgctgtatacagcctagggacttggtgccctgtgtcccagccgctccagccttggctgaaaaaggccaacacagagctcgggctgcagcttcagagggtggaagccccaagccttggcagctgccatgtggtgttgagcctgtgggtgcacagaagtcaagaattgaggtttgggaacctccgcctagatttcagatgtatggaaatgcctggatgcccaggcagaagtttgctgcaggggcagggtcctcgtggagaacctctgctagggcagtgcggaagggaaatgtggggtttgagtcccctacacaaagtccctactgggacactgcctagtggagctgcgagaagaggaccaccatccttcagaccccagaatgtcccgtcagcttgcactgtgcacctggaaaagctgcagacactcaacgccagcctgtgaaagcagccaggagggaggctgtaccctgcaaagccacaggggtggaacttcccaagaccatgggaacccatctcttgcaacagtgtgacctggatgtgagacctggagtcaaaggaaatcattttggagctttaaaaattgactgccccattggatttaggacttgcatgggccctgtaacccctttgttttggccaatttctcccatttggaatggctgcatttacccaatacctgtacccccattgtatctaggaagtaactagcttgcttttgattttacaggctcataggtggaagggacttgccttgtctcagatgagactttggactgtggacttttgggttaatgctgaaatgagttaagactttgggggactgttgggaaggcatgattggttttgaaatgtgagaacatgagatttggaggggccaggggtggaatgatatggtttggctgtgtccccacccaaatctcaacttgaattatatctcccagaattcccacatgttgtgggaggaacccagggggaggcagttgaatcatgggagcttgtctttcccatgctattctcatgatagtatataagtctcacaggatctgatggatttatcaggggtttccacttttgtttctttctcagttttctcttgctaccaccatgtaagaagtgccttttgcaggcgcggtggctcatgcctgtaatcccagcactttgggaggctgaggcaggtggatcacgagatcaggagttcgagaccagcctgaccaacatggtgaaaccccatctctactaaaaatacaaaaattagctgggtgtggtggcagatgcctttaataccagctactcaggaggctgaggcaggagaattacttgaacccaggaggcagaagttgcagtgagctgagatcgcaccattacactccagcctgggcggtagagtgagactctgtctcaaaaaaaaaaaaaaaaaacaactgccttttgccttctgccatgattctgaggcctccccagccatgtggaactgtaagtccaattaaacctctttttgttcccagtttcaggtatgtctttatcagcagtgtgaaaatggactaatacatttactttggacaatttaagcaggaaagtccaggctactcctggaaatgacgataacaagaaagagacaaagcacctgaaaaagcatgtagagttgttgagcttttatctttctttctggttcagcatctggcatagtaggtgctagactgacacttgttgaatgaatggaggtatagtagaaatagcttctctgggattaattttatggtttgtagttttgttgcactatgtatgggtggcatgttgaaggaaaaccctgaaggcctagattccagtcccactttcgccactcattacttctgtgacattggcccagacactttgacttctctggatctcatttcctacttgtaaaacagggacaataatgctgtccttctcatgcacatggttgttatttgcattaaatgagataatgggcatgaaagcaatggaaaactcttaaggtactctacaaatatagaatataatcattttgaaagcacctgcctttgtagacaactgcgtgaactaatgtatattgatcaagacatgtgtctcgttaggtaaaaactgaaagtaaaactcatacacttaagatgtgaaaataaactcagcatctggcgtaacactaatttcaaaaagtagtatattaatttcaagtaggaaattaaaacaataaaactgtgatgtgaaaaatgttcaacattgatgcctctgacctacttctgatgtccaacatgtttacaattctcccgaagacatttctattaggttaaaacccattagtatttgtgaacaaacacagagtttctaccattcactgggcactattaggtactaggtgtccggggatatttctattgctgttcttagctctattgttggtttacttggccagtggttgctagctttgccagtgtgtgtgtgtttgtgtgtgtgtgttacttatcacaagtttcgttagcttgacaaagagctgtgtatattcatttacatgacaaatactttttttggattagcaactctaataagtacagggtatttagaaactgtgtgtgtgtttttctacctgcagtcgtagtcttaagtatgtttcttaatagctattgaacataagtttaatattagctggatgaataaagtattagttactgtattctcttaaaaatagacgtagctttgttacagcacagaaaactgagctgacctcttactagattggctaaaatgaattctgattaaacattttgtaatggtttataaagttcgcttctctacagtatattaaaagatttgtttaaatgttgactgtaagtttggtaaaaatgacaaagcggtaaaaatgacatttggtaaaaatgacaaggcttacactttttgatgatgttcattttccccaaaagtacagctaaagctttatccattataatgagagttcagaaaaggcaaatgaccacctctttttttaaaccaatatgtctttgtgcagtaattttcttgtggcaagtggcataatctgggcgaaggtagtgataaaactcagatatatttcaagaaagcgagtaaacacactaatgacaatattcgtatattacatgcatctgctgcttatgtacttaaaaaaactaaataggaaaatcttactcatctctgtagaaaaacagggtagagattacaacttggggacttcgtgatattttgtctgtgtgcagtttgtcaaaaggcaatttatctaaagctggaaaaggatatggtttggctgactaaactgtgtagtgatacgagtgatacgtaatgataaaaatgcttaggggaattttcggggcgctcaagtcaagtgtacagtgctgtgtgggtgtaaaaaccagacttctctctctgtgaaagttgctgacattttataccacatgctggaccgttaaatcacaatttacgtggtcacttgtaaatacgcctggtggtggagggcgagcttgtttgtgcacactttgacatgcttccctgttgtgtgcctctcccctttttaaattgcactggatacttttgttctggaatccttggctgtctaacctgaaagcagtttgggtgagaactctggaactgatttattttcataggtgctccctgaggggaggtttgaaggataatgcagaaaagcaagccttccaatcctccaactaaagttctctaacttgctattaacatgatttcaggcttgctagagtgcccgaaattctgacatgaagggattccttcttccaccactgggatttggaagtccctaggatgtttgaatggggcatattatttaaactcattttcagtctcctcattggtaaaatggggctactcatacttatcaaagagggtttttgtggagatcaaatgagacaatgcaagtcacttacttgatatatgcttaatagtgacaaacatagtgatatatatattaatagtgatagttattgcaatttttctttttgttagggggaagaggaggacaaacaggcctttaacatggtggagaatttgtttcccttccaaatacagttggaggattacagaattgatgctcaaagagaaggctttgctttcattgcttaagagggtttcttggagaggttcagcaagagaaacacaaaatgagatgtagaaaggggatggggaaggagactgcatactaatgtgtttcatttccaagtgctttaacttttctaagcactaagtcatctgctaacttgtcttcataatatatgggtaaagttggcagggtgggtatccctttctacgggtgaggaaactggagtgtggatagataaactcacctgttgtcacacaacaaatcagtggtacagttgggattaggacccatgtctcatactctgagcacagcagtctctctattaggtgacattctcagagttcaataatttctttcacagttttgtgttcagacctggggtccccattgctgagcctattattggcaccttacaaaatatcacatatgagaaaggttgtagtctcttggtccaaaggactactttcacctggagatggttggagttgtagtatctgagttagataagttttcacttcacggtcatgggtggaggtctttcttggacttgggccaggaagaatcactgaccaggaaggtcacacaaggcctgagtcctttctaacaccatctgtgcactgtatttcagggcctagtggctgcattgaaaggaatggaaagtagttgctggttatgttgagaaatatcaggaaagtgtgatgcctttctcctgtattccctcttccctccctcattttttcactttattgataaaaataatcccaaaagatcagagaggggttctataggtgttaaaccactgtgttatgacttgaactacaaagcccttgggggcattcaatttcctcatgttttggggtagcagcaaaatttaattttaggtagaaaagggttaacttaggggcaatgtaattcccaaattatcagtgtgaaaatcatctaactgtatgtgaaaaatccaataatgttaaaggtaattatctgggaaagtaaaaataatacacaggtctttggccagaaataaggatttggaacatttctctatgcatagagagttctctagtaggcaaatttagattcatgtcagtcattaaaggtccctgtgaagtatttagtttatcaatttagcgctacatttttctacaaagaagagttggagtggtttaggtaagaacacagatatgctaaaaccaaaccagatgaacccaagacagaaactagaaagaaggcagaaggagaggatgaaggtgtagcagtgagaagcctgttggaggaaagtttgagtcagtgaatgtaagcactttagcttccttgtggcctggagagcaggtattttttggctattttctttttttatacatgtatctccagcactagaagagtgcctgacctgtagttgctcaatcaatacttgctgaataaaaatatatgaaaatctgtcaaataaagggtttaaaaaagctggactaaaatgttgaaaatgattaaagctgggtgatgggttcatgggagtctactagactattctcctctacatttgtgtgtgattgagaaattttataacaaaagcttaaaaaaataacaaagaagactagacactgtaatcactggaaataaccagacattaaaaaatctttgtttccctttttgttacagggcaagcaagtaaaaagacattttatattactaaacactatcatatgctagacagtagtaaaactatagtccccaagtttatctttgaaggactccaatggcaagatttttaataaacaaagctgatcatctcatctgtatcattatttcttattatcactctattatcatggactcccaggaatcttggagatgaatttgttcacctcctctaagaggaatcatcatcattgtccactccctgtcagcacttttttttgagatggagttttactcttgttgtccaggttggagtgcaatggcatgatctgagctcactgcaacctctgcctccttggttcaagtgattctcctgcctcagcctcccgagtagctgggcctacaggcacgtgccaccacgcctggctaatttttgtacttttagtagagtcagggtttcaccatgttggccaggctggtcttgagctcttgacctcaggagatccgcccgcctcagactcccaaagtgctgggattacagatttgagccaccgcacccggcccactatttttttttttttttttttttttggagacagagtcttgctctttcaccaagactggagtgcagaggcacaatcttggcttactgcaaccttcaccccctgggttcaagcaattctcctgcctcagcctcctgagtagctgagattacaggcacttgccacaatgcctggctaatttttatattttctagtagagacggggttttgccacgttgaccaggcttgtcttgaactcctgagctcaagtgatactccagcctgggcctcttaaaatgctgggattacaggcatgagccactgtgcccgacccctgtcagcagttttgctcttcccctctctccctccaggccagaggccatgatctacatccaacttctctgcaaattcctgaactctgactcgattgtccctgtcaatcctgcctttgtgtcttccctttgaacctcactttctgattctcctggcttctcttcttgactgtcccttcttgtcttgccccgttcaggtgtaggaacctggcctcagtcctaatgaggctccttcaggatgcagcctctgtgagctgcttttggcttgtcatgtaacagctctggctaggactgtgctgtgtagggagtaccgtccaggcacccagggttgctggtcattactttcctcctggccccctgccctttgggtatgcatgacctgataaggagcttaaggaaacccacattaatagcactaaattaggctctatggaaagagaactccacagtcaggatctttgtgcactcaggacgggaagcatggacaccctggagagcatttgtattaacatgggcatttaaaaaggtcatacagcttggcgcagtggctcatgcctgtaatccccacactttgggaggctgagatgggaggattgcttgagcccaggaattcaagaccagcctgggcaacatagagagaccttgtctctaaaaaaagaaaaaagaaagaaatttactagatgtggtggtgcatacctgtagtcccagctacttggaggctgaggtggggaggatcactgaagcccaggagttcaaggctgcggtgtgccatgattacactactgtactccagcctgggtgacagagtgagaccctgtctctaaaataaataagtaagcaagtaagtaaataaataaagaaataaaatgttatacagttgcttctcattattcatggtagttatggtctgtaaagttgccatgaatactgaattagtgaatactgaaacatcccatctggggtaaatacagcttctggtcacaacagttcctcaactgatcaatacgtaatcttgttttatgtgtatttctatttaaaaagacgttattacttatgtattgttgatttattaacattgaacttagagcctacagcactattcctgaaaagttaattccagaatgaagctaatctaatatacatattttctcctgaggcacatttcagccttcttgcacttagaaacactagtcagaatgttagcactatacttggggtccattttaaacagtgaaatcagcaaaaaaagcacaaaaatgcaaaaaacgtagcacagcaaaaaggacacttgtttatactacaagagctgaaacaagaacacagtgtgttgctttgtttgacctcagctaggaatgtgtgcattgggtgactcaaattttatgcggctctgcgcatgtctgcaaatgtccacgaaagtgctgtattgatttgggggttataaaaaaattttagtgagcaagggaattcacaaatacagaatccataaataatgagaatcaactgtatctccattaagttagcatgatatgtcattatatttaataaaacaaaacatgcaatttactatatgtatgttataaaatatatgtagccatgtaaaatcgtggttcttaattccatatctttgagccaggatatctgagatgataaaattagatttctagatgagctataaaaatttaaaatatataatctcaggctttacatctttaggctgtagatgtttatctacttctgtatactttatatacatatgatatcatatattttaccacatgtataagtgtacaatcttaaatcttcctttattgcagtggaaaaagttgaactgagacaattttcagtgattatctgaaatatcatgtttatatttaaagaatatattaaaatctaaacactataaatctgacctaaaatattttttatttcctccttcaccttggtgaagagttgtgagcagaaggtatatattattattatcacaccataaaaactatttccaaatttacgtctccaatctcttcaaaggacagaaaactttcacatttaaaatactatgaagataaagtgccttagctttaagcaaaaaattaaccattccaagggcagtgatcatatggaatacattattaggagctttcccagagaaacaaaagagaatttagtcaaaattttggttcagcaaaacaagggataggaaaatgaaggtttcagaataggaaggcacactgaactctgcagctggagtttcctcagatgtatttctgtttccctagtctcgagagctgggcttttgcaactcactgttatagggtgattatatcattgtcacttcatcttccatgggtgcagcaggatggtggaattttgggggtggcatgttttcagtgcattgtggtcatgagaagagtccctctttagaaactactgatgcttgatgcagtggtagaaaaaactatccaggaagataaactagggcgatatataatcttttcccgctagccatccaaaattttcctaaatattacatagacaaggaaaataaagcattaaaagtccatctagatactaaggaggagtagggaaagacattacaaaacacaaaataactacagtcatgtgccaaataatgacatttgggtcaacaacagacctcatatacaacactggtcccatgagattataatggagctgaaaaattcctatcacctagtgatgtcgtagctatcatgatattgtagggcaatatattactcacgtgtttgtggtgatgctggtgtaaacaaacctaccatgctaccagtcatataaaagcacctataattatgtacagtacataatacttactaatgctaataaatgactgttactggtttacgtatttactatactatttatcgttatgttagagtgtactccttctacttatattttaaaaagttaattgtaaaacagcttcaggcaggtccttcaggaagtatccagaagaaggtgttgttatcataggagatgacggctcacacatgttactgcccctgaagacttcctttgggataagatatggatgtggaagacaatgatattgataatcctgactctgtgtaggccaaggctaatgtgtgcttttgtgttctggtttttaacaaaaatgtttacattaaaaaaattaaaaaacagaaaaaagcatatagaataaggatataaaggacgaatgttttgtacaactgtacaatgtgtttgtgttttaaaccaaatatttttataaaagtcaaaaaggctaaaaaatgaaagttataaagaaaaaagttacagtaaggtaaagtcaatttattattaaagaaagaaaaatcttttttataaatctagggttgcctaagtgtaggtgtttctaaagtctacagtagtgaacaatcattactaggccgtcacattcactccccactcactcaccgactcacccagagcaaattctggtcctgcaagctccattcatggtaagtgccctatacaggtgcaccatttttcatcttttatactgtgtttttactatcagcgatacatctctcatcccccagtgtgtggtcaggctcactgagcagattccactgaaaatagtcttcgttttgcacacttaaaaattctttccaaacaagtgtttctttttaacattcccaaagcagattgactttttgagttttgtattgcttccaactctctcaatgtcagaggcctcaaattaattccaacatccccttgctgttttcccttaagaagctgtgatggtgttgcattcactttggattcagtccatttgtgtttattggaaggccccttgaatcagcatttccactgctctcccacatttgtcatggtcctagaaatgcttatgattaggatggggatcttgatagtagtctccatcacctttacttcatcccatggttatgaacagttgtatccagttaaaataagaaagaagtcatgtggaaaaaagggggacaattgaatattattagagcctcaaggaaggaaggaaggccacagggtgaaaaccattgcatattaagtagctaagcctaatagaagccaaaggaaacagcagcaaactgttacagaaaattcttttgaactgccctccgcccactctctccccgctgctgttggtgacacgtggacagaaatccccctgcacgtagacacacatatgcctgccttgacttctgattgaccttatcccttgaacatcaggcttaggccactttcatggattctcatgtgaacgttcatgcctaatgcctgactgcatgccctccgcaccagccactaataagaagaaggaggcttcccctggccacccaagatgaggcagtgcccaccttccctcttgtcacattctattacatcatcacattttatttctctgcctaggacttaccactgtctcgtgtattcattagttgacttgtttattatctgtcttccccaaccagaatgtaattctgcggagaggctctgtctggtttagtgtaatctccaaggcctagcactgtccttggcatggagtagcccccaggaaatattcgttgactgactgactatgaaatggtggaagaggaactttgctccatgagttgtgagtgtatgcacagcacaggtgttcagagtgattttccctcccccacgttcactacaaaaagtaccctcagttacaggcccaggggtaatggcatcaccgcattgttgactcaacttgtaactgacttctagctctgtttctgacttagttttggcctttgggacaggtcaggagggtgcagcaaaaacaaatacaccagatgactagaagctgggatcttgggttgcaggcttggtttcagctctgactcactgtgtaaaccatgggtgactcacttaacctctctaattctgcttcttcatccatcaaatatagaggttagatagatgacacttcagatcccttgtaattcttccattctataatgttcccctttacctttctttaagtgtgagcacagcctagtctcttcatgcaggagtaaacgtacttacaaaatgtcctgcaacacttagggaaatgccaccacaaacattccgagagcagcattgctgtgaactgcaccactctccttttgttccattgaagatttcagaacacatgcttctttgctctgcactttaggaatctttgtacttgaagtggattatcctttatttttatatagcatttaatctgaggatatcaagatttatttgcaacctgccattgagtactattgttttttaaaaaatgaaaggatgacttgctgaaattataagaatcactcatactgtagttgtagctgtgtagctgttgatgctacacattggaaattcagttacaaaatagtgattgattgattgattgattgattgagatggggtctcgctctgtcacctaggctggagtgcaatggcacaatcttggctcactgcaacctccgcctcccaggttgaaacaattctcccacctcagcctcttgggtagctgggactaaaggcgtgcgccaccatgcggggctaatttttgtattttttagtagaaacggggtttcaccttgttggccagactgctctcgaactcctgacctcaagtgatctgcctgtctcggcctcccaaagtgctgggattacaggtgtgaaccatcacgcccagccaaatatttattttttaaattaatacatgcacagcagaattccatgataaacacctgcttattacatgaattaagtctatcacttgccaaaatgtctgagccccacaaatgactgggtctactgagtatgcttcccgacacttttatttttatttatttatttattttttgagatggagtctccttctgttacccaggctggagtgcagtggtgcaatctcactgcaacctccacctcctgggttcaagtgattctccagcctcagcctcccgagtaactgggcttacaggcgggtgccactacgcggggataatttttgtattttttgtagagacagggttccgccatattgcttgggctggtcttgaactcctgggcccaagcgatccgcccacctcagcctcccaaagtgctgggattacaggcgtgagccactgcccccggcgccaacactcatttgctcttcaaccaactgagatttgactctttctctttagtttgctgaatcttctgttgctttataatggctgttgccatctaaaatccaaacttacggtcgtgtgttaatttctatcttatttgatagattcacagcaggtttttgtgccttcttactaggtcccacttggcattcatgctgggttacacatctatgttctgtacactcttttctgtgtacctgggatgtgttctcaatctcatctgcctggcaaacccatttttgaagatactactcaaacatttcatcctctttgaagcctttctgacccactcttcctgtgctgggaacaactggcttctcttttctgaactaatgttatgccaataaacaccagagtaagggaatttattccatattccattatttctttttgcatgtctgtatcacctactgagaattcattgtggataatgattttctttttaatttttatattcttaggcattgcctagtgctctcaataagtatttgttgaataaataaatgaatgaattactgaaaatacagtgacttaatttctggccccaacacttacgttttagaaaggttttgatctctgcctgtgaaatgctctttgaaatggctttctgagtagtaatgggattggaagagttcggagaattccatgtatcctatggtgatgtctggagtgaaacatggtatgaatcaaattgcattttagtttaaattaactcatccaattaagagaagttaattagattaacctgccagcaagggattagaactggtattatgatgactagtttcttcctcataataatgaatgtgaaatttcactaatggagtgaaatttgtgcagccacccatggattgattgaattggcaaaaattcaaataagttaaaaaaatatggctctcattgcttttgactaatttataatttttaattgaaaaaatgatttattatcagtgttaaagaagacttaaagaaataaataaatcactgataaatctgtcatcctaagcagcagatgtttttgagttaaatataacttttgcatacatgtatatttttatatagttgtatcatggtatgtttttcatttttctataggcttcccatatgtgatcatctataatgaatgtatagcaatatttaccaaaatatattctacagaatgctattttcttgagatttaattgacattacttggggataataaaacatcactgaagtcaaataagtttgggaaattataaaagtaaacaaatttcttcactgtagtatttctgaaagcctataatattgtaaaatgcttttttaaaagatgaggatttgacacatattctccaaattaatatttacgtgaaatgttttctttttacactatgaaaaactgtcacactaaaaactgtttagaacatactttgggaatcagtgatgggtagaattctgtggtgctgcaataacctaatttactaccccattcctctactgttggacaaggatgttcaaacccaagtttcttaacgtggtcgacacatccatgtagggtctggtccctcttggcctcatctcccaccctcttcccccttgctcactgtgctcttaacaccttggtttccttcagtttctggaactcactaacctctccccccatgtcaggcagggcttttgcacatgctaatttgcctcttatagataatagtacttttttttttttgagatggagtctcactctgttacccagactggagtgcagtggcatgatctcggctctacaacctccgcctcccaggttcaggtgattctcctgcctcagcctcccaagtagctgggactacaggcatgcaccactacactcagctaatttttgtagttttagtagagatggggtttcaccatgttggttggccaggatggtctctatctcttgacctcgtgatccacccacctcagactcccaaagtgctgggattataggcatgagccaccatgcccactctgataaatagtacatttatcatgtttccttttatcgaattatttcccaacttactacccattttcaggagacataattagtaacataaagaaatctagtactattggtttcattttgaaccagcactgtgctgcatggcattttcctgtctttccagtaacagccaatcacagctcactattatggatgtcagcctcaacaaaaccaaaagagcaaggcacataatcgatcacaatgccaagaccagtgactttcagatcagttattctattctctctgtggatgagatccattgagggtcggccagatgtcttttttcaggggtttttcagaatatatgtttcatgttgttacacatcattgctcacaaggattttgctcagtgtgacaaggaagtggcagtttgcttgctccttccacactcttgaaggcctatggtgctctaaaggaagtgaagggtgactgttgacctagttagagcagcctcccaagaatgcaaaatgagacctgggggacacacatcctactctgtattttgcagctcatcagtaattttattaggaaagaagatgaaagtatagaaggaataattatcaaaaagtataagtgaccccaaatcatagagtaaggtttttggtctaacccattgattttacagatgaggaatggcagatccagggctgagaccacaacacaacttcaggaggaggcattcgcatagacaatgggatgaatggggccccctggagttgttcagtgggttagccctgttcagagaagttaagagacttgtccaaggtcactttgtaggtttagcctgctgttcttttgtgtttgatgatagaataggcatgaactagagaattacaatttggactggctacagtgatagtctaaaattagtgtaaagccaaaagtataaactcagtttaagttttgaaatgaattgactcaatcaaggtgggggacatattggcttgacagcatttaaattaaaaaagtctcagtgaggagttagttggccataagcactgtgttaggcaacctgaggtctgcagtggtaaagtgatttattggaatcctatgctggagtgatagagacagtgcatcccacacccctgtactgactaggacgcaactgaaattttgcactgagttcaaggagtcatattttttaaagggacaataataaatctttgatctccaaggtcatgtgcagggcacttagtaccaactcaatggatgtttattcagttagtttgttgctaaactaactatgctgtatgtaaagtgcctgacacatagtaggtgcccagaaatgttagtttttattctcttttccggaggaggacaatgagattgctatagattcttgcaaacatgctgactaaagaacccgtgaggaagttaggaattactgtgaatctttgagtcttctaacactgagagcctgattctctgctttatttaaataataataaacaggatttattattaagatctcattggaactgtagaaatgtcagtgagtctccctccctccctcactcccttcctctctttcttcctcccttcctcacttccttccttccttcctcattattgattatcctggcaatgtgttacactctgggaattcaaaaattagtgatttatgattactcttaagggacagacatggaaacaaacacattacaatatagtgtgatagttgcagcaatagaagcacgtggacagcacagatataataattcaattcaacacatacttgctgtgagaacttctatgtaccaggcactgtgctaagctctgagaatacagctgaacacaagacagacacatctcttggggggagatagacattaaataattaattacatatgtggaagtattccacaagctaccatgagaatgagggttgtgagaaaagaaaggcttcgctgaagaagtagtgtttgagctgaggctgaataaagtgtagagattggccaagcgtgaagggaggggaagagaatcccagcgagatgtcaccagtgaacttccctaaagccccgtcatcaagcttccctgaaatcgtttttgtaaagaacctttttttttttttttttttagagataaggtcttgctttattgcccaggctggagtgctgtggcatgatcagagttcactgtaacctcgaacttctgggctcaagcgatcctcctgcttcagcctcctgagtagctaggactacagccatgtaccaccatgcctgggtaattatctttttcttttccataaagacatgatttcactctgttgcccaggctggtctcaaactcctggcctcaagtgatcctcttgccttgatcttccaaagggctgggattacaggtatgagttaccacacctgctgatttccgtgaaatctaaatgttcttttgcaaagttcgtgtgtgaggatcacttcaagtttttctcatatttgctggagagagaaataatccaagatgcacatagaggtattatagtaaacttggagactcatgcttgttttggcagtgttggtgtgacttacagacaaaatagaaggtcttgtttgttatgaattaaagagtttggagcagatcttccacacttatatggagattcatttcttagggtgactttctctcaagggcttataaaattcatgtattctaagaaaatataatacattagcaggagtaagtgtaacattactttttgaaggaagagaaaggaaagaaggggcaaaggccttgttggggtcgggggagtgacctgaaattaaaggataatgaaggggaggccatggaataagataccacatttctctagactcaaactgtctagggctggccttgaggaatgggttaaaataaaatatagaaaaaaaagagaaaatattggaaaccaaaatgatttacatgggtgctctgaattcatgaatcatctacagagaagtaagagtgaaaaatcttccttgaaaaacccactcagtgacacttctctgaccaccctctcctggatgatgttaatcgccttttcttctgtactatctcacttctttgtattcatctcaaattttgcaaatgttacctactgtgttatatggtttgctcgtagtttttgtcttttattcatctctaaactgcttgagattggatttattctctcatgattctcggcacctagctcagtacctgagatttggtactttttttgggtgaattaacgagcaattttgagggaatggaagagagaagaatgatttagatagaggttagacaaaaattaaaatgttgtggaggacagatagggaatgaagtgtcaagataaaagagctatgacaacaaagggggcctgacgcagtttgggccctcaggaggtctctgagggagtgctgttgagttgagatctgaaagacgatcaggcatgtactaaaccaggagaggaaacctaagggagcaacccaaacaagtctcctggataatgatggaagtgagttaagagctagatggaaggtaaaatcaataaggctttattactcattcaacagatgctatattccttacatccctctagctctggagacacagtggcaaatgagcaagtccagcattcaaaggacttacattttagtagagagagatagataaacaaacatgcaatcattatttgttgatggtgccagagataattgacaaggatggcttccagctttctaaattgggcaactgatggatgctgggctatttgcagagacaggaaatgctgaaggaggaccaggtctgtccaggcagggtatggattccattttggacatactgtttaagtggctttgagatgaacaaatggattccaagtagtcagttgtatatgtgggcttgggtttgaagttgtctgggcctgagacacacatctgggagtcagtaacgtatagatggtaattaaaaccatgggggtaggaagagctatccttacaaccactcaaaccaggcacttcaattcatggagagccgttcacatagactgtggtctgaatagtgtctcctgcatttatacagagtggtgaccatgggtgtggacaagatgacctagtgaaaaaatatggagtgagaagaaaagtgagtttctaggactaaatcttcaattacttcaacatttaaaggcccggctaagaggaaagagttcttaagggagagtgtggtggagcagcagagttgggaggaaaaccaggagcgtaatgtcagtgaaacccaaggaagagagagctttgaggaggaatcggatagcagggtcaactgctgctgagaaatctagtaagatacgaactggacacatgtcatctcagctcattggtggcctcagtaaaagcagttttgcaggagtgataaaagtggaataatatggccagattggaataggttgagaaatgagtaggaggtgaagacatgtagacagctgatgtgtcctataacatgacatttgaagaatgtcctcacccagccatgtgggatgagccccaagttgaggcaattcagctcagatggaagtggtaatcttgcaagaaacccaatttggagttgtcgggcttagaagtgattagggctctgagaaatagatttttcttttttcacttcctctgccattttattctctcaaatatgacattgattagaatgccagtgtttgaggtgatgacaagagagtgtttttggaatagggactggaatttccagcacacacattgagttgattctactgttatatttgaatagcactaataaattgggaaaacatggtgcagaccacacacaactgttggaatgtcctccactgatgtaaagattatatgattatattccccagacccttgcatttaaatacaccctactcttcttgcccagtctgtccattggcctttaaggaaataccaatcttgtaatcactctcagcttatgatgtttctcggcctcttcaatggcatgtgggaattagtgtttcctgggtgaaggttaatttgggggaagagtctagataactcagtggctttaggactcatttgttgggaccagaggtcccacatttgcccttgaccttatgggatctgtgggttgtcttttccctttgttgtgggactgccatccaagaacctgttctctgtatctatagcatggagctgtcctccagagtgctctttagaaagagctccaataattgggaattatgcaaatttagaaaagggtatttcaagtctattttcagtcatttcccaagatatttaaaagtatagtatagagaaaaatcgttttgcatttcatataggcttgggatagcccattgtcaaaattcagtgcatgtcacaatgtaattcactggaggaaaatatgctatcaacaggatttccaagcaaaaagcctggcactaattattgccctctctttagtgtctttaactgccagatctaacatgtgttaaccttatacagcatagttgtaacaccaaaggttagtctctcattcatacaaaatttgtgtgagcttaggaattcaccactaagcacatctaagcaatgttaaaagagtgggcatatattcactattctgatataactgcacacagagttggtaacttgaaaagtgaagaatatataatataaatggtaatgtgaaacaaaaaattctactgaagtttatagaatgcaggtgtacctatcaacatcacctgtattcagccatttaaaaatctctcattttacacacacacacacacacacacacacacacacacacacatctttgctctaatcaaatatttccacttaaaattcaaatgtttccttgaaggaagatattgtactgtttcaaagtagagttagagtcaatacagtctttagttttacacacaggttcactggaggctgttctgcctcggtagcagtcactcagtttgaaataaattagtgtttggaggccgggcgcggtagctcatgcctgtaatcccagcactttgttaggccgaggtgggcggatcacctgaggtcgggagttcgagaccagcctgaccaacatggagaaacccccgtctctactaaaaatacaaaattagccgggcatggtggcacatgcctgtaatcccagctactagggaggctaaggcaggagaattgcttgaacctgggaggcagaagttgcggtgagccgagattgtgccattgcactccagcctgggcaacaagagtgaaactctgtctcaaaaaaaaaaaaaaaaaaaaattagtgtttggaaaagctgtggggtggaacaccttcttactctttgggagcaactgggaaactaaagagaaagagatatgtcttgtcttgaaggaaacttgttgacaattgcttaatagaatgatgataactgaaaaaaatatgtattcgttttttagtctctgaacattcccatctattttgtgttggataggaacatctaataggaacatccactagtagatagaaacatctgctatgtgttcctacctgtgttctctatttgaagttggagatctctcaagaacaagtattctttcaggaaagtaccactgctatcagtagtccttttttataattttttttttgttttattcatgttttcagtgtcacttttacaatgtactcctcttgtattctttctttgaatggtcagatgtcaagcactgtaggagttttggggcaggaaactggtctgctaaatctgtgaactattgcaggtcactgctgctgtgatactttgggaatgaagtcccaatgatacctctaaacagtcacagctgtttgagctctctcagctactgcaaataattcactgacctgcacagttagaactatcaagagttttttaaaagcaatgttgcctgcatagaattgagaagttgtagaagaaaagagagaaggcctattcaatattttaaagatttattatgtttttctgattataaaagtgatactggctgattacagacaacttggaaaagacatattaaatattaaaagaaaaatgttctatttatggagcgtttggatactatgtttttgatgttgtgcatgtgttcttggggacttgacttcatgtcaataaaggacagcagcatctcataatgccactgccattggccttgcacctctgctctgattttctttcctttcacaacatcataaacaaaaccacatgttacttgtgtggtcaagttaaaggaaagaatatctcaccaaaatgaaagaactacaagtgaaaaaaataaacccagccctatggttttcctttgctcactgttatgtttcttgtaggaggcttgaagcggcaaatgtgagccagtggtcatagcttgagctatctgttttctgtatgcactgcatccaaggctggctttcaactcactaaagaaaatttatcccaaacaacaggactttgattttccaagctccttttcaaactcagcttggctttattgatgttgaatatatttattcatggtgtttgcactagtcttggagctgtctgtgtgagtagacctgactacatattgaattatacattattcatttgctataatttctttgacagccattttctccttctaaattctgttgtagaatgcaggtgtacctatcaacatcacctgccttcatccatgtttaaatctctcttgtcttatgcacacacacacacacacacacatacccctttgctctaatcaaggatttccttttaaaaattcaaatgtctgggcaaggacttcatgactaaaacaccaaaagcaatcgtaacaaaagccaaaattgacaaatgggatccaattaaactaaagagcttctgcatggcaaaagaaactaccatcagactgaacaggcaacctacagaatgggagaacatttttgcaatctacccatctgacaaagggctaatatccagaatctacaaagaacttaaacaaatttacaagaaaaaatcaaacaaccccatcaaaaagtaggtgaagaatatgaacagactcttctcaaaagaagacatttatgcagccaacagacacatgaaaaaatgctcttcatcactagtcatcagagaaatgcaaatcaaaaccacaatgagataccatctcacaccagtcagaatggtgatcattaaaaagtcaggaaacaacagatgctgcagaggatgtggagaaataggaacgtttttacactgttgatgggtgtgtaaactagttcaaccattgtggaagacagtgtggcgactcctcaaggatctagaactagaaataccatttgacccagcaatcccattactgggtgtatacccaaaggagtataaattatgctactatgaagacacatgcacacatatgtttattgcgacactattcacaataggaaagacttggaatcaacccaaatatccatcaataatagactgaattaagaaaatgtggcacatatacaccatggaatactatgcagccataaaaaaggatgagttcatgtcctttgcagggacatggatgacgctagaatccatcattctcagcaaactatcacaaggacagaaaaccaaacaccacatgttcttactcataggtgggaattgaacaatgagaacacttggacacagggtgcggaacatcacacaccagggcctgtcaaggggtgggagcctgggggagggatagcattaggagaaatacctaatgtaaatgacgagttgatgggtgcagcaaaccaacatggcacatgtatacctatataacaaacctgcatgttgtgcacatgtaccctagaacttaaagtataataaaaaaattcaaatgtctccttgagaatggtggctttctaagggaactaggagttttctaataaatggctaaaagagagacattcatggaatgatgtagaggatatatttttgagagtggagtataaaaatcagcatgaagcataggagatagaaacgggaagtagtagcatgtcaaaggcaagcctccattcatttaaaccagcacctagatcaagaaagagaccatcgccagagccccaggaggcctcctgcaaacctccttcttatcattaactcatcaaaagtaacttttaccctcacttctaataccacaggttggttttaagtgtctgctgggttctgctgtgatgacaaagaacccagttttcagtggtttatattctgttttggatgctggtatcgggatactgcacactcaatttcagctttgcctgccgtgcctatgtcaggttctgcatatagaggggactggggggagcctgcaagcctagagggaaaggaggacttgcttcctcctagccacttgctattcttctgggcattagtctagtaatccttctatattgtggtgatggcagttccttgctcttgcagcagctgaatccagtttgtagttcttcctaaacttgtgggtctggcttcatggcatccccatagagcactagctgagcagcaccacctccttagagctctgggtttcagccccatggggcctctcttccacgtttggagaccccagcaacaaacggtcacaggtctcctccaaaagtttcctttgttcacatagacctacctccttgatgcctaagagttctctttttaccctagctttacaaactcagctttgtgcctagttgacacatttttaatgtgaaaagatctctattcaaatagctggtaagatttctgccttttaagtaataaatttagatttcttttatcttttttgctttcactatgtagacactcatttctcatacccctattctactaatatagttggaccatttattcatttacctaaaatattgagcactaactttgaccagtttaatcaaattgtcttccaagaatacactagttttataaaccttctttccttatgctcacaaaagttaaatattctctcaattcattttcttgaagaagtatcttctggaacctaagaccagctccaggctgagcagggtctactgcatagctgtttccttataaatcttcatttatcaccgttttggagattccttctcttgtatggggtaacttgttatctagagctcatgttttctctttcttgctttgttcccttgttttgccagagcacaccttctggtagcttttgaagaaagagtgcatgggagaaaaaaatgttttgagatatttttcatgtaaacctctcaaagtataaaattcaaggctagaaattgttttctgtcaattgtaaagtgaatgcttcattgttttcttgcctctggtttctctgttgagaagtttattgtccttttgactactcctttttatgaaaatttttgtttctctatgttttcaggatcctcaatattggaaatcttcacaattatgtatatattggtgtgtgtatgctttcagccattgtactggacactcagtgggctcttttgatgaggaaactcctgtctttcattttcaggaaattttcttgaattatgttgctgataattttttcttgttttttttttttttcctctagattatatgtatattgaacttcctagactgattctccagttttcttaggttttctctcccattctccatctggtttttcttcttccttttcttttttccccataagtgcgatattctcctttatctctctgaagttattactgatagattttttgaagcttttttccccctacacactctgtttcctccaaggtgcttttttctttttgtttatttggtatttgtctttcataatagaagttttcctcgtatatcttatatccttaattgcctgttcatatgctaaaatgggacatagaaagcctattgaaaaccttgtgtgtgtatatgtgatacacttgagggtggtttggctagaatattcttttggataaatttctgatgctcataactttagtttctttttctcttgggctggttggattcctagagaagactcttccaacctactgccagagggtagaagcctgtcagtgttatgggagctgagtgagaaaataagcctgggggtctcaatatcttgcattttacttcatccacctgttttcaatatgatacatccacactcattagtgtttattgtcttgcaatccagagaccttctttttaccctctctagagaataaacctttgtcatctagtagggagagtaggaatttgaagacttttaagcaaaccaattttagcctaatattattctctctttcctgagatacctgaggttctgaggtaggaattgggttgcttctgggccttccctgatgtagataaggatttagctttctttgtactgtgatgtcagttaccactttttcatcagctaacttccaaaaattattttttttgctattgtagcgtctcccatcttcacatttgtccttatgggcttatgcctttaagcaaatctctgtactggcatttcattacagttttgggatggagaagaatctgaagtgtgagtccagtctaccatttttaacagaaaatctttgagatttcatggacgttcccctccacttttttttttttttttttttttttttgctaggctgacactatgttgtgcactctaacacagggacattgatgttgcatgcgcatgttttcaccttagcatgaatcattttcaactggcttcttacttcagtccctcaaaccaatatgttcttttttttttttgagatggagtcttgctcttgtcacccaggctggagtgcaggcgatctcggctcactgcaagctccgcctcccaggttcacgccattcttctgcctcagcctcctgagtagctgggactacaggtgcccaccaccatgcccggctaatttttgtatttttttttttagtagaaatggggtttcaccgtgttagccaggatggtctcgatttcctgaccttgtgatctgcctgcctcagcctcccaatatattctagttgagtcactccacttatctttcagacataaccctacaagtctgaattctaaccctggacacagctcaggctcaaaccagaattcttttctctcacgatagccttctctttcactagaggagtcagaggtgggctgttcaaattggttctggtgttacactgttgactcattaatagaagcatgttttccctagtgtgattgttaaaatcctagttataaggcactcactttgcatataattgcatattttggtactcagtagtaggaaactggttgaggatattctgatattctagaacatttgtttcaaaagataccttgctatgatagaggcatcacatgcaatactatagctataaatatagttattttctgaattgtctttttagagaaacatactggctgataggaaatttttaccttggatggctggttatataatgtcatattaacaaaacaaataatatctagagaaatctgtataatcttataaaaattatgatgatcaactctagtacttccagcctgcagaaatcttggtcctttgtatgacatgaagttgccaaaaagatacttagagtggtttcatcttaatattttcatatgtacatcaaaggaatatgaatgcttccaagatgttagtctgttttgttgaatttcacagctttgcatcccgagtcaggaagctgtcatggcgttgtgctggtacaccagtgcggatgccagcatgtgcatatgctgacacatatgctaaaccaggagtcaagactccagcactcagatgaatgttagacatctctcatctaaattcagagccaaggaggtccgtgtaggcaggctttccctaagcttcccttctggctatgatttgaaattaatcattttaatcataggttaacatcagggtccatgtagttaaaacatgagacttgacaaattttcatagcctaaggctacagtctttattgccagagcagtaagccatggaacatagtcattgtggtaggaaagatttttgtctgtctgacgtctttgtgggtatcattacttcccagttctcaggtatgggtattctgatggggctatctacaacctttggatccagaggcaggcacatgacccaagcctggaccatcaaagtgctcatggagttgatggcagtgatggctcaggagccagcacctgactcagcaggcttgtctgagcctgcccatgagctctttctggagctgtctggaataaagtgccatctctttgctaggctggttggctgtaaggacagcatgtctaaagctgctgctggtcatctttgctactcctgggagagagtttgagaaacaagttagtacagagaaagcagaaccaagggatggaggaaaggaggcagattccagatgatattctttgtaccccaggaatatctcaaatcaggaatgcccctggactttctaattttgagagtccaataaattctgtttttggaaagctggtttaattggattctatacctgcaattgaaggagactgactaatatggttatattggtcttcaccaactgtaatttttctgtaaactacgtatactggtcagattttagatggcaatcaagttgaattatccaaccgagctgtctgtattgatgagcttaactcagtattttctaaatctctactttgtacagtgtagacacctctaaacaagtaataacaaactgatattcaagcgcaagtggtccactctgactaattgtccacctctcagggtttagagacatcccttgtaaatgattatggaattacctatttcacagagacactgtggtaattatttcaaataagtcctttaggacccttgaatatacttttttttttttttgagacggaatcttgctctgtcgcccaggctggagtgcagtggtgccatcttggctcactgcaagctccgcctcccaggttcatgccatcttcctgcctcagcctcccgagtagctgggactacaggtgcccaccaccatgcccggctaatttttttgtgtttttagtagagaagagatttcaccgtgctagccaggatggtctcgatctcctgacctcgtgatccgcccacctcggcctcccaaagtgctgggattacaggcatgagccaccgtgcctggccgaatagacttaattgtaatagcaaaagttattttattgtcattataggacgcctgttaatttctctattgatcagaatgtagtaagaattttctcaaacttatctaactctaaacagatggatctaaatatatttttttcagtataaagtctgagaaaaattcagataggattattctattgtgtgttcaagttacaaatatggctgatttatgaaatgttgacagctagtattctagggttttagcctggcaattcttaaaatatttaaggaaaagagttttaaaaaataaatccaatattaaatgatgtaacataacacattgttaataagagacgttagggtctccaaagaatatgcatacaaaagaatcaaatatatttcatatattaattgacttgctaaatcctcttccaatctctctctttctctctctctctctctctctctctttctttctttctttcttttctttctttctttctttcttctgacagagttttgctcttgttgcccaggctggagtgcaatggcgtgctctcagctcactgcaaactccgcctcctggattcaagcaattctcctgcctcagcctcccgagtagctgggattacaagtgcctgctaccacgcctggctaatttttatattttttggcagagacagggcttcaccatgttggccaggctggtcttgaactcctgacctcaggtgacccaccccggcctcccaaagtgctgggattacaggcatgagccaccatgcccagcacagtctctctttctatataacacatactagagctctttcttgtctacattaagttggtcctctgtcctctcaccctattattcttttgtaaagacagctttgttgagatagaatttatgtatcataaaattcacccatttatgatatacaattcaatgattttgattccattattattatacagaaaataagctacactgtttattttcttaattgcacatatcaaaatttgtagttacctatttacttgtttatttattgtttatgcaacataatcccaattttgtgagaaaaaaaatactgtgtgcactggacagacaaagatcaaaagaaatacaggattatggagaattttattttctttcttgaaattttctgtgttttccaaaatttctccaatgagcatcatttctttttatcagaaaatatacattactttaaaaatgatctttaagtacaacaatgtgggtgaatcttagcaatataatattaagctaaaagacgttccaaaagaacacacacaaaacgctatacttttatatgtcatacgttgttttatatgtcaaaaccaaccaaaatgaaaatactattttatttatttatttatttatttcgagatggagtttcgctcttgttgcccaggctggagtgcaatagtaccattttggctcactgcaacctctgcctcctgggttcaagcgattctcctgcctcagcctccggagtaactgggattacaggcatgcaccaccacaccggctaatttttgtatttttttttttttgtagagacggggtttcaccatgttggccaggctggttgtgaactcctgacctcaggtgatccgcccaccttggcctcccaaagtgctgggattacaggcgtgagccaccgcgcctggctgaaaatattattattttttgaataaatataaatgcaataaaacttacatcacaaaaagcaagggagtactgaacataggatttagaatgactgttatttcacatgggtagagccaagtgaatggaatcgaggaaccatataattaggcagaggttattgttaagaatctagtttttgttttatgagttcttgtaatattaaaatagaagatagataaatagatacagtccatattttataaacatattgtctccttattcgagtcgactgtcttgtgggttatagcagtttttgcaagtagattctgtcactaaaatgtgctggtgtcaccagggccagcaccacccaatgatatctctgtgtcctccttcccctgggaagaggaatgtgagatggggtacggcccaggcatgtggcatcccagcctgcaactgtgctgctgattgggtgtccatctgatcggctaaagccctgccttggttgttcagtgttttcagcatttttcccagcatgggcaaagccaccaagctcattcattaccaggccaatcagccgtatccacatgtagcagcacacccaccatcaacttgtactaagggcaatgattgcaaagagggggagaaaaggagatgattgtaggtgcatggacatagcaccttttctgatggtcagttcgatttcagtgtgaagaatttatttatttatttatttatttatttatttatttatttatttatttatttttgagacggagtctcactctgtcgcccaggctggagtgcagtggcgtgatctcggctcactgcaagctccacctcccgggttcacgccattctcctgcctcagcctccagagtagctgggactacaggcgcccgccaccatgcccagctaattttttgtgtttttagtagagatggggtttcaccacattagccaggatggtctcgatttcctgacctcgagatctgcctgccttggcctcccaaagtgctgggattttaagtcagaaactgcctcgacgttttgtggtgctcctgacgtctgcacagccctacttgcacagtctttcctgatgtcatcacgtcttgcctctgctactcatttgagacacataccttagatgaaaaggatttctgaagagaagaagtagaaagatgccctttaataaatccttccaattatagaaccaggtgtctggaatagtcctcagagaactccccactcctctcttcactacagaggcataagacgcaggccctgagggattgaatgtctcggcaccacccagccgatcctcccacaccgggaggtcacctggcctctgaccccctggctcccttcccagccccctttcactacaccatacttgtggcatgttctacctgtagagaaatgtggtttataacctccccagttatcatttatttcatggcttttacactgcctaatttaaaaaagaatttaaaatattttaccaagttatgataccctaaaatatagaataaaatctcaaaagggcagaaaccacttggaggtaagagcctgggctgacttggtttctgtggtggagccttgtgggtgtcccagtctccaaggaagtgaaagtttgggagtatcttcatccatgtgtcaaaaaatagtgaaagcctgcagaagcacaaattcagcaaaagctcacttcacctaacagaaatactactgaaaaatcacttaatgtcaaaacaaatcctgtgttgtattggatatatatctaaggtctgcagacttggagaagataagtcatgtttgattttctgaaacctttgcagcttgaggggccagggtgccgggagcacctgacagggaagtccttgtcatacatgctaagaataaagcccccttccttttagaggctagccctagtggaaccggttccactccctcctttcctgttttattgattgattgattgtttgattgattgatttagagacacacctcattctgtcacccaggatggtgtgcagtggtgcgatctcagctcactgcaatttctgcctcctgggttcaagtgattctcgtacctcagcctcttgagtagctgggattaggtgtgtgccaccgcccaggtaatttttgtatttctagtagagacgaggtttcaccatgttgaccaggctggtcttgactcttggcctcaactgatccgcctacctcggcctcccaaagtgctgggattacaggcgtgagccaccgcgcccgaccccctcccctgccctgttgacacttaactgcaaacctgggagagaaaggcagaaaggaaggaagtgtatgtctggagttaactagataaaactacaagaggtactggtaagtggtggaaacaggtgtttggttataaagagtggtatctgctgttgtgctgggtttcacgtgatttatgttttctctggtgagccccgctagtatgaagacagtagggctttgctagaactggtgtgttctcggggtagtaatggtctcttactggagtcccaggaatctctgggtctcttccttttttaataacaagagctattccaataacctttttgaccctgtgatgttcatagatagtattagctttttggtttaattcttcaagataaagtttacaccctaacaggatcctttgggggtgttattccaaaggggagtgtgatgtgtgaatttcaggctgtttcaggataacgaagaaagcagtttgtggagaagggactttgaagccacagcacacacttcccagcttcttccacttttgcagaaagcattcttgggggtgggatgtggatggtgtgtgttcttacataaggtggtcttgttactgagagtgcaggaagttcctttgtttcttggtttgtggtctttagtaacgataactttaggtgaatggaacctttctgtacattttcagaaatctccaacgtttggatcatgccaggatgttaactttttacaggccgaagctgaacggcctgttatgagggagccccaaaatatgtaacatcattacctctgttaacaccagtttgtcagcctctagacccactgttcacagtggcatcaatcctggagaagatccacaccttagaatggttttgtttggttgccctgttgggaccttcactgagtcttacccaggggttcttatagtgtgtctgaggtgtgttccccaactggccctgggtgcagaaattatatttgcagccagataacttataatttgctacatatggccagtcttttttagcagttttctttcttttgcattttgccacacccactcccaatttactgttagcagccctcctggtaccttctcaccacaagggacttatattagatatctgtaggctccgagacagagagagagagattgagagtgagagagcccaatcacattgcttgcctcctgttttattttaatatcattattttttacattactgttccttgacccttgtacattaaacattaaatagaagtcaaggttatagtcatggggccagagagaggaatctaccttccttgatgactctaggctggaacaggattgaagggagcacaggagtggctagggctacagtctgtgcttctacagagaagcatgtggaacagaaggttgaggtgagaggccgagtggcacagatgaaagagcatgttattttggagttggacagaccttaactagaatgctaacttggccactggtcagctatgtggtcttgggcaaattacctggcacttccaaacttcagtgacctttgccttatctgtaaactggacttgcaagattgttatggtaatcaagtggaataataggtagtaagtacttattgtcccatataaggcatttcataaatattattttctctttcttttcattacgagggaatgagaaaaaaagccaaagacatgaaaatccccatgttctattaataacagcttccatttttctttctcatatttttataatgctttaaactatgtgggtaattgtttcagcatttaatctttccactgaattacttaattacatttatgacaaccacattttaattttgagtacatcgatggaactattaatttattctaatgaatttacaacatggctggaatttttttcaccattaattttgtggtgatagaaaactatgctgcctgccatagatttatcttgctttaatcatattttaatcaaatcaaattccttaaaagtctagataagggtccccctagaggaaaggagtaagaagattttctctgaaaagcatatttaagcctgatggtttatcagcttggttgactcccacttctgctctcaagtgttagcagaggaaacttggtggacatttttttggaggggttgggaactcgggaggaacatttttctggaggggttggaggcttgggaggaatgcatagtggtggaggagaataaatgagattagaaatttctttttccaaagaaagcggccattctgcacatctggagagggtgccgtcatttgtttggttcccagatgctttgcagtccacacttctgggaagacccctgcctgccaagtcatcattgccttcaaagggatttctttctcagcaaggtgataacgttcactgccatagcctcccctgattaatgctttaagattgattgctggtccagcctggcagacgggcgctgaatttcccatttagtactctcaggttttaaacattcaaaatggcagtaaataaaacacatgcctttcaacatccctttttcccctcagctcacagcttgggagtttaggttaactttttgttataacaggcgtttgagatgaacaaggaaagctccctaacagttctttctgtgatttgtttcttattaaattaaaaaatttgtcatttatttattggagaggagggaagaggtttggccatggacactagttgcaaaaacgaattgtaagcacaggtagtggcagattaaaaacactttagcaattagtattttccacttgatggtttaaaactgaaaaaaaaattatctccaactgctgctaatattacagcttaagaacaggctgatagatcttgcatacgaaacatctcactctgggaaaatcttcacccttctcattcttagttataataagacaaggcaatagcctttttagtttgtgtgtactgatatgaatttctccatgaaaaatttatggaagctactaaataaacacatggagagctataagaaccctaaccctatgaaacacacaatttagatccacctatcatgtaaattaaacattcgtcagaagaaacagttagaggtgtgttagagctttaaataggactgtttatattaggatgagataaagactgacattccaaagttattaaccaacatgtgtctccccttctatggaatttgcctaataagaatttttttaaaaaattcaatattattttgaattaacaaatcttaattgtatatatttatggggtacattgtgatgttttgatatatgcatacaatgtggaatggttaaatcaagctaattagcatatctatcacctcaggtacttaccatattttgtgcagagatatttaaaatttactgtcttagttcttttgggatatgtaatacattatcattgaatatagtcatcctgctgtgcaatagacctcaaaaacttattcctcctgtctaactcaaactttgtcctccttgactaacaactccttgtttcccattcacccccccagccctcaacctctgattatcatcatctgataagaatgttttgacacttagaatttgaagaggtaatttgaatgacatgaagacttttcataattgttaatgttttatcataaatgcatcatttcattacatatatgatttcaaaggctttgtcatattctttaatctagttatatgtcttatgcacagatgtttattttatgggagtgtaacttaatgaaagctaagggcaaatataatttcatttatagaaatttactttccctaacaacattgagttatacttccataaattttattccctctcaactagggagggaggatgtggaaaacaaaacaaaacaattctggccttctaagttcttgaagatcaaagctgccatcttgaggagtgtctcctctcaactcaaacaagtggggacccttccagctgaggcccaggacacctttgtttgtcctagaatactcttctttgattctgccctgaggctacatctggggcactctaactgcccccttcagtctgtccccaagctacagggcaaaatcccatgggatccatggtgaaaccctaggctgggagataagactgcaacatgcaaaacagtcttctcagatcacattatgcctgaacacctgagcacttggggaaagaacaaagtaaaaagctagcatgaaggcagtttacatcagggtaaagcttccagaatatatttcaagtcagcctgagcaatcaaagtgattggaaccactaaaataatttatgtcttcataggagttttcttgaaaagcagaagttccaaaagcaatgctgaaggcagtctagtgtgccggatgattctctggacacattgtaaaacaccacaagcagttagtgcaagggtgtgaaacacagcaccttttttgagttatatctggccgtttaaaagcatgattttgggaggaaagagagaagaggggatcaaaatgttttccctccttttttcagtgggagagcagagaagaaatgttggtcaagatgcccatggatggaagaaaaggtggtgggtggggggcagtggttaaggacatagaggggcaactgccttgagaaaagggaaacttagatggaaaaattaaaacttgaacttctgggggaacttactttgttttttaatctttgtgtgactttctcccataagcctacccatttcccgaagtgatttgagatggattgttttcatccaggccagtcttggaatagggatgcccagcagggcccagggtctggcaccctctccttggccttaaggccagatacctggggtaagtgttgagtccaggccagaggtaggggtgaggtagggggagaagggatggtaacacctgctggtgctaaaggctctcatctactggccccatagagtttgtgtgtctgtttgcacacatgatgtgtgcacatacatgtgtatgtgtagggtggctggtgggaaccaactccttcattcctccacatgttctcccggggctctaggctgccattttggagaaagactcacctgtatttgttcttcctccactgaggaacacctctgccttcggtttattgctgttttctctggttacaattttggttccattgaataacattggccttaatgttcatttacatgagattttgcctgtatttgcctgcacatgtgtgtgagtgtggggggcacacatatatgtatttgcctttgtatcaggggaggtgcacctagtgattccctctgcattctacacctgtgagagaagatcccagctgtttcccagcttaaatttagcagggaggtaaatggaccctctgtgggtttagataaggtgtatggtcaagcagatgttgtttttccttttataacttgccaccgaccttctcattaggggctggaataaagtcatgagattatagtcttatgttgctaagaaggggaaacataacaaatctactagcattaatttatataccacgttgactcaataaaaatctttgtagatcttgaaccttaatcaaaggaataactcttatggtggaaaagttaggctaggtggagagcattcagtgtccttcagtcatacatagtagttatcacttgctgatcccaggaaaccggtaatgctttagagagaatggttgtcatggtgagtttgaattacctgtagctattcagatgagtatttggatagatagttaggagagtacagttctggagcttgagaaggcagatgagggccagaggtgtgaatttgggggccattggtctgtgggtgatgatgaagcaatgaacatttgcaagattacagagggagaaatgagaggagaagctgcctacagtgagctgggatagaagcgtgggctgcacggatgcagggacccatgctctttgtgacttgtgagactgataacaaatatacacgcgccatgtttagtggagggttacgtggtctttgtaagtgttactgaaaatacatctatcagactggccatttcgtgcaaagatgaaagttcatagaattcaacttaccaaagatttactaactgtcaaataccatgttccatgccaacagagaaaaatcacacattcattagatcaattcttattcccaagaagtgagggagacagacgtgcaagcaccttactagaatataaggccaaatgaaatagggtaataacagctggagacagtgggaacttaacagaaagaaaaattcatctcaaagcggggcttcagggaagttttattgaaaaagtggagggctgactaagactccaacagacaaggaagtgaggggagagaatctgagagtgaggacccctctcagtctcaggctttctggtctaacactgagtattagggagatctctggtcattctccaagcgcagcctctaacttctacatgccaggccctatatgagaaaataagagcctccaaaatacaaacccctctccccaactggcagtgaatggtgacttacaacaagtactttccaatgatactctcaaacaatgaaaatgatacttcatggttccttaagcatggcagagagaaccaccagatcacataatgcaactcatctaatattcctattgaaatacagtgggaatcactttaatagcactgagaaaataccagtgagataaagtctattttaaaaagttttgttggctgggcatggtggctcacacctgtaatccaagcactttgggaggccgaggcgggcagatcacgaggtcaggagtttgagaccatcctggccaacatggtgaaacctcgtctctactaaaaatacaaaaattagctaggtgtggtggcacgcgcctgtagtcccagctacttgggaggctgaggcaggagaatcgcttgaacctgaaaggcggagattgcagtgagccgagatggcgccactgcactccagcctggcaacagagtgagactctgtctcaaaaaaaaaaaaagtattgttttagtagttgaaaaagaacaaaataataactgaccaaagccgaccatttttgtgaagtttattctggtggagacagtgcttgcaggccacatccactctgttcttgaagggagaaagaacaccagtgaaaagtgaagcattgctttcctcgagcttacatttttcccggcatgcacaatgtcgccagtgcatatgttgaggtctttgcgtttgaagcgtggatgctgtttagtccttactgcatatatttattatgtgagatttattttaaaagagtctgtgaagttggccatggtggctcacatctgtaatcccagcactttgggaggccaagctggacggatcacttgagcccaggagttcgagaccagcatgaacaatatattgagaccttgtcttcataaaaattttttaaaaattagctgagcatggtggtgtgcacctgtagtcccagctacttgggaggctgaggtgagaggatctcttgagcccaagacatggagactctagtgagctgagattgcaccagcctgggcaacatagtgagacccagacccaaaaaataaaagagtctctcaatcttatatatggttctcccctctttgtatcaaatttagctagtacactggctaaattggaaatcaacctgggcaagatcttgtttcttttcatgctgtctccccaaaagttaagtgctaatcaatttgctgacgtaacaaaagaagcaatcagaatatgatataaatattaagtagaatatcttttcctctctcaagccttccttggctatcttagacttaatagttctcttctttttactggttttgtgctttctaattacaactgttacatatcatgttgggtaataagaattcaattactgccatctttgacctgagtgacctgagggcatgagctctcttgttcattagttccagcacccagcctgctgatagacacatagcatgagctccatgattcctcataggaagattggagtactgtagaaattatagcatcctaaaaacccatttggattttctaatgccattcttctctatattggtcaacctgctggagactatttgtgaatacaaattatgttcccaaatacatcctagtccaggtaagacaatgccaaacatagcttggaggagctgtcatctagtgggaaaaattaatggtctacataccactgggtcctagtcctggcattgtactacaatccttgcagctgaaggtggttttttttacctctctaggtgctgcgttgccatctttaaagtcatcccactggaccacatcagtattgcaagctgcttgggtatcattaatgaagacaaagtgggattattattttctatgatttgggcttttgtgagtttatttattaatgtagtctcaccatcacaccccctcttttttttaaataggcatgccatattactgcattgtagtaagcttctgactaattagaatttctggattattcaaattgaactgctgttcatattttatgactttgccatgtactttttgggacctgaaaaggtcttcacaatgacccagttaaatttaattctgttagttttatctagcatttcactggtgatgatacatttgaatcttgattctatattctatcatattagttatcctgcccactttagggtcatctgtggatctgataaatgtgttttctatatttttgtctaaattattaacttgaattactaactagaacagatttaaggacagacccctgtagtactttgtgaaagacttttttgctggttgataaatgattaattaacaccctggttttacttgtttataactacagtcatgtgttgcttaatgactggcatatgttctgagaaacatgttcttaggtgatgtcatcattgtgtgaacatcagagcgtgtatttaccaaagctagatggcatagcctaccacacacctaggctgtatgcaatagcctattgttcctaggctgcacacttttatagcatattactgtactgaatactgcaggcaactgtaacacaatggttaagtatttgtgtatctaaacatatctaaacatagaaaaggtacagtaaaatatgatataaaagataaaaaatggcatgcttgtataaggcacttatgaatggagtttgcagggctggaagttgctctggctgagtcagtgaatgagtggggagtgaaagtgaaggcctagtaatgattgttcactactgtagactttagaaacacctacacttaggctacactacatttataaaaatatttttcttcagtaatagattaaccttagccttctgtaactttttcactttacaaacttctaaattctttatactttttactcttttgtaataacacctagtttaaaacacaaacacactatacagctatacaaaaatattttctttatttatacccttattctataagttttttctatttttaaaattttgaatttttatttactttttaaacaattttttgtacaaactaagacacaaacacacacattagcctaggcctccacagggtcaggataatcaatatcactgttttccactgccacatcttgtgcccctggaaagcattgaggcaataaaaggcatggggctgtcatctcctatgataacaaggctttcttctagaatatctcctgaaggacctgcctgaggctttttcttgttttcacattagtgaagacactgaagatgtcactaggcaataggaatttttaacctctattatagtctcatgggaccaccctctctctgtatgtgggctgtccccgaccaaaacgttgttatgcagtgtgtgactgtagttgtaagtcaatgctactggactagctatcagtcaatcatatgcttataaagattccaatcctacctggctcaagaatttcagaggggacttactgagttggactggttttaatttgtactacttgaaaattcaatatcaatctaaatgtgaacttcccctacaggagtaatcaagacaccccagggggccctgggacccctttgtcctccagtacaggttctatgagtttgcaggatcttaaaatttgtgtatgtaaggcctcgaagagctcggctgcctggttctgtcctgtgttcttgaaacaaaactgactttggggcaaattagaaagtagattcaaattatttcattctagtttgatggcagctttcccttcttctgtgacacatcttcttgctattggaggtggctggggtcttcctggtttcttccagcttttccttttctgtccctcactagcgaggtcacacactctcctctggacttctctcttcttatcaagagtttgtgtctccttttcattcctcggtgaccattgcatgtggctaggtaatagaatggaggtacttgcttgcacaagtgcttgtgtacacaaacatacagagatacacacacagacacaccacacagacatacgtctacaacagaaatacataaagatgcacacagagacatacatgttcaaacagacatacacacagacaccaagacacacacagacacccacacagacatgcaggcacacacatgcctcccccaccacccagacatacatgctgagtcactgatgggctagggaacctctgttctcccagccacacgcaatctctgagaattgcccttgggctaacgtccacaccaccctgccaggcccattttcctgttgtagatgaagaaagagcagggctggcctcgtgggcgtgtgactgtgtctacagttagaagggtcctgtatttgttttaatgctctgctcttgtcaccttgaaatccgtaattccttttgaacaagggatcctgcattttaattttgcactaggcaccacaaattatgtaaccaattctgaggaggagttatgtgttccgtagtgtgatttacctgtgcactatatctggggactccgtctgcatgctagcagctgctggaagagtctatttcacattaattttcctgctgcatattttccaataaactatcttccaataaactatcttttaaagctgttaacaagtgttttctaagaaagttcactcaagaattcaccctgatggaactatttgttttactctcctgtggttgtaactgcccaatctgttctccttgcctgctgcctagacagagccaatttatcaagacaggggaattgcagtagagaaagagtttaattcacacagagccggctgtacaagagactggagttctattattactcaaatcagtcttccaaaaaacgtgaggattggggtttttaagggtaatttggtgtctagggggtcagaaagtagggagtgctgattgatcggatcggagatgaagtcacagggagtcgaagctgtcctcttgagtttgttcctgggttggggcggcaagaccagctgagccggtttattgatctgggtggtgccagctgatccatcaaatacagggtctgcaaaatatctcaagcactgattttaggttttacagtagtgatgttattcccaggagcaatctggggaggtttagaatcttgcagcctccagctgcatgactccaaagccataatttctaatcttgtggctactttattagtcccacaaaggcagtctagtccccaggcaggaagggggtttgttttgggaaagggctgttaccctgtttttcaaagttcaactataaacgaagttcctcccaaagttagttcagcctacacacaaaaatgaacaaggacagcttggaggttagaaacaagatggagtcagttaggttagatagcgttcactgttattttctcagttacaatttttgcaaaggtggtttcttggtcacagttgtctccaattctgattttatttaattttaatgtccatatgatacctactttttcttttttctttttccttttttttttttttttgagatggagtcttgttgctctgtcacccaggctggagtgcagtggtgtgatcttggctcactgcgacttccgcctctgaagttcgagcgattcttctgcctcaacctcccgagtagctgggaccacaggcatgcgccaccacacttggctaattttagtatttttagtagagatgaggtttcaccatgttggccaggctggtctcaaactcctgacctcaggtgatccgcccacctcagcctcccagagtgctgggattagaggcatgagccaccgtgcccagcctgttctctaatttttaaaaactccaaccagaacataagtcatgaaaagatgcagcaaacatttgagagtcaacaaatatttactttggacctactaaatgctgaacactgttctagagtctggggatagagcagagaatataatagcatccctgaccttgtataacctacattctggtgaggagagacagaccataagccagcaaaacagaagtaataaactagcaagcatatagatgagtgagaaaattgcatgcatagacaaacgctaaagagaaggttaaatagggtgatgtggtagagggtgactggaggtggttttagcttggtggtctgaacaggtctctctgaggagttgacttctgagttgagacctaaatgatattctgggtaaatgtagttttggtagggctttaaagtattagctgtagctcaagcatgttcactgtttttgtgaactatgacatccatttaaatgatgttcaaagaggaatggtgggacatctcaagtcaaacaaacatcctgaactcagtggatgaagtctccaacaggtttcactccagggcatttccatgaagttccacctctccttcactttgctgtcaaggcaccaggctttgttgtgtgccctgtagggggtgggagtggagcactttagtaggagtgatttgtagtttcagcgaaagtggaagcttcagaacctacccctccaatttgctgaagaaggtgggacagaaccaaggaaaggcaataaaaccgtgaaccacagaaacacctgcatcaccaagtacatgccccggggccaaaagggatgttagtgccactgggatcagatgggatcaatttctccatgtgcactgattcagtgcttgctacactgcttcaagctaacctcccactctcactgtctccatttcagaacccagttccttttccctctttccgttcatttcgagaagacaatgtcagaaaacagaatgacgtatgtgtccaaaggctcaagggcttggcaagcgctggctatagtttttagcacttaattgacaattattcattgcctcttgtgattatttaattacacccccaactgaacttaccattttaccccagtgctcctcctctgacttcaccattctattcttccttctttcaaatcctgaccagcaggtcactcatttgcaattcctacatatttaaagcaacgttcactctcccgatttctgacctttcaaacacccttgtaactaagtccttgtattatattccatctgtttgaaatttatggtatgacctctggtttcttgattgtgtgataatgtaagcgatttctttcttcaatgacttctttcttttttacaattgtgatatatacttttatttctcattgataaatggttacaaatcatactcctaggtttatatagcactaacacttaaacacattgtaaagcttctggaaggcttataataccttgtgtcttccagctttatctcccagactggatctcatttttttctttctacttttcttcccttttttttcataaaaattgtatatatttaaagtgtacaacatgatgttttgatatacatagtaaagtgattactgtagtcaaaataattgattatccaccacctcacattgttccttttttgtcttgtggtgagagcaattgaaatctactatattagctaattcccagtacgcaatacaatattgtcaccattctgtacatgacatgtctagacttactcatcctacacaactgtaactttgtattctttcaccaatagtgacatttttttcttgagtcatcaatttctttcctttttttcttaacttttatttaggttcgagggtacatgtgaacgtttgttacataggtaaactcatgtcacgggggttggttgtacagattatttcatcactcaggtattatgctcagtacctaacagtgatcttttttgcccctcttactcctcccaccctccacccttaacagaccccactgtccattgtttccttctttgtgttgattgatcaattgaaaacactttttattgactccctgccatgagtagaagcttaagctacttacacaacacccgtctgtcccctctcttccaaattttggtaatcattattttaatttttcagtgtttctttaaaaaatatacctgtaaacctcaaattttgtgcaatcaactttagagatggtctcttgactcctcaccatgttagatgagaccatccatattcttatccttccttctaactcttccatattatcccgcctcccatcttctgactatgaactttcatttctttaattatcaaagttgttaacattgacattttgttctataacaattttaaatcttgtatagtagatggattctaaagctaaaagctattttattattatgcgtgagaataacatgttgccatttcacagccaaaaattatattttctaagattgtatttccacaagctaaggttatgttttcttctctttatgtctagcatcacaagctcttgaccctcaagagacactatgctcactatacaggtcaaaaggataaatgctttttattttcttataatttataaactattcaaaatcacgcagtattttagtattttagtttgtttcgtatttgggccatgatttttttaagatagtgtttttcttggaggttctaaatgtgaattcgttattgagataggacacttctttctctctctcttttttttttctttttttcttttttttctttttaccatgtcactaataacaagcatcattgtcattctgtacatttgtacattgcttggaagctgtaagttttttcttggacgtaccatacatggaatgtgctgacatcctgttccagttggaccaattgctttctcagcctcacacacagatatcatcctagaatttctttttattggacacttggttgagtttcattcttttttttttatttttttttgaatttcactctttgtgtttagctgtcatttttctggcgtaaatcctcaagtaattttctcataaaaattgcatagagggtaaacactctgtatattctctgtgcaaaattgttatgatgatgtatgtaggcattgccattttgctctgcttagatggtcttccttctgggtatctgctataaaaggaaggctgacttgagctctgtgtttgagggtggaatatgttgattgtcaggcttcactctatgggaagctggtagggagtcagcctttagacaaagaggggccttggcattcttgaatgaggagggccactggagtgtcattgtctcctaagcagccttaattcttcccaggaggttgactgcacttcttgagagaggagtcctctagttgctgttttgtctgggggagatgaaggtgaagacagatgtccagtgagcctctggctttgttctcctctttgccatgcccatgccaggcttgccagcaaacagcctgcagggctagttatcttccttctgtgtggctcttctcacccttctctcagtgtcactcattatcctcacttttcatttgctgtcttctctactcctcacttgtttgcttctcatacaatgtttaagcatatttctgctttctttggtgataccctatctgatgtcatctgcctctactggttgattatcttcttattttttaaaatgtcttttctgttttcctccatttttcctataacttgagacagattttctcaggcaagaacacgtgtcattgccctaatgggattctaagcctgggcatggcgttaaaggtggcttgtccaaatctccttggtacgggtgaaggcactgaggactcaggagactgagttgtccatgttcacacagctaagctcatgacagggccagggctgtgtccagctctcccgcacgtcctgcctgtgcttactccctagattgcagatttcttcctgtgcctgggagaattcatgtgaaattttgtcaccttaagtggaagatctgtttatgatgaaaagtgccctttagtgtaagagattccaaaaggcaggttcttagactatgttggatagatgtagtagcaaaattttaggacttcccatagctccaaattattaaacctttgtgtggaaataatagagtttggggattagagatacaaaaggaggatgaagaatctgcccttattgaacagccctgctaccgtcatagttttcttcttgtttgacctgatttaacagtgaagcaagctctgatgagacttatggactatttacaaatgattgcaaaactgcagccctcccagaagctggattttttttttctgtttagtttttttgtgtgaccttgtgacagaattatatggaagtagaagttagtttagtgttattcacatgtgtacacttttgagaaacttcttgtggagaacctgactgagatactttgcacaaaactgttaggaacattaactgaattaaatggtggggggaatgcatctgttttataacaggtgccggaaaatggactatcaccaatattatatagtcaaggatggaagcaggaggataatagagttgcagtgcgtatgctaaacaaaagacgactttcattccaaggaaatgagatagagacagcacgagtcttacttctgttgttttccatggaggaccttgacaggaagagcaagttttgtctcagtgatgtacagagttgatctttaagttgcatgacaacatcattatcttgctctggcttaaaaaaaaattatcagctttgggaacaattgtctcttaacagtaactcagattttaggtttctccttccctgccagcccagggtgatatgaacattttgaaaaaactagaggtagctttttatcagtaaaaaaaaaaaaaaaaaaaaaaaaaaattccctcctgcacatttgtttcttgaaggacaggtttctgcttctatctttttgttttctaggttgaggatgatgaatggcagtttccaaatgtatttctgaaaaagatgaataagaaagagctgtttctgattcaaccttccaattcctgggagaaatggatgaagtaggaagtagagagagctgtagattacagaaaggccaacatgaggagttgcttttcttgtaaatgtgtttcatttagaaggcatgtgtgcttaacaaaggatttaatttgtgtggaattaaaaaaaaccaaacttttgacaatacatgtgaacaaaacttcaaactgcaccaaattatttacaaattttcagttaccgtctttggcattctagctggattattccacctaaaatgcagatctaactttgttatttttctgactgcagtcttgtgctgctccacaaactcctaagcaatagtgtatgagccctttgtacattgccttctctctctgtccgaagtcttattttccaccctccctgcttgacacctgatgcattatactctagtggttccttcatactctgctgctctgcacttcacaaagatccttctctctggaatacccttcctatttttatttggccaactcttactggataaactatcattctgtcctgaaagtcttcccttaaactaggtgggactaagacccacttttctagactctgtggcttctggcttgctactgagtatcttatatttctctttaggtgtgagttgaccttttagactatgagtgtcttgtgagtggagactatgccttattcatttttgcatgtgtcgggtggatgcagtgctgaacatgtaatatgtgcacagtaagtgtttgccaataacctctaaatatccaactcaactaatatttcagttacttcctatttagtactaagactgaactgaaaacccacaagaaagtttcataatgataggtggtaaatagcagttagttcaggaagtaagtaacagattattatttttctcccagtggcagggtcacactatttttaatgaatttggataaatctacctgtgcaaagcatatgtgtccatacagcaagtgcattaggaatcacagataatacttagaatcaaggactataagaattgcaaaatgtccttagatatcttccaggccaatcctctttgtgatgcaagagtccttcccacaatagttctgataaatagtcatgcattttctacctaaacacctcctgtaatggcccctctttatctcaccaggaagctcaatccatttttggaccactttaattttcagaatactttctatattggctcaaatctacttcttataacatttatccattggtcctgattcttcctcttgaagaggaggaagacaataaatctaatttctcttcttcctttaaccttgcagatattggtgcatcatcaaatgtcccgtaagacttctcttctccaagtgaagttttcttaagttctgtaattgttcttcatattctgtgcattctgttccccttactatcctagtcactctactgtgctttagtttgtccagaagtgaacacgagagtccaggtttccttatcagtgcgcatttgagcatgactgggcccacattacaatgaacactctactttagtttctgaagcctgagatttcattaccttttttttggcaaccatgaaactctgctgacacatatggaactttcaattaataaaaacctctaggattgtttcccttgtactgttactaagcctttctgggatctggttatactgcttataccttctgaatgatgctacatgaaaaatttcaaatcaacaaccattgaccaactatttgataatattcatacttgtagatcaaaaccagaatgtaatagtgcccatacctgaaggtctaaaaagtactttccgatagttcttattatatttatttatttttctctgggcatgaagacaatcagattatagtcagcaaacaatttaaagactaaaattttcataatttatctatttatatcagtattgctatttagaacactgaccctgcaaagttatatacctagtccaacaatgctttctttgttgggtgattaggacaataacatttttgaggggtgcctacttagtgcttagtattcaaaccatttttcaaacttcaactttcgaattacatttaaacccagtgcatgaaccacacagaaacattattctcactattttcagtcacatttcttcttttcgagtccaaggttctagtttagtggtcttgtctcctatgacctttagtcacctcctgaaatcaattatatcctcaatgatggctattactccgttcccccttgaatatattactacatgtccccatgcaggcccctggagcagtcgtaccactcagatggcccaacagcctcaccaatgtcttgcctgcatcctctctgtttaaaaataggactcccagagattctaccttgaggccccagatcctgccaaaaagagatttgtttcctcctctgttcttagaccaattaccaaataaagcactccacagagaatccagatgaaatatttctccacccagttggtaagaaaagtaattaaaccaacctgctgtgctgagcaggcctgcagcaatgtaacacttagttatagcaacagccatagataggaactcagctgcaggctcctgtcagaccgatctgggcatttctaaccactgtccttagcaacgttcacaaagggccccgtcttagactcagaaaggcagctcacagcccttaggggtatggtttgaggtaaaataaaaaaataaaaaatttaaaagcatgcattaagtgtgcttctcagtctggctgtttgcagagcttagataaataagaataagggcctacctagctggatctagcatttgcttgctctcagaagttgcagtgacaggagaagaacttttgtttggccagatgtagcctttgctcttatcagccactctttcccacccttgttggtaccatgaagtttaggtagcatatgacgtctcctaatagaaatcactacacattctgtaatctgcagttcttattcagggcaattcaaatcactgtaatttctttctactaaccagattttgctgaaattctggaaaactatggaatactttttttttgtttgaaaaatcaagcaacacatatttcgtttcaaatggtagactgaacgaagtagtataactcattttcctatgtcatcgcataaaatttggttaaaaatctacttaatctttctcatattattagcaaatgaaaaggaagaagaaatgtcaagctgtctagctgcaacaaggaatatatcgcattttgtcaataatagtaataataatgatgattgtggggctgatgacagtaatgatgccatgggtctctttagctgggaaaattgacacagttgcatagactagaggtatgcaagaagttagtctgagtaatgtaagttttaaaattagtgaagcaagaattttaatgattttaaaaagggtagtactaatactgtgtatgtacaaagcactgtgaaatgtataaagcattttcacatttcaacaagggatattgaatcgatattccataagggatattgaaatgtgaaaaatcccttactgaaaagggatttttcattaagggattttggaaaaggaggaagcagtgttcagatggattaagtggcaagacctggatttgctgttctgtgtgccaccaattctcaattcagtaaaactgactcagtcaatccaagttttcctgatttggtagatttataaaagcctatatattgagctcatctgtgacatgcagactgtttcttaaaaaaattattttttattttaatggtttttggggaacaggtggtgtttggatacatgaataagttctttagtgatgatttctgagattttggtgcacccatcacccaagcagtgtacattgtacccaatgtgtagtcttttatccctcactctcctcccaccctttcctccgagttcccaaagtttattgtaacattcttggttttccattcctgagttaattcacttagaataatgatctccaattccatccaggttgctgtgaataccattatttcattcctttatatggctgagtaatactccattatatctatatatctatatagatatataacattttctttatccactcattgatggatggacatttgggctggttccatatttttgcaattgcaaattgtgttgctataaacaggcatgtgcaagtatctttttcgtataatgacttcttttcctctgggtagatgcctagtagtggaattgccggatcaaatggcagatccacttttagttctttaaggaatctccacactgttttccatagtggttgtactagtttacattcccaccaacagtgtgaaagtgttcccttttcatcacatccacaccaacatctatttttttttttttaaatgttttgattatggccattcttgcagaagtgaggtggtattgcgttgtggttttgattttcatttctctgataattagtgatgttgagcatttttccatatgtttgttgacaatttgtatatcttcttttgagaattatctattcatgtgacatgtaggctcttgatcctaatggtgacaaaaatatctgtaatggagatgatatattaatatttttcagatatatttctattataaattttggtatcttgggggcttctcaattattgaaacaatgagctcaaaagaccaatgtaaaaagcttttctaaatctctgtagcctctcagtgatatggtctggaggactcagattatttagttttttctagaaatgttcagaagattcctgctctgcctctgtaggctgaaccaaaggtcctcctggatagaagaaagacatgatgttgaggaaaatgaacagttttcccttctattctgagaagattatggaaataagatggtcaggtgtcggagcccttgtttttcttttcttagggtccaacttgggatagggaagggactgtgggtttagaaagcagtatctgtattggtatggatggtgtgcagaaacctttgctcctttgagctactgtagtgaagactcaagcccttagggaaatcataggtgtaggcttggcaccgtggccatcatggtgcctgagtgaatgtaggtggtaccaggagcccaggtctgccattctggaccccagggacttatgtaactccaagtcccaaggaggagaggtggagatgctgagggccctggtgaaccagcagaggccctcatgcaggagagagttcattttgggtgaggacttaaagatgagaataaatagctcggatcttgggttccagcagtcggtgccagcacatgatctcaaatggccagacaggtccatttgttcctctgtggtcagcagttcagggagaaactcagtctggctcctctgcagcagaggcccagtgagaattcagatgaccaggtgaagctctgaggaccccctttcttcctctatcacgccatcattaatgagcgtacctggcccctccaaccagtcaccttcttgaattggaggatggggagggaaagattttacacaaatagatcaagcaattaattaaagagactgccataattattgcatcagatcaaggttgatggattgaaaaagcattttatattattttttccaggtttgctctgggggtttaggctttgtgaggatgatcagatgagttacgtagagaaagtagaaatttccatatttgatcaaagttaagatacaattgattattagaagaacctttgttttatcaattactgagaaagaaaaaagttaccatattagtcagggttcaagcaaagacatagaactagtaggagctatgtattaagagatatattgcaaggagttggcttatatgattgtggggggtggttaggcaagtctgaaatccaaagggtaggtcactaggaagggcaggctgagactcccaggcatgagtccataggcaaaattcctctttcaccagggaagtctcaactctgcacttaaggctttgcaacagatcgaatcaggcccaccaaaactgtctaggataatcttccttacttataggcaactgattatggactttaatcacatctacaaataccttcaatgcaacacttagattagtatttgattgaatagctggagactgtagcctagtcaatttgacacaaaaactgaccatcacagctaccaattaaactatggcaagttctggtgagacatatttcaattttagaggtgttaaaatgtaaaaaaaatttagagtttatgacatgtggtacattttctgggtatagcgcaagtaattgagaactgtattacctaactttatttagtaattctggggattagtagtgattttgtaatcttgtaatgacttgtaattctagagattggtagtaattacaactacccctttgcagagagaaagcctgagtaccaagaaagggaagtcacttcctgaggattacatcaggcagggctagaattaggatcctgttttccacccccatgttctttcagtccagatccctatattttattagaatcacaggcaaagaagattggtggaatgtgaattgtgtttccctggctggtgtccctgatcacctgagagttccaaagtgtgtaaaatgatttcgtggagcctgatggaaagtctgcatttcatctgaggcaaagtttcatgggctaaataagatgttaagttgctttgcttttggccagagttttatgtagtccctttggtcacttttctgtcatatgctcatcagaagctgtgatgaccagttatttaagttgtgtgggtcattctcctgcttcctctcaagttcattctctaccttccctcattttgcatcaaagggaattaactttcctagggttacttgccaatgacttctgagtagcttcagcgaatgggaggcaccagaggaagcctagagggtgggagaagggagaagccagggagtgagtggctcccttcttgctctgccctgggctgggtctccctcagtggctgtgtttctgcagtggctctaactttgcttggatagtcactgcctccacagtcccatcccaccaggcagcctccaccatagttctggctcccactgatggtcgtggcttttggaaggcaatagcaacgtctcctctcattgttccttcggctctaggaatggcaatggctttctgctcttgtctcgccactccttagggactctttcaggtctcccatcacttgcataatgaattcctcatagcaaatttcctgtatttggaatagctatagtggtcccatgttcctgatatgtaggattaaaaaattaattattctgggaaaagtaaatcagttattacttgagagatacacatttgggtagataccatcattcaaaacatggcttctgtgttaggctgtttttgtgttgctataaagaaatatccatctgggtaatttataaagaaaagaggtttaattggctcatggttctgcaggctttacaggaagcatgtctccagcatctacttctggtgaggtctcaggaagcttgcaatcatggtataaggtgatgggaagccagtgtgtcacatggggagagcgagagcaagaggtagggggaaggtcccagacttttaaacaaccagatctcatgtgtactaactgaaggcttccttgcaattccttaaaaaagaatagaattgattgccatttgagagcatgtggactgtttgaagggagggctagaatttgctgttcaatgtttagcacattctgggagcctagtaagcactgattcgaggaatccaagtcttccagactcataagccattcgtgagtcatgttatcaccaaggaaatggagctaaaccattcctgagggatctgcccccatgatccagtcacctcacaacaggccccatctccaacactggggattacattttaacatgagatttgggggggacaaacatccaaaccatatcagcttccaagaggaaaaatatgaaaaagaagaaaagggaccttggcagtgaaagggctgtagaggcacatatggtagtgctgaagggagccttagcagccaccagagaaataggggtacttgtcctgggtcacttagcagttcataaatgaacaaccaggaccagaatgcagttgtttttgcctccagccacatattacatagcacagttggaagcatttggaatcagagagaaccaagttaaaaatcccagctccactgtgcgtttcctctgtgacttcaggcaagcctcttactgtctctgaatgtcagtgttctcatcttgaaattcaaactaaacttcccagtgttcatgaaactgtaaggagtcacttgtaagtgtacttggtggagtgtttggccagagtagccactaaatatgttacatttccttcctcccattcaggacttttctataacactatccaggaacaattaaaatttccaagaaggtagtttctttcttttttaaactttcttaaaatctctgccttccccttttgctgactttcaacaaagcaaaataaaggagctgaccaaatgctttaataatgtaacttggctgggcacggtggctcacgcctgtaattccagcactttgggaggctgaggcaggtggatcactgaggtcaggtgttcgagaccagcctgaccaacatggtgaaaccccgtctctactaaaaatacaaaaattagccaggtgtggtggcaggtgcctgtaatcccagctacttgggaggctgaggcaggagaattgcttgaacccaggagatggaggttgctgtgagccaagatcgagccattgcacttcagcctgggtgacagagtgactccatctcaaaaaaacaaaaaacacaaacaaacaaaaccctcaatgctttaaaaaaatcttgcaattccttaaaaaagaatagaattcattgccatttgagagcaagtggactgtttgaagggagggctagaatttgctgttcaatgtttggcacattctgggagcctggtaaacactgattcaaggagtccaagtcttccagactcataagccatttgtgagttaaaacaagcctcctttgaagtgcttggacatccttctctacactatctttagttgccattttgccccttacattacagtaagaagtacatttgtatggagttatacatgccacaggcctgctctaggacacttggcaatcagcaatcgttcagacctgctttccttcattttccttattggttccaggttgaacataggtcttgttaccgttcaagggcctgctcctatgggcccatgccccaggagccctaagccttttggcccagttgaaaagctgagttacatgagaaggtgacagcctcataatggcccgtgttccagccccagcattgttaccccctacaatgctgttgtaggagtgtaaagaagcagtcgcttagactcctaaatgcagttcttctctctcgagaccaccttggattggagaacacccaaatgagcaggattgcttttgctttcaaaagagtgatacctggagcacaggtatccacctccccccatatcccatgctttgaaaactatgttgtattagtgttttattaactgtgcttgaatattgggcatcctcctatattgcaccttgatattcttggctgtatataaagagttgcttcacttttaaggaaggtggacttaaaagtttattgtttgtgttgtgatttcctttcaagtagttccactctgtgtaacaatgatgcaaagcaggcggagagctgacctagggctttcaagtggggcagaggtaagcaaagagatttttccctgattaatgctatcagtttaattttgttgaataaatgggtggaattaggttgaggagtgtaggttcttgccagatccaccagaaaaggtggtagatatagttataattagagtagtaatcagaagggtttaaattctgtgcagattgctttaactctccattttaacatgttttttttttttcttccctagcagattaccagaaatggggtttcagaaatgcagttctaagcatgacctggggtgatggggcgcctctatttatggcaaatggctttgacttctgtgggactgggtcatattgttacagctgcaagactaaaaagcatttgaatgattatattttgattagaattcttcctacacttttaaggaacatggaaacttcagtctctttttctctctcaatctctctctttactttctctcattctatttctcttctactttcccacatcccctttttggagactgtgttgtactaatcttttttttcttttaattatactttaagttctgggatacatgtgcagaatgtgaaggtttgttacataggtatacacgtgccatggtggtttgctgcacccatcaacctgtcatctacattaggtgtttttcctaatgctatcccttccctagcttcccatcccccgacaggcctcggtgtgtgatgttccccctccctgtgtccatgtgttctcactgttccacttccacttatgagtgagaacatgtgctgttgggttttctgttcctgtgttagtttgctgagaatgatggtttccagcttcatccatgtccctgcaaaggacatgaactcatcctttttatggctgcatagtattccacagtatatatgtgccacattttctttatccagtctgtcgttgatgggcatttgggttggttccaagtctttactattgtgaacagtgctgcaataaacatacgtgtgcatgtgtctttatagtagaatgatttataatcctttgggtatatacccagtaatgggattgctgggtcaaatggtattgctggttctagatccttgaggaatcaccacactgtcttccacaatggttgaaccaatttacactcccaacaacagtgtaaaaacattcctatttctccacatcctctccagcatctgttgtttcctgactttttaaattattgccattctagctggcatgagatggtatctcattgtggttttgatttatatttctctaatgaccagtgatgatgagcttttttttttcacgtttgttggctgcataaatgtcttcttttgagaagtgtctgttcatatcctttgcccattttttatgggtttttttcttgtttatttaagcatttaagttgtttaagccatttgtttaagttccttgtagattctggatattagccatttgtcagatgggtagattgcaaaaattttctcccattcggtaggttgcctgttcactctgatgatggtttcttttgctgtgtagaagttctttagtttaattagatcccatttgtctattttggcttttgttgccattgcttttggtgttttagtcatgaagtctttgcccacacctatgtcctgaatagtattggctaggttttcttctggggtttttatgagtttaggtcttacatttaagtctttaatccatcttgaattaatctttgtataagttgtaaggaagggatccagtttcagttttctgcatatggctagccagttttcccaacaccatttattaaatagggaatcctttccccattgcttgcttttgtcaggtttgtcaaagatcagatagttgtagatatgcggcgttatttctgaggcctccattctgttccattggtttatatatctgttctggtaccagtaccatgctgttttggttactgtagccttgcagtatagtttgaagtcaggtagcatgatgcctccagctttgttcttcttgcttaggattgtcttggctatacaggctcttttttggttccatatgaaatttaaagtagtttttttctaattctgtgaagaaagtcaatggtagcttgatggggatagcattgaatctgtaaattactttgggcagtatggccattttcatgatactgattctttctatccgtgagaattgaatgtttttccatttttttgtgttctctcttattttcttgagtagtggtttgtagttctccttgaagaagtccttcacatcccttgtaaattggattcctaggtattttattctcttagtagcaattgtgaatgggagttcactcatgttttggctgtctattattggtgtataggaatgcttgtgatttttgcacattgattttgtatcttgaggctttgctgaagttgcttctcagcttaaggagattttgggctgagacgatggggttttctaaatatacaataatgtcatctgcaaacagagacaatttgacttcctctcttcctatttgaataccctttatttctttctcttgcctgattgccctggccagaacttccaatactatgttgaataggaatggtgagagagggcatcatccttgtcttgtgccagttttcaaagggaatgcttccagcttttgcccattcagtatgatactggctgtgagtttgtcataaatagctcttattattttgagattcgttccatcaatacctagtttattaagagtttttagcatgaagaagtgttgaattttatcaaaggccttttctgcatctattgagacaatcatgtggtttttgtcattggttctgtttatgtgatggattatgtttattgatttgcatatgttgaaccaggcttgcatcccagggatgataagctgacttgattttggtaggtaagctttttgatgtgctgatggatttggtttgctggcattttattggaaattttcacatcgatattcatcagcgatattggcctgaaattttcttttttgtgtgtgtgtgtctgtgccaggttttggcatcaagatgatgatggcctcataaaatgagttagggaggagtccctctttttctgttgtttggaatagtttcagaaggaatggtaccagctcctctttgtacctctggtaaaattcagctgtgaatccatctggtcctgggctttttttttttttggttggtaggctattaattactgcctcaatttaaaaacttgttatttgtctgtttaggggtttgacttcttcctggtttagtcttgggagggtgtatgcgtccaggaatttactcatttcttccagattttccagtttatttgcatagaggtgtttatgatattctttgatggtagtttgtatttctgtgggatcagtggtgatatcccctttatcatttcttattgtgtccatttgattcttctctcttttcttctttataagtctgcctagcagtctatctattttgttgatcttttaaaaaaaaccacctcctggatttgttgatttttttgaagggtttttcgtgtctctatcttcttcagttctgctctgatcttggttatttcttgtcttctgctagcttttgaatttgtttgctcttgcttctctagttcctttaattgtgatgttagggtgtcgattttagatctttcctgctttctcctgtggacatttagtgctataattctttctctaaacactgctttagctatgtcccagagattctggtacgttatgtctttgttctcattggtttcaacgaacttatttatttctgccttaatttagttatttacccagtagtcattcaggagcagattgttcagtttccatgtagttgtgtggttttgagtgagtttcttaatcctgagttctaatttgattgcactgtggtctgagaaactgtttgttatgatttctgttcttttgcatttgctgaggagagttttacttccaattatgtggttgattttagaataagtgcgatgtggtgctgagaaaaatgtatattctgttgatttggggtggagagttctgcagatgtttattaggtctgtttggtccagagctgagttcaagtcttgaatatccttgttaattttctgtctcgttgatctctctcatattgacagtggggtgttaagttttcccactattattgtgtgggtgtttaagactctttgcacgtctctaagaacttgctttatgaatcttggtgctcctgtattgggtgcatatatatttaggatagttagctcttcttgttgcatcgatccctttaccgttatgtaatgctgttctttgtgtttttttgatctttgttggtttaaagtctgttttaccagagactaggattgtaacccctgtttttttttgttttttttttttttttttttgctttccatttgcttggtaaatattcctccatccctttattttgagcctatatgtgtctttgcacatgagatgggtctcctgaatacagcacaccaatgggtcttgactctttccagtttgccagtctgtgtcttttaattggggcatttagcccatttacatttaaggttaatattgttatgtgtgaatttgatcctgttattatgatgctagctggttatttttaccattagttgttgcagtttcttcaaaatgtcgatggtttttacaatttgatatgtttttgcagtggctggtaccagtttttcctttccatatttagtgcttccttcaggagctcttgtaaggcaggcgtggtgctgacaaaatctctcagcatttgcttgtctgtagaggattttatttctccttcgcttatgaagctgagtttgactggatatgaaattctgagttgaaaatacttttctttaagaatggtgaatattggcctccactctcttctggcttgtaggatttctgcagagagaaggagaagtctgatgggcttccctttgtgggtaacccaacctttctctctggctgcccttaacattttttccttcatttcaaccttggtgaatctgacaattatgtgtcttggggttgctcttctcgaggtgtgtctttgtggtgttctctgtacttcctgaatttgaatgttggtctgtctcgttaggttggggaagttctccttgataatatcctgaagtgtgttttccagcttggttccattctccccatcactttcaggtacaccaatcaagtgtaagtttggtcttttcagatagtcttatatttctggaaggttttatttgttcctttttattcttatttctctaatcttgtcttcatgctttattttattaagttgatctttagtctctgatatcctttcttctgcttgattgattggctgttgatacttgtgcatgattcacaaagttctcatgctgcgtttttcagctccatcaagtcatttatgttcttctccaaactggttattctagttagcaattcctctaaccattttttaaggttcttagcttccttgctttgggttagaacaggctcctttagctcagaggagtttgttattacccactttctttccattatcttatttaagcaatgcaacaacattttgagataagaatttatattagtgtatgggacatatagatcaagtgcttagcacacatgcccatatacatgtacacacacatccccatgccgctgatagaatttttcaatttaaataactgaaatggcagtgaaataccccaattttcagcctataaggctattgggcatttttgttttggcatggcaaaataatcccaatatagcccatctttcccactgattacaactataaactctggacaaaatacaaacaaaacaaaatactatctgaggattttgaaaagtaaaccgaaacaggcagattgttgaagagggtcaaaacttggacaagtaaccactggtggtgagtttcacattttttccattctttcttaacagctgtacccaaagggttctcattatggagcagcgagggaatggtggcagcgtgggcagataaaatctcaatagaaacccagtcctactggctagagtaactaagaaaaggggctctagggggatggagagtgaggagagaataccagagtggagagaactggagaaaaaattcccaattctgtatatgaatctgcacaagtctcaggctcattctcaaagaaaaagaggagtaatagatgcaactagcatagtacaggttttgacaaccaaactgaggtttgaaccactgcccacagatggcaagatagaacttgcagtctaagcctaaacagttgattgccataaaacaagaacatcaacattctacagaggattataataggatccagtgcctgtaaaatgtaaatccacaatgcccagataccattccaaagttatatgacatataaaaaagcagaaaaatgtgttcacatttttaccccagtggaaaagataatcaacatatgaccagatcaaggtgacccagatgttggaatcatcagacacaggctttaaaatagctattatagctgcataccatggagtaaggaatccatccttgaaatgtatgagaagatagaagtggatatcttaaaattgcaaaagaataaaatgaaaaatttagaactgaaaaatgcagtatctgaaaactggatgggctgaatagcaaaatgaaaatatagaagaaacaccccagtgaacttaagaatagatcaatagaagttatccaatctgaagaacagagaaaaaatattgaaaaagaggaacacaaccttagcgacctgtagcataatatcaataggtgtcactggaatctcagaaggaaaggagaagaagactgggatagacaaatatatctgaaggaataatggccagcatttttctcaaatttggtaaaagacacaatttacagatccaagaagctccatgaaccctgaacaggataaaatcaaagaatatgatacctgatactcatggaaataaaagctataaaaaccaatgatgaattttaaaatcctgaaagacattagagaaaaaaagcacattacattcagaggaccagtcattcagatgactgcagatttctcatcagaagccatggaaggccagaagacagtcaaacagcatcttgaaagtgctgcaagaagagaactgttaacttaaaattcttcattcagtgggtatgtcttccaggaatgaaagcaaaataaagacattctcagattaaaaaatttaacagaatatattgccaggaaatcagcattatgagaaatgctaaagtaagttcttcaagctgataggaaatgataccagagcaaaccttggatcttcaggaatgaaagaagagcaacagaaatggtaaatatttttccctgtgcttaggtactaccactgaaaacaaatttacatttctggagggattttcaatatatgtagatataatacatataacagccgtaccataaaggttagttgaggagataaaagttaaggaggtagaccgggcgtggtggcttatgcctgtaatcccagcactttgggaggctgaggcagatagatcacaaggtcaagagattgagaccatcctggccaacaaggtgaaaaccccatctctactaaaaatataaaattagctgggcgtggtggcgtgtgcctgtagtcccagatacttgggaggctgaggcaggagaatcgcttgaacctgagaggtggaggttgcagtgaagccaagattgcaccactgcactccagcctggtgaaggagtgagattctgtaaaaaaaaaaaaagttgaggaggtaaaagtcttatggttgtaagacttctacaatttacataaaatggtagcataggaactctgtgtagaatatgatatatgatatatatacctggggtgtgtgtgtgtgtgtgtgtgtgtgtatatatatatatatatatatatatatatatatatacacacatacatatacatatatatatatacatacatatacatatatatatatacacacatacatatacatatatatatatacacctggccttcataatattatattgtatctatatatgttatataggctgggtgcagtggcttacacctataatcccacactttggaagtccaaggtgggcggataacctgaggtcaggagtttgagaccagcctggccaacacggcgaaaccccatctctactaaaaatacaaaaattagccaggtgtggtggcaggcgcctgtaatcccagctactcgggaggctgaggcagaagaaacacttgaacctgggaggcggaggttgcagtgagcagagtttgagccattgcactccagcctgggacagagtgagactgtctcaaaaaaaaaaaaaaaaaaaacaccaaaacaaaacatatatatattatatataccacatatataaataaaaaactccaaaaaaccaaaacaaaaagatatagtgaaaaaactgaagataaattaaaatagaatactaaaaaatattcaaagaatccaaaacaagcaaaaaaataaaaataaaaaaggaatggaggtaagagaatagcaacaacaaaagcaggagacaaatagaagccaaaaataaaaatggaagggctaaattcaattatagcaataattccattaaatgttaatgatcttaatactccgttagaaggcaagggttgacagagtgcataaaaatcaagacgctactactatatgctgcccctaagaaatacactttaaatataaatatacaaaaaaggttgaaaataaacaaatgtaaaatgtatataccatacaaatagtaagaatgagaagattggattggttattttaatatcagataaaacagacttcaagacaaagagtatttctagagacaaagggggggatttcataatgattgaagggtcatttcgtcaggcagacacttcattcatacgtgtacacacacctaataagagagacttaaaatactgcagtaaagattaaccaaattacagggagaaatagaaattccataattgtgacagaagattttaatatcctttctcaatatttgatggaacaactagacaaaaaagcagtaaaggtatagttttaacattgtaaacctccttgatttaattgatatttatagaacactacatccgacaactgcagaatacctatttctttcaaatgcacataacattcaccaagacgaacaatgacggctaaaaaaaaaaaaagaaaaaaaaaggatggtaagctataaaacagatttcaaaatgtagaagaagcaaaatcataggaagtatatttctgaacacaacagaattaagttagaaatcaataacaagatatctaggaaaacctcaagtattatgaattgaatagcatacttcaaatatttcataggtcaaagaaaaaaatgacaagagaaattagaaaatattttatctgaatgataatgcaaatatacaaagtttgtgaaaagagctaaagcagtacttaaagtgaaaactatggctttaaatgcttatgttagaaaaggagaaagatttaaaatcaataacctaaggtcctaccttaagaaactaaaagaagagcaaagtaaccctaaagtagtagaaggaagtcaataataaagatagtagaaataaaatagaaaacagacaagcgaaagagaaaaatcaagaaaaccaaaagcgaagtttttgaaaagatgaaccccaaacctctagctagattggccaaggaagagagagaaacaaattaccaatatcagcaataaaaaggaattctaaccacagattctatagacaataacaagataataagaaaatgctatgttatcgaattctaccacttaaataaaatggacagatttcttgaaaaatgtagcttaccaaaattgatgcaagatgaaataaaaaatttaaatggtgctatttttttgagaatataattattttaccttttatttaatgctttgtgtattgtttgaatttttcttttgttcaactatgtgtgaatgtatttgacagttaaaatgaaaaaattttaattttttaatattatattttctttttttaaaacttgtattttaggttcaggggtacatgtggaggattgttatataggtaaattgcatgtcatgggggtttggtgtacagattgtttcatcaccgaggtgataagcatagtatctgataggtagttttttgatcctcaccttcctcctgctctctaccctcaagtaggccctggagtctattgttcctttctttgtgttcatataaactcaatgtttagcccccacttataagtgagaacatgttatatttggttttctgttcctgtgttagtttgcttgggataatggcctccagcttcatccatgttgctgccaatgacacgattgcattctttttttatgggtgcatagtattccgttgtgtttacgtaccatattttctttatccagtctaccactgatgagcacttagattgattccatgtcttgctattgtgactagttctgtagtgaacataacatgtgaatgtgtctttatggtagaacaatttatacttctttgggtatatactcaatgatgggattgctgggtcaaatggtaattctgctttaaattatttgggaaattgccaagctgctttccacaatggctgaattaatttacatttccatcagcagtgtataagcagcgtacaaccttataccagtgtataaggttgtagtgtataatctctgtaatcttgccagcatctgttattgtttttttcagtaatagccacactgactggtgtgagatggtatcttattgtggttttgatttgcatttctctaatgattcgtgatgttgaaaatttgttcataagcttgttggctgtgtgtacttttgaaaagtgtctgttcatgtcctttgcctactttttaatggcattgtttatttgcttattaatttgtttcttatagattctggatattagaccttttttggatacatagtttgcagatattttctcccattctgttgtctgtttactttgctgatagtttcttttgctgtgcagctctttagtttaattaggtcccatttgtcaattttgttgttgtaattgcttttggcatcttcgtcatgaaatgtttgccaggccctatgtccagaatggtatttcctaagttatcttccagggcttttatggttttacacttaagtctttaagccattatgagttgatatttgtatatggtgtaaggaagggttccagtttcaatcttctccatatggctagccacttatcccagcaccacttatagaatagggtgtcctttccccattgcttattttttgactactttctcaaagatcagatggttgtacatgggcagttttatttctgggctctctattctgttccattggtctatgtatctgtttttgtgccaggaccatgctgttttggttactgtagacttgttgtatagtttgaagtgaggtaatgtgatgcatccagatttgctctttttgcttaggattgccttggctatttggactcctttttgattccatatgaattttaaaatagtttttttctaattctatgaagaatggcattggtagtttgataggaaaaacattgaatttgtaaattgctttgggcaatatggccattttaacaatattgattcttcctgttcatgagcatgaaatgtttttccatttgtctgtgttatctctgatttctttcagaagtgtcttataatttgtgttgtagaggtctctcacctctgtattcctagatattttattctttttgtggctattgtaaatgggttgcattttttatttggctttcagcctgggtattgttggtgtataggaatgttactaatttttgtacattgattttgtatcctgaaactctgctgaagttgtttatcagatctaggagcttttggacaaagactatggggttttctaggtataggatcatattttctggaaacagggatagtttaatttcctttcttcctgtttggatgccttgtatttctttctcttgcctgattatcctggctaggacttccagtactatgttgaataggagtggtgagagagggtatccttgtcttgttccagttctcaaggggaatgtttctagcttttatccattcagtatgatattggttgtggggtttttcatcgacggcttttttttttttagactgagtttcactcttgttgcctaggctggagtgcaatggcacaatctcggctcactgcaacctccgccccccgagttcaagcaattctcctgcctcagcctcccaagtagctgggattacaggcgcccaccaccatacccagctaattttttctatttttagtggagacgggggttttatcatgttggccaggctggtcttgaactcctggcctcaagtgatctgcctgcctcggcctcccaaattgctgggattacaagcatgtgccaccgtgcctggctggctcttactattttgaggcatgtgccttcagtgcgtagtttgttgagggtttctttttaatgtgaagcaatgttgaattctattgaaagccctttctccatctgttgagataatcacatggtttttgtttttagttctgttgatgtgatgaatcacaattattaatttacttatgttgagccaagcttgcatcccaaggataaagcctacttgatcactgattaactttttgatgtgctgctggattctgtttgctaatattttgttgaagatttttgcatcaatgttcatcaaggatattggcctgaagttttctttttttgttgggtctctgccaggttttggtatcaggatgatgttgtcattgtagatcgagttaggggggagtccctcctcttcaatttttcagaatagtttcagtaggaatggtattatttagattttgggcattatttgaatttttttctttttcatttttttctcttttttaaaaaataattttaacttttattttagattcaggtgtacatgtgcagatttgttacctgggtatattgcatggtatatccaggtttgggatatgcttgatcccatcacacaggtactgagcctagtacccaataatcagtttttcagccctcgcccgcctctctccttcctccctctgctaatccccggtgtctgttgttgccatctttatgttcatgagtacccactgtttagcttccacttataagtgagaacatgcagtatttggttttctgttcctgcattaatttgcttagaataatggcctccagctccatccacattgctgcaaagaacacgatttcattcttttttatggctgtataggactccatggtgtatctgtaccacgttttctttatccaatccactgttgacgggtatctaggttgattccatgtctttgctattgtgaagagtgttgcgatgaacatgcaagtgagtgtatctttatggtagaatgatttattttcttttggatatagatccagtaatgggatcgcggggttgaatggtaaggctgttttaagttctttgagaaatctccaagctgcttttcacaatggttgaactaatttacattcccaccaacaatatataaccattcctttttctctgcaacctcaccagtatctgttgttttttgagtttttaataataggtattctgactggtgtgagatgatatctcattgtggttttgatttatgaccctgggtagtcaaaggtttcttaggtagaacacaaaattcattaattgtaaagaaaaaaattgattacttagacttaccagaattaaaacattagttccttgaaagacaccataaagagaacagaaatgcaagccacacactgggagaaaatattcttagctcatgtattaaacagaagacttgtattcagaatatacaaagaactcttacaactccaagaaaatggttaaaaggtttaaacagatacttcacaaaaaaatggtatataaacggtgcaacaacgcacttaaagatggttcaacatcaccccttagaatagcaaaaatcaaaaagacccaatgctggcaaggcaaagctgtggagcaactggaactcccacaatttgctgatgggactttaagatggtgcaaccatttttgttgtaccatttggaaaacagcttggcagtttctgaaaatgttaaacatatgcctatagcatgacccagccattccactcctgggcatttacccaaaagaaagcatatgttcctacaaaacctgtacatgaatgttcacagcagctttatttttaacggttccaaattgaaaacaactcaaaggtccatcaacaggtgactgtataaataaatagtgatttatacaatggactactactcatcaatacaaaggaatgaactatggatgcatataacaacatggatgaatctcaaaatcattttggtgaataaaagaagccaggcacaaaaggatacatactgtttgattctattcatataaaattctggaaaacacaattttattctagatcctttattctttgaatagttgaattttaattccttttatattttccatgtaaagtttaagccctttaaaacatccatgtgcagaagttgagagagggaagaagtgtaggccaaagatgtagcattggaagtcaagaagaaaatagtctttataatctcaggagtgacatatttaaataaggaaagtgtagcaaaaagaaagtttaggactgagttctgaggaacacaaacaattcaaggtgggtaaatgaggtaaagccagtacaggaagctgaggaggaacagctaatggggttgaaggaaacccaggacaatgtatgatcagagaaaccaacagagaaacatgcttcaaaaaggaatgaagggttaactatgcccaactccaccaaaagctgagtaagttgagggtataattagtgcccaagaactatgggagtttgaatttgcaaacagaaaaaaaaaataagtagagctttgcaactatgcaagtagttacttgctagtatataacaaattttgcttaacttattcttgaattaacaggttttttatttcaaggagtacaaaattagaaataattaaaataaaaataaaaaataggttcaaaatacataaaatcctagttactatagaccgtttcgatgtttcaccgggtacagaggttattaagttacattattaacttttaactctttgatagtcaccatctttactgctcttgaaattttaattataaaccattatttatcttattactataatttttactgtcataatcaaagaatttctgagattttcaaccaacccatatgatgaaggtatgaaacatctttttatcaccaagatgggaaaacaatggcaaactcttgcatcaatcaagttaaatgaattggttatagatggttcttagtgttggattttcacctgaagtatctgccatcagcctttcatgggaaatattttaatttaattttgaaattaaaacagtggtgtagtttcattttgatttgtatagaaaagggcttagatagtaatgcagtataaacaaccctgacagaaatcttgatttatcggttcttgggggattcagcaaaggctttagggcatgaaaggcataaagaaaacttggcaggaaccagagcagaggaaggcaagatactagccagctagcatggtgttttttccctgttctctgacagaaggaggacagccatgtgaggaagataatcatggcagcaaaagttgccaaagaaagttgcttaagctaaaatcatcaaggaatttgaggcaatgacagttcatcatctagagagatggactctaactggatgaatatacaaagctctgctttctgagaagcaggatacgtctgctgagagacagctgggagtgaactaagcttcattctgcaatctttttgctgacatttgccataatattttcagtgatgtgtaagaaatgcaattctgtaattacatggtctcctggctgtggtctccatccaaagcatgatagtgtctggacccccaccctaagagtttaacacctcctgagtgtacaggctcattttggccctaatggagagaaaaccagcagtgcagaaattcctcaggtgcagcacggtccatgataggagcccactgagtaataaatgccagaggaagttagggtgaaagagacaaccctgccagtaatggtttttaaaggctccatggaaactcttaacctttcaccaccttaaggcaaagagggactgctctgtcctccttcatatgcagactctactttcctttgtggtttccttttctctgtgcagttgccttcagtcgagtttgatagagtggaagggtggggaaatagaggaaatggaagagaagaaagagagtgattttcttcatcctgtcctggatctggatcccttttaataggatctctcctggacagttctgagcacttcgaagtgcatccaattcaggtcacagtaggtgggcaaaggacttcagaccctggagacacaaaggtaacagctcctctttacactgccaccgtctgctttttagtaggaaacctgggagccccgggcagctaccttaatgtagataagagctggcggggtgaggaaaagcgctgggctgtgagtcaggagatttgagcccctgcttactaattgaatgattctgggccagttacttaagtttctctgtgtcagcttctcatttttaaaatgggaaaaacagtactcaccctatctctttaaagggccatcctaaggatctgaagatgatgtacatgcaagtccctattggaccataaaagtttattaaaagttaagtataaaggctcttaagaagctacattaattaagaatattttaatttaaagatctgaaatatattaggggactttcttcttgaaatcccatggtgattctcgtgtaatatgaagaaggaaagttgatgggtgtcttctctaacgagaactctgattagtggaaggttaagggggtgatatcaaataggtaaacagagaaagattgtttcaattgcaggaactagaatgtgtgtagtgaaggaaaaaccacagactgaactttggaaggagtcccatgcaggtttgtaatcttcatgtagggcagagcttcccaatgggtgggtgtgaatagattacaggcatgaaatattggtctggattagttgccttgatggagaacacagtcgtaggtggccaccccgaatctctgccttcacacattgataggtctgttcctgcgttattgttatcgatatgcccatggagtgacatctatgttatcttcaggagcaccgcactaataatgacttgtgtgcactctgcccattagaatttcattattattttgaaattcttaacgtgaaaaaatttggttttgcaacacatttgtattatcagctaatattttaatttaaaagaagagcttagattctttaaacagctttaataattatgaatttctgaatgattataagatgtttaaacaattttaatcacttgcttgtgcaaagttttgcttggtgttactgagaattttaaagacagcatgattttaagaagcctagtgaagaagcacatgtagccattttatgcataaaaccttataggaaaaagttagattcaaaggcgtaagctgaaatttttaaataaaaatttgaaaagatcttatttggaagtttaacataattcaatacttaatagcttccctaatactttcagttttcaatcataaatatataagaaagtcatagtgatttctctcagctttcttccaatttactccattgtgtcacacaagtattatcattgcctctgactgccatgacatgacaccattggagagcagtaaactaaaggaaggcccatcacttggttattggctatctaattgttattgagtttcctgtgagctggtagtaccttgcttcatcagcttaacccactgccaaaagttctttatgcttcttctttgtattatgagcacattttcctctaaagctcttaagtacttgtaaatcaaggctggcattagggtgtttggatacagagattatggatagtaaatgtgaatttcttaattcattgcaattccaacactacccctgagaaaacagcccaagccacatggtacttagaggtaaaagttctctcttgatcaaagacaggtttcttttatgagctggtttcttagagccttctcttgattttgcaggaaaatgggggtggctgcccccatccagtactcagggctctcctgaaagtgctggctgtgggctggtagatatccactttccagagcctactgggatgtggagttcttgcagcaaggaaaccctcctgctgtccctggggctagggaaggtgtctggtgggaattctaggtatctttctgccagtagtaaattacttcatgtttgacttcaagttcttaggttcaattttttaggtattaaaattggtgagggtaaatgtagtaacttactgttttcttccaacaataaacactcaactctggatgacacagttggggctttttataatgactttggcaatttatggcagcatggtatagtgaaaagaacatagcttctggaatcagacaggcctaagttcaaatttgaactctgtcacttactaggtggccttaacctctctgagtctcagtttctttacctgtgtaatgcaaacaataccctaactcctgggattgggacaagatttaaaatgggagaacatatggcaagcacccagtttaatgcttggcacgtagtattcagtcaatgacaggtattattgttattgctctattattagcccgtaattacattcaaaaggacatgtattcagataaacattactagcagcttgagcaggtgatagggcatttgtaatttaacttgtgtgcttatttcagactcaaaaattactttatctcagaagtaaatcagaactcctttcccttctcaccctggactaggggtagataaaggggtggggctgcttcactaaccttctgtgggttaaagactaaatgaagactttctaaaaaccagaatgctaacagtggttccctctggtaagtgggacttcaggtgctttttcctttcttggtattattctgaagtctaaaaagtcaagctattttcattttgtaaacataaaccagaccaaagatgcggaatggtaaatttttttatttctttgaaaacttcgttcagcagctgcacacatcccacccccccaccccatccaaccccacactccccagccatgtatcctactaagtcggtcaactcggtccctggctcctaccaggggcatcatggtgctggaaaggttttctcgttttcctccaggcaggagggaacatgatctacaggcaatcaatgaaaagcagcagcaaagtaacgcgggtaatgttcaaaaataagacaaaacaaaaaacctaactgcaagcttcagaatctgggaaaccagctagaagaagagagggagggaagtgggggaagcaggacggataaaaatacagttacaacaagaaggaaatggaaaataaataaaggaaattccttcacccaaactaagtcccttgagggagatttgttagaatggatggtggttggggggcaggggagaggggataaaattcatgtaggactgtacaatttgtgggggattcttctaaaatcatttcaaaaaggacagccaagcagaattcatacaggactcatttggatttattactctcttttgcagtctacactttctgaagtgtggatttatgagttttagatcatttgtttcccgtcccactaaggtaaatagctcagtgcgtttggtgcatttatgattgttgtgcagaggagtgcagctgatgaattacttcctttcatttatcttttgaccagaaaatgtatggttttctagcaatttaacttttaatctgtaacatttttcttctcagttttgttgcaggtgcagtatagctgtttctaatctagggaggttgggtggcccagaggttagatctatgctatcaaatatggtagcccctggctggtaagcacttgaaatgtggctagtctgaatagagatgtgctacaagagcttagtggattttggagccttggtatgaaaaaaagaaagtaaactatctcattaataatttttatattgatttacatgctaaaattataatattttggtcaaagtgggataaatataatatgttattaaaattaatttcatctgtttcttcttcttactttataaatgtggctacaagaatacttaaaattacatatgtggctcgcatttgtggctggcattatatttctattggacagtgttgaattaagagcaagagcttgggaagttcaagtcatttcctgccttatgaacttggataaattatgaaaactctctaagcttcaattttcaactagttaaacaggaataataatatctacctaacagggttgtaatgattcatatgttgtgattaatatataattatatttataataatataagtaacataaacatgtcattatttatggtattacttgaaataattcctgtgatatctggcagataatatgcactgggcaaatgctgattctcttccttgtgcattttacttaccactagtaaatgtggccactttgtttataatgaattgtttgggatcaggataaagtagcctgtacttgtgtatttctcttcatctaaaagattagagtccttgacaaatagacagtcacacaaggtctcagaagggaagaccaccattttcagctagatggagaatgagtttgtggctgaacattatacctgtggcatctcccatatatcattagctgctgtgattgttagacacacttggaggcattgattaaagttgttcatcttttgaagtgtctgaggttgtcttttaaagcccccacataagtttctgatcatctccaagagttaacaagtggagtatgcctggagatattatgaagtagacaattaaaaaaacagggccaatctcatcacaacttctctttctccttctactccctattaattttcagccattagagagtaaaattatgtggtttggagttggtttgccttttcaagccccaagggattataacccttagttatagattaccttcaggtgtcaggttttcttcagggatggcactcttttatgaatagaacccctaccaagcacctgtgaaatccaccctctgtactgctcacccagccttctctacttgcaagttgtcccaaaatgttacaactaggaaatgtgagtttttggtggcaacaaaggtggggttttttttgcccacaaaagtgaattcaagggatttattttggttttaaaattaatattcactttttaaaggtacaaatttgaaaacctagttattcctttagtttttaaactcagcttacagctcttattattttatttatgtcaacacatttaacaatcactcttaagatgggcttcgaataatgttttaatttacaaattgtacttctccctatttaacttctctttacagttaaatattttgattttctttaacaaaacttttctgaagatttaaattatgcttataagtttataaaataaatttatacatatgctgattcttaatttctcttaaatattctaatactatacataattgtagtaagattgtatgtttaaaatcacaagtctatatgaattattcaatgaacaatttaaagctggaattacaagtctcatctattgctctcttagggcaaaactgcttaaatcctttatgcttacattccttctaattctattgggtaaacgactttggaagttgcaacaagatagatgaataaatgagatacgtccagaattcaaaggggttatcattttaatatccattcaaattgcatgaccctaagactggaagcatatgaaaagaatacagcaatcttttaagagtctttaacatagaaaatatatatgttatgagacaatctcatggacattaaaagtataataaaggaatgctgtgaacaactccatgtgacaaaatttgatatcgtagagaaaatgaaccaattctttgaaacataaataatcaaaactcacaaaaggggaaatagataagctaaatagtcttatatgtattaaagaaattgaatcaataatgaataacctccaccaaaagacagcatcaggaccagtgaattctaccaaactgtgaaggaagaaaccagccttaccctaataccaaaaccagacaatgtacaagaaaggaaaactataggctaatatctcttatgaacatagatgcaaaaatcctcaacaaaatattagcaaattgcatccatcaatgtataaaaagtaatatattactatcatttgggattcattccaggtatgcaaggctggttcgacatatgaaaatcattcaatgtaatcaattacattaacaggctaaccaaagaagaaaaatcatacaattgtatcatttgatgtagaaaagtcatttgacagaatctaacaccccttcatgataaaaattcatcaaaccaggaataaaggggaacttcctcagcttgataaagaccgtctacaaaaatctcaaaactaacatactaaaatggtaagagactggatgctttccccataagattgggaacaagaaaggatgtcctctttcaccactccaatttaaaattgtactggggctgggcgaggtggctcatgcctgtaatcctagcactttgggaggtcaaggtagatggatcacttgaggtcaggagttcaagaccagcctggctaacatggtgaaaacccatccctaccaaaaaatacaaaaattagctgggcgtggtggtgtgtgcctgtagttccagctactcaggaggctgaggtgggagaattgcttgaacccaggagttggaggttgcagtgagctgagattgtgtcactgcactctggcctggatgacacagtgagaccctgtctcgataaataaataaataaataaataaataaataaataaataaataaataaaattatactggaagtcctatttagtgcaataacatgagataaaaaaataaaagtatacaaattagaaaggaagaaataaaattgtctttattcatagatgacatgattgtctatatagaaaatctcaaagaatcaacacaaaaactcctggatctaaaaagcaattatagcaagattgcaagatatgaggttaataaacataaatcagttgcttttctgtatatcagtaataagcaattggactttgaagttaaaaaaaaaaaccctttataataacatccaaaaatgacatacttagttatatatctgaaaaaactaggtataagatttatatgtggaaagccataaaacactgatgaaagaaatcaaagaaggtccagataaatggagagatattctgtgttcatgactggattgctaaaatgtcaattcttcccaatttgatctatggattcaatgcaatcccaattaaattccatcaagctattttgtgaatatcaacaaatggactctgacatttatatggagacacaaaagaattaaaatagcaaacatactgctgaaaaagaacaaagttagagaactatccaattgccaggcctactgtgcagctacggtaatcaacacattgttttcaagaaatgacagatatggaacagaatagagaacccagaaatagatccatacaaatatggtcaactaatctttgacaaaggaataaaggcaattcgatggagaaataatagtctttgtcatttcaataaatagtgctggaacaatggaagtccacatgtagaaaaaaaaaatgacacagatcttacatttttggatagttggttttgagctgtgatttttaggttgaaattttaattagcttatatttggtataaaatcaaaattcaccatatttacaaatttaatttatcagatatataagaattactttaagtacagaggaaaatttgttggataaatacaattgaaatacttaaaaagtatactgaatatgttaaatttataaatttagttgtaacacttgaacattaagaatcaatattatccaaagagctcttaaaagtgattgttaaaatctgctacagttaccaataaaataatacttgtaagctgaacttaaaagtttaaggaataatcaagtttctgtattcttttttaaatgtgtgacaggcgttcagaggatcatttagaatccttggttcataacacattctcatcattggtccattcttggtatttatttggttggtaactttaataaaattaactcactattaatttttatatccaaagtaaactctgaatagtcttttctttattccaaaactgtctgtgagcccataaaaatctcacatattcataggatgaaggtgggatgtggaaagggtctaaaatgtgttttcgtgaataaaaatgattgtttagaaatagtagcatttagcctagttattaaagacaggacatttgagtaatttaaaaaaatagatgaaatggaaaaacactcacccaataaggtttctattgtaaaaaggccaaaggggacgacattcagaataaaaagtcttatacttggaagtgaacagataactaaatttaatgagatggtccgggacacataggaaccctcaaaatgttactagaaggttatggtgagcctagaatattgaggggtgagtttgggccatctaaggtgaaaatgtcagctagacagtcatagatataatactagcactctcggggaaattggaattgagaacacaatgtggggaccaccagcttagaggcaagagctgaagctctgaagatagtgaaggcctccctgggggagatgggaagagaggaatgaaggcagaagaaaagttgtttttctttcaaatcctctatattttatattattccctgcttccttttcctcctgcttttggtttgggatggggatatctcctcttggcttataaaattatctagagaccaggagccaccttgtagagtaggggtccccaacctctgggccatggaccagtaccagtccatggtctgttagcaacagggccgcacagcaggaggtgaatagcaggcgagtgagtgaagcttcatttgtatttacaaccacgccccatcactcccattaccctctgagctcagcctcctgtcagatcagtggtggctttagattctcacaggagtgtgaaccctatggtgaatggtgcatgcaagggatctagattgcgtgctctttatgagaatctagtgcataatgatctgtcactgtctcctatcacccccaggtgggactgtctagttgcaggaaaacaagctcagggctcccattgattctacatgataaagagttgtatacttcattatatattacaatctaataataatataaataaattgcacagtaagtgtaatgcgcttgtatcatcctgaaccatccccctccactccgtgtctgtggaaaagttgtcctccatgaaaccagtccctggtatcaaaaatgttggggatcactgttgtagaggacacagagaggttattttgagaaccccaaagctgttacaaacacacccaatagacagcacacctatataactataggtattcaagggcagttactacaagacaagttttcaggaccaacttttcatctttgagcggatgcacagtccggactggttttcttccgtaagagagaaagagggagagcaaaagtgagaacttttggggcagggaggaaaagtcaaagggggatggtcaggttcaagcatgaggcccttggagactgctggccaggggtgctgcagagtcaccgtttctattgtgtaaactttcctatgctgacagattgcctggtgtgataacttcactcttgtgtgcaaatactcttccttaaagacacatagagaaaagctggccaagacccaagaaatggctgtagaaagatattcattctcagggcatttctgaaaacacattttctctacattttcagctttcaaattgtataaattttctcttgacttctgactcaaaaatcttctcaaaccaggcatgtcagtttcttaattaaaaatggtgtcttagtctgtgaggcctaccataacaacataccacagactgtgtggcttaaaccacaaaatgtattttctcacaattctggaggctcgaagtctaagattaaggtgtctgcagatttggtttcatctgaggcttctgtccttggcttgcagatggctgccttcttgttgtgtcttcacagggcctttttctctgtgcctgagtatccctggtatcttttctttttgtaaggacaccagtcccaatgtattagggcccattgttttgatctctttaaccttatttacctctttaaaggtcccatctccaaatatagtcacattggggatttgagcttcagtatatgaatttgtgtgtgtctgtgaggggggaaataattcagtccataataaatagtaagctgagatttgtctactatggactccctgtcacacagtaagtacttagcaaatatttgtagaatgagtcaggctgtgactgggtaactcatttatcaatgtgctgccatattttttaaagtctcataaaccttagtcaattaaataaatttttcattttgcaagagttggtaatgatggcctagtaactttataaatgggctaaaatcaatatacttatctttaacatgagccctagagggtcagatcaagccatagtgcaagaccctagtataattcctttcctttactgaagtgttatgctggaacaacattgcagtgaaggtttaaaactaaatattgaagatgaggtggttttgcaaactttctggatgatgtgtgttaagaggcacagaaggcaagcatcttgctcccttcttacaaagaaacagaagtggtgaagtaacttgcctaaggtctcatgcaggtgagtaccagaactgggattagaattcagtcttgtgtcactccagggtgctgtttttttttctttttttgatgtgcttcttgtttagcccatttagctagtgaatgtgaagattcaaggagaaaaggcttttccttctgacattgaagtacctaaactctttagaaaatctactcaggtgcatttcataaattgattacagatgaagtccaatagtaacattgtttatatttgtgaaatctaccatacttgtcagtttctagtttacagattatataaggaaatcacttacatccaaaatacaatctttgccagtacaccagcacaacctcttgggaatcttgaactacacatatactgaattgatactgcaaatcaagtcatttgcccaaatggaaggatttagggataaattcagccaacagttacatgctcagattcaagaatctgaaataaccactatattgtatagctaaaaataaagcagtttgcacaacacttggcattttcagttgacctagtcaatagtagctaataatttttataattcttgagtgaagtgagttttttctttattttacatgtacaactggaatcctgaaaagttaatagattatcttttacctaagtactacagtaggtaaggtagtattgatagtcttttactgaatctacaaatatttttttcttgaacatgacataatttcttttaacagttttattgagacataaccaacaaacaataaactgcacatacatatagtgtacaatttgatgttttaacatatgtatattcttattaaaactaccaccacaatcaagctaataaacccactactcctaaaagttttcttgggtccttttgaaattcctctttcctaggtaaccattgatctttttttctgtaactacacattaacttgcattttctaggattttatataaagtgaaacatacagcatgtaatctttaaaaaaatctcttttctttcagtcagaatacttactttgagactcatcaatgctgttgaatatatcaataattcactcctttttattgtggagtaatattctattgtatgattatatcacaatttctttatccattcacttaattatgggcatttgggctgtttccagttttttgctgttacaaaaaaaaatgcagctatgaatatttctgtacaagcctgtatatgaacatatttattttcctcttaggtaaaaacctatgagtggaatggctggaacatatggcaggcgcatgtgtaacatttttgaaattgtcaaactgttttctaaagtgattgtgccattttacattcacaccaacagtgtatgagagttccagttgcttcacttccttaacatcgctgggtgtggtcagttttctaaattttagccatcctaatagatttgacttcatgctttattgtggttttcatttgcatttccccaaagactaattatgttgaacatctttacatgtgcttatttccaattgtctacctttggtgaggtgtctatttgaatgttttatttttttaattgtttttatgttttcttcttaatgagttttaaaatttgttctttgtgagatatgtagtttataaatattttctcctagtttttgcttgtcttcttattctcttgtcaaaattaaaagcttctgctcttcaaaagtctattgagtttcaaattatcaatttttttcttttatgggttgttcatttggtgttatatctaagaaatctttacctatcctgggatcagagagattctctaacagaagttttataattttaggttttacatttaggtctatatttcattttgaattagtttttatatacaatttaaagtatggatcaatgtttatatttttgcatgtggatatacaatttttccagcacaatttatagaaaagcttattattacttccctgacttacctttgtacttctagcaaaaatcaattgtttgtatatgtgtggacctatttatggaccctctattttgctccactgatctatttgtctatccttatgccagtgccacactgtattgataactgtagttctataataagacttgaaatcaaggcatgtaagccctccagtgttgttcttttttcaaagtttcttcagtattcgaggtcttttgcatttccatatgaattttagaattctcaatttttatggaaaaatttacttttgactattgaaaaattgaattttgattgagattgtgtcaaatctttatagatcagtttggagaaaatagacatcttagcaaaattgagtcttctgaggttgctcataacctaccttattggacacaacaagaaagaatggcactgccaatgctgtgcagcccccactctgcccttagtatgtcacatgtggcatctgatgttcaggctgagcaaaatgtcagtgtcaagtcatataataaattagtcacaaatgagcttaattccttgccttctaaaaataaaaataaagagaagattaagttatagtattttcttcctataccccagtgtataattttttcccgactaagtagaccactagtaaaatgcctttctacctctaagatgctagaatagaaaaaaaatattgttccctgctcatcccaatgatcaaaattaccttgtattttgtgatgactgctttggatttccaaggcagtagccaccatgtctcacctcatgccctgcatgacttaagggaaagaagagatcatagacaacatctggctgtctagtaagtagagcttgacagtgtcagaaacaagatgcgatgcagctattactttgttagctatagtgctctgattgttatttgttgatgaaagctgtgggaagaaatggcaatgcatataaacaggagaaatttagttataatttatgcttctttagaaaatgccagcagcaaacatcatttccaaagcattcaaaccacctatgactaatcacaggatgaccaatgttccccttgtgacgtggtaatcaagtgcgttgaagacattccacctaattttgagcattttaagcagtatgatgccatgattcagattttcctattgcaggtgtccacaatatttccaaatttatgatattttggagcctatgcatttttccctatgggcattgatgacccacactgagtagaatgagcaatgtgggtgttggattgctgggcaattcttatgctccctggagggatccctttctcaattgccacggcagctattccaaacctttacattcattaacatccaataaatattgatggaagccttctccataacagaaactgtactcccaccttctacctatgttttcttcatttttagcagataaatcaaatttttaacttttcaactacactttctctttctacttccaaatgtgcccattgtctcacatctttttacttctatcctttctatctctcaagaagacgcatccttctcaaatacatcctcaccccctattctcattctggctgatctcctgtgtctctaggaactttgttcagatattctgcttcctcttattttccatcttttcaactggacccatctttccagattgcaaatctgatagtatctccccgccagcctccccactcccacacactaaaccctgcagtggtcactagtactcttaggatatattgagaaaaaattattccatttggcctccaaagccctacatagtctggcttctgcctgcctccccattcttacttttttttttttagacagagtctcactttgttgcccaggccagagagagtgcagtggcactatctcggctcattgtgacctccacctccgtggttcaagagattctcgtgcctcagcctcctgagtagctgggattacaggcgtgcaccaccacgcccagctaatttttgtatttttagtagagacagggttttgccatgttggccagctggtctcaaactcctgctctcaagtgatctgcctgcttcagcctcccaaagtgctgggagtacaggcatgagccgccatgcgcagcctccattcttattttcactcattcctcctctctctgctctacacatactggattttcaatccctgaaacacatcttggggtttctcctatcacagggccttgcacaagctcttccctctttacttaagttccactcatctttgctgtcttacttaagcataatttctgtaggaaaaccttccctgacaagttgttattctgccagttttttccctgtagactcccatggcttgatttatgtcttattcttagaatttgccataattgacatattctatttagtgagaatgattatttgattaacatctgtctccctcacgaaggtataagcttcaggagggcagaggcttgtcttgttgtgcccaccacttaataacagaggctgggccaggtgcagtggctcacacctgtaatcccagcactttgggagggtgaggcaggaggattgcttgaggtcaggagttaaagaccagcctggccaacatgatgaaatcccatctctactaaaaatacaaaaattagctgggcgtggtggtgcctgcctgtaatcccagctactcaggaggctgaggcacattttcttccttcacttttttctcttactactcttctctcttccttctttgttttgtttactatcttttttctctctttttatcactttatctaataaatacttattgggcaaatgaatgaaatgctagttttcctgagggttttctggtttttgacttttttttctctttttcgtctgcctccttttccttagtaatcttatccaacaccatggcttcaccaccatccatatccataatgccccatgatgtccagacctgtattttcaactgattatcttcctggaattgtcctctagttacttaaactcaacctaactcaaaccaaagtggttatcttccttaaatatttttcttctgcttaatcctaccctttgtaaagtttgccactacccatttcaaacggcttaaacccaaaacctaaggtcatttttcttccttttccacaaataccaaattctgttgatgcaaatgaaatgtccctttccaaaatccccacttatatgcccctaagtactattgcctagttttgttcttctctaacttttccagaaggagaactcttttatgtaagaggaatatgtaaaaattatgacatgaggtggacggaagggagctgctctagctgaaggtgggagaagggatctgaaagcaaccccttgcccactgaggcggtaccagaagttggtatagtttgaaagctactagcctacgttactgcaacaccctttaaaaaaactgcttttacattttttttcacatgtaaaacacagaaataatagagatttatgaaatatctactatgggctaggcattgtagcaggtgctgtgaatataatggtgattgaaatcaatatagcccctgctctcaaggaggttatatctaacagggatggcagagagaaaaaaagcaattataaccaagtgaagtaagtgctatgatgtgggtggcaaggagctgcgggctatgtaggagaagacctaatgtagtgcagggacaggttgggggtggaccacgggtagcttcctacaggaagagactgttaggctaggacctaaaagatgagttggagttcagcaggtgaagagaagagaagactgtttcaggcagaggaaacagcactgttggttgttccaagggagctagctcagcactgtagggagaggagcgggagtgtagagtgagtattcacgtcagggctcatctttagcttaaaaagaaccagggaactctggagagtctagttcagagtataatgctttctccatccctttcttgccccgtcctgcctggtttcttctttcggctttggtactcattgggattagttcctcactgccaagcttgaagccaataatttgatctgaagcagaggactttcagcaaaccaccggaagcctccttgatcccaatctccatgagacaacctcaaataattcagagctgtgtaaactttgaaaccacataagccccacccagagacgtcataactcttaaaaaattcttcctcaaacagaggaatttcgtaggcttgtttgatctttttatgttgctgttttcaggatataacttttctcttttcctatcaagcccaggctctaggcagttatccaagagaagagaggtctggagacttcagcctgtctcagggcacacatcaaggcagagatgaaaatataggtgaatagtctgggatatctttatgaacacttctcagatgacttggctgaaatctttctcttacatcagaactcaatggttttaacaacacagtttgataaaaaacattttctttagcagtcatgttacagtaattaacatgtaaccttgggaactctatacgtgatttaattcctctctgaaccaatttttcctagttttgtagacatatcttgggtttctttccaggtacaagaagagttttaagaatgatggccatatggattttctgtttagcagaattctctatattttgagtatctttacccaaaggttagtattagacagtgaaatgaaaattaaaatggaaataatagtacaataggcctgcatgttcttatctgaaacttttgtggccagatatatttaataattcaaaatatctgagatattagaaagataatatggtgcctatattacataatattataggtggggtctggagtgtgatcacgcataacatgtctgatacggaatatctgaatatccacactgcatagcatagcctcacgttagttcaccaaatgaactttggtgccacacttaacaaaaataccttagtttccgaagcattttggattttggaattgctgagaagtaattgtatacctgtccttgtcttgcttcactgagagagttgctgtatcaagggtgtttaatcagaaaaatgttatttcatcataaaatgttattttatagcctagcctaacagcattggagaatctttgtcccccttttttttttcggcacatgtctgtttgcaaaatcttttttggttataattaaagtaattcctctattggaagttcaatatactattctatgatctgagtcattattttactttcagtccaccagctgctgtttgccaagctgattggctttccaatatatatttcatttactataggttgcaggggtatctctttccagatgatctattggacatagtcctttatgcctctattacttgttttgagaaacttttcctaagttagttgtttagttgactgtgttggtccggtgggcatctcagatttatttgtctagaaactatgctacctggaggcatagaaagagtaaagtacttggaatacccagaactcctggatttgcatttcatttctgcttctttctagctatggtggtgatggcttacaatccattgaacttgtctgagctttaatttctcaacttcaaaatggggattaataataacagcttttgctacttctcaggcataatgtgaagtaaaatgagaagaggttggtgcaaacaagaagatacagtgcaattcacattcaacgaaagggaacggtctaaatgcaaggtctatatgcacttaaggtgtttttattgataaatattgggttacatggctttacttctgctcagatctggatagggaccatttattgagtggctgctgtatcaggaaccacaggaggcaacctcgattaatcccagtaaaacccctttgaggtggctgccatcattctctatttgagagaggatagagacctgaccaaggtcacatcaccacttagcgcctgagccagattgaaaaccagatttgtttgatggtaaagtcagcactccattttaattgcaaagactattgtgcaatggtgaacgttttgtggtgtttttttgtgtgttttgaaaattgagaacaagatgggattcataacaaattagatagttcacttttcttatatgtaaattccagacagtagcaataaatcacacactttggatgctcaggggaaattagttataatttaatgctttggaaaatcattatttatccccctttgtggtagaatttattctcaacatccttataaataaacaaaatgttttactagctaaaaaaattaccaatccattctttcttcacaaggcatggagacagtagaacaacggcatttttctttactatcctcttggcctaattgttcgcttgtcctgaatcagttactgaactgagaaacccaggtaagcttcccatagcattctcctttcttatttctagtatttggttcagtccgcgatactcttttagccatcggtgactgctcttactgagactgtggctgtcctcgcccagagttgaggtaggggtaggttggggatgggagactcactactaagcactgtggagtctatttgagtccctggcagtatctgtccgatatggtctggctctgtatccccatccaaatctcatctcaaattttaatacccgtgtgtcaagggagggacctgtaatccccacgtgtcaagggagggaggtgattgggtcatggggacagttaaccccatggtgttctcgtgatagtgagtgagttctcacgagatctgatggttttgtaaggcagttttccctgctcttgtttactctctctcagcagcatcatgtaagatgtgcctgctcccccttccgccatgattgtaagtttcccgaggcctcctcagccatgtggaactgtgagtcaattaaatctcttttccttatgaattacccagtcttgggtatgtctttatagcagtgtgaaaataaatgaatacactgtctatctgtctgtctctctctctgttatttaagatcagaacaggacttactgtatgacagaaacacagctgaaggggtgttagaaagtccggagcttatgaagacgttccctgacctctccttttgttaactggggcttcattccagagaataagagcttctttatgggttcagacacttctggctgcaattagccgattgttaatttatgtctgagtgttggaggctttagttagataaaatatttaaaggatttagtctcagtgaaaagaactttaagtaagaatggctttgaggaaaagagaaaagttagattccagctttccttctgggtgctgactatggtgagtggggaagtaggttatgagataataagagctttattgtcaatttttgcattcttttagaggcccccacgactttagatttccttaatatctttctccctttatagttaatttaaaaaaatattgagcactttatatgtgtccacgcattctattgccctggagcaaactctagtgatcagcacgtccataatccttgctcttatggaactcacagtctagtggggaactacacaaaaacactgcaaagttgtaaccaatgtttatggtttatggtgttatgagcgttgaggttgttagggaagactgtttttgtgtgatgcattcatcagtgttggggttgctatagcccatttttttgtggctatcagctttaggtacttttattaggtcttaaaaagaatattctagtaattaatcatatagattgtagatgggttgctggattgcattgatttttaaacagatatatatacacacacacatacatggaagcacacatacatataagtatatatatctgtgtatatgttacatgtgtatatatatatatgtatacacatatatatgggtgtgtgattacataagcaatgtaaagtgattgtagagaatttggaatatcataaaactacaaaaaaattaaacttacccggaaataattaatgtctatctacatacctatctctagtctttttttctagacatacatagatttaaaaatataatttggatcatattgcaaagttgagtttgcattttcattgaatcacgaccatttctcttgtcataaaataatctttaaaggaaatttttttacttcattatactctatatttctatcagaatttatgtaattattcctttattgaacactagtaatgtgtcccatttgctactataaataatgctgtgaagtgcaagtttctatagtttatgacaattttcttttttcttcttttttttcttttgaaacattttattttatttttttcgactctttttttattttattttattattattatactttaagttttagggtacacgtgcacaatgtgcaggttagttacatatgtatacatgtgccatgctggtgtgctgcacccattaactcgtcatttagcattaggtatatctcctaaagctatccctccccgctcccccgaccccacaacagtccccagagtgtgatattccccttcctgtgtccatgtgttctcattgttcaattcccacctatgagtgagaatatgcggtgtttggttttttgttcttgtgatagtttactgagaatgatgatttccaatttcattcatgtccctacaaaggacatgaactcatcattttttatggctgcatagtattccatggtgtatatgtgccacattttcttaatccagtctatcattgttggacatttgggttggttccaagtctttgctattgtgaatagtgccgcaataaacatatgtgtgcatgtgtctttatagcagcatgatttatagtcctttgggtatatgcccagtaatgggatggctgggtcaaatggtatttctagttctggatccctgaggaatcgccacactgacttccacaaaggttgaactagtttacagtcccaccaacagtgtaaaagtgttcctatttctccacatcctctccagcacctgttgtttcctgactttttaatgattgccattctaactggtgtgagatggtatctcactgtggttttgatttgcatttctctgatggccagtgatggtgagcattttttcatgtgtcttttggctgcataaatgtcttcttttgagaagtgtctgttcacgtcctttgcccactttttgatggggtttttgtttttttcttgtaaatttgtttgagttcattgtagattctggatattagccctttgtcagatgagtaggttgtgaaaattttctcccattttgtaggttgcctgttcactctgatggtagtttcttttgctgtgcggaagctctttagtttaattagatcccatttgtcgattgtttatgacaattttcttaggctagattttgagaagaaaaataacagggtcaaagggagtgaaattttaaggcttgtgatatgtattgcaaaattgctttccaaataggtaatataaatctagctcccattagcaaagtacgagagtgattattttattggttaccctgtcattgctgaatatgattattgttaattagatggttgaaaaatattatcttctttttatttctattctggtctactagtggaattaaattcttttttttttttctttgagacagtctctctctgtcaccaggctggagtgcagtggcgcaatctcggcttactgcaacctccgctgcccagattcaagcgattctcctacctcagcctcctgagtagctaattaaattcttttttatacagttattagtaattagtacttttttaatgaatctcagtttatgttctttgctcgtttctttattatggtttttagtacttgtttcataaaaactttttatttattaaggatgccaataatttgtcatatgcaaagttttccgagttatttaacagaagtttctaatttgtatgtaattagatctacttgtcttttctttttgatttctagcttttatatgctcagaaagtccctatcctattaatcagatattttgtctatgtgtttgaaagctagatgaatttttaatatggtgcccataagatacttcagcaacctggtgcagtgcctaataaatacggcacttggggacatgatgtgtggttactagaagtttgcctaatagttagatctcaatagtcattggtcactgggatgaatattcattaaaccatgttttgaaagaggaataaatattacccagtcaaacaaaagggagaagaatcttccagataagggacccatgacatgaaagggtacagagggaagaaaccaaaaccatgatgtgcaaggaatgcctgcagcaggagctcagcatacatggtagggaaggtgttagttaggcatggccagatcatgcaattttcaggccatgatgagaaacttaattttacataataaaaaatgagaaatcattacaggggtttaagtaagaaagtgatgtgggccatattgacattgggaaatttaggtacattacttcagtttactaaaaatagtggagaagagaattggagtagatgagatttgagtcctggcaatccattagggaaaaaagcaagttacacttagcagcatttaacaagtgtgggctgggcatgatggcttacatctgtaatcccagcactttgggaggccaaggcaggaagattgcttgacaccaggagtttgagaccagcctgggcaccatagtgagaccccttctctacaaaaaatacaaaaaattagttgggtgcctatagttccagctacttgggaggttgaggcaagaggatcacttgaacctaagaggtcgagactgctgtgagctatggtcatgccactttattccagcctgggtgagaaagtgagaccctgtctcaaaaaaaaaaaaaatgtggaaggtagtatcatttgagctagagaggaatacattcaggagatatttagatggtagaatttttccacttccccttgatcctcaaaggagggccaggctcatgcctgtaatcccagccctttgggaggccgaggtgggtggatcacctgaggtcaggagattgagaccagcctagccaacatggtgaaaccccatctctaccaaaaatacaaaaattagctgggtgtagtggggggcacctgtaatcccagctactcaggaggctgaggcagcagaatctcttgaacccgggaggtggaggttgcaatgagccaaaatcatgccattgcacaccagcctgggcgacagattaagactctgtctcaacaaaacaaaacaaaacaaaacaaaacaaaacaaaaaacaaaggacacagcatagcatagagaaaaaaagatctggattggaaatctgaagcctggctccaccaccagcaccatgatctttactagttacctcccctctgagggcctctacttccttatttgtataaggactttctgaactagatgatctttcaagtgtctggcagttttaacacttctgtgttcttgtagttttagacaccagcttagtgtttcgaaactgtaaaatagcctgagaaatcttgtgaaaataggaacttgcacttttctaggatttttgtttcctgtttttataaaatttgagctagtgaggactagatatcaggatgagcccctgcctgcctcttggccagctttgtagaggggtttctgatgcccagaggagaggcagtttgagtaagggcagccgacagcaagcatggagctcgcacacagctctctcgccttccaggcgtggctcagtggcaccatccttgtggcctcctgtcttgtgaccatgagcagacacgctcgaatatgatggccatgtagccaactaactacagctgttggaagctcaaacccgtggttcaaatccattggcaattttggtaaaatctagggtttggctcattcagtctaacaatgctcacccgactgtgtggccagtaatttaccaaaaacagtatagcttgttgccattttcatctttagtggaggcagaaaaatggaaggatatagaaagagaaatgtctcgcctttcagaagctccttgctctttggtatttagtttgctattttctgtcatttttgtcttgagtcattagagttgggtttctattctgctgtctgccttgcaatgttatctaaggaatctataagcagcttaaccctgtcaacggaagattgtactaaaacagcctgttcaggaagccctggaattccacgcttcaagccattagctgtgtcttgcttacatgaagcttatcacgccaccctcagaaaatttccatcttatcatgggcggcattgtaaataatggaaaaaactgtctgaaactgtttgaatgttttcttagattatttggaaatttccagctttgtgcactagacagaagacctttgacctctgggatgacagcataaaggcgaggtatgccttctcttacttagccagggagggcccataatgactgtgcagacactttctattatttttgtcatgaagtctctgaatttagtcaccgagcctatgggaaacaaattcgctttaggaaaaaaagcttagcaagaagaattcattcctcaagtgtaacacctttttttttttgagatggagtttcgctcttattgtccaggctggagggctggagtgcaaatggaatgacctttgctcactgcatccttgcctcccaggttcaagcaattctccttcctcagcctgtggagtagctgggattacaggcacccaccaccacgcccagctaattttttggtatttttagcagagatggggttttaccatgttggctaggctggtctcaaactcctgacctcaagtgatccgcctgccttggcctcccaaagtgctgggattacaggtgtgagccaccgcgcccagcaagtgtaacacttttaaaggtcttttatttatctgcctataatcttaagagtgagtttttaattaaattttgtcactgaaaatttattattcctttaggaagcaattttgtggggggtgcttaggttaatatgtaattatatacttaaaattcttctaggttcatttaaagataaagtaatatatcagttattacaagatgccaaaggctaaaacatgcaattttctcagtccagctcactttttgtttccaaagccctttgcgtgcattaacaatctttacacattatgaagtcactgtcgccatttagcccacctttgcatcatgggctaaaatggatgcaaagggttggttaactcaaagccatgtactttattccacctaaattttgttcattctgttattcaacctgaaatatcctttcccctcaatttctgcccgtgaaaattgtatttgtctcttaagattcagatcaaatattacctttccttacctcctagggtagatttctaaagaaaaggatctgtgaacatttaggaaagcaagcagtggtcaccaggaatttgtgtggattgctgataaagaagtcattctgcactaacttcatctcttctttggcattatggctcatctgataaataaatgcaatagacgtatctttggatttcagtaagtctttgatagagtctctcttgataggcttttggtctatcaatagtacaattagggggattagtaactggttaaatggctaaagccacaaatgactgaataatggcttttggcctgtgaaatatttcccgtgaaatgctggcatgcatttgtccttggccttgtcttagagaaaaaaattattaatgatgaatcagtcagaatagatgtagataatgttgtagtattgaagaccccccaccccatccccactgccaatttagtggtttaaaacaataaatattgatttctctcacactacttgttcatcttgagatgatgggggctggatgggtggggtctttgctttgggtcattattgcagtcattatttggaacatcgttggctgccaaggccgtgtgaaaagagatggtgaggaagcccatatggatgcacaaccatacacacctcaagtgaatgggtgtgcaaggcggcagtgtgcctgcaaggagagaaatgccatgtttgtgaaaagccctaatgaccaccacacccattgggatggaaacaaggtgttggtggatgacacacaattaggtgtatagtgaataggattttccctcagaggacctgataggaggttctgaactttttcagtaattatttagatgactctgggcagatcacttaactttcttcagtcttggtttccttacctatagaataagaccatcagtgatattaatgtgtctgggtgatggtgaggtgctgtctggctggtactggtgtctctgagcttggagtcaggtttctctattggtgctttattcttagatgtataaaagttgttaattgtaaaatttttattatgaatggtaccattatcaatttttaaaaattggctttttaaagttgaatgtaatttgttttgaattgtatattacatttgtctgatatatttttgccaaacttaaaaaacaatgtgtcaaatctcttatagatagctcattgttttttattcagtctgaaagcctttttcttttttagtacagccatttgattcatttatatttattcccagcactttaaattaatttttctttcaggcatcttaacttacactttcgtgtctatatttcccttttattctgatttgtgctgtatatactacttgctttgcatttgcctctctgtaaacatcctgattttcaatctacaaatatataccttaaataaagaaaaccctaactcataaagctcatcttttttgaaacataaaaatcaagaataaaaataagcatttatgactccaaattttgaacgctgagctatgtgggactttaaaagtttaatgtgtgattataaatgccacatttaattttttaaagtggtcaatatgtatctctttataaaatatttttctttttttctgttaagatttgcagtgattattcagacctattaagctggtgcaaaagtaattgcgtttttttgctattacttttaatggcaaaaaccatgattacttttgcaccaacttaatatatctgtaatttaacaggttttaatgcttcctgataatcctttttagttacaacttctctcttcttgagttcttttttgttttattttgttcttgttttttgggacaaggtctcactctgtcgtccaggccggagcacagtggcgtgatcacagcttgctgcagccttgacatccttggttcaagtgatcctcccacctcaccctccccaggaaccatgcctggccaagtttttatgttttttgtaaagactgggtttcatcgttttccccaggctggtctcgaacttctgggcccaagtgatccaccagcctcggcctcccaaagtgctgagattacagtcataagccaatgcacttggcctcttcttgggttcttaattgcatttcatttctgtgtactagggactgtgtactgcaggaactttattcagaaagatattaggagattttctgagcctctgcatctgaggatgcctttctgctgtctttctacaagaagatcaatgactatatatgaattcttgggtcatactttttttcacttaaattccggaaatgctgctccattgctttagtgtctagtgccttgtatgaaattggcatgctttgccaagcttatttaaaattagagttgccgaggataagtctaaagttgacttttgatcctttgtaggaaaagcagccacctcccattctctaggcctaaccagtctctggggcccctggcatttgtcctgccccaggtgctgctgtgacgaccagctttgtgtggcctccagtggacttcatatggacatagccgaccatgccttgccttgtcagtcccacatccctcaccttcggacctgggcttccctgttgatacagaggcactggatatcttgagacttgctcaccatgacgtatgtgcacccagaaatgcatggaagtttacatcaccaggggcacatttttggccaacacgaggtggggaggtagtgggtaaaatgttttcccttccttctcaggacagaattgccatggctcaaaaggccccgtgaaattttgagaaatctgttatgcttgatactaaggataccttggatatttgctcttccttgctctcttcctttctcccaacttctgtttccctggggttgttttacacccaccaaaacaatagcacctaaacctttgcctcaggctttgtctttacagaaacccaggctaaaacaacaggtaacaaaaacaggtggtttttgcttgaatacttctagaattttttctttgtttttggaatttagaaaatttactaaaacaaactaggtataaacttcaaaactgctgcctggatcattgtgagaactctctacatccagacttggattaaaaaaaaaaatcaggatagttttttctagtattttatctattcgtactgttttattgtttatttttagaaatgcttattttggttaaatccttactcaaatatatatagacatttgaatagttctgcttttaccatggcttctccttttgttcacagattatgtgcttttgtattttattagcaacatgaagaatgtgttacaattgttttcttctttgtgcttgcaatgtgtgtgctttagaaggcaatgagtccctcagagtcctctggcctttcttctcatctctgtgcttgggaatgtttccacatgcccaggtttattctcctttacttatccatgtgaagagaggtctgtgaagtcccaatttttaagaacagataagacacaggaattgctcagtggggcacagtctgactttggtaaggtacaaagggtgctgtctggggctcaaaaaaggactgaaaaggacgcatggagggtgctgagttggcaacctggaagagggggtggtgctggaagaagtggctgcagctgtgggacctcatttcatggaagctgctcttgagcccctgcggcccagatacctgggagaaacagggtcctgggagaaaaggcttactcttatgccttcgatcaacaaacaacagtttcctggaccacgagcaaactggaccagctgggagcaggtagagacagatgtatgggtagagggaagtcaatatacctgtagtttcctgcagaaacagaacagtcttagggcagtgcaggatggaaagacacactccagagcctgaggcaccaaagcggaacaagcataggggctggctgcctgccgtagatccggggggattatttaatgttgtattggaatcgagagtgctgtaatttctaagactttatgttattgcatggacaatttttctcattttatgatatttcctttgttcatgtaggtgattttggtggggtggtttttagaatgttctcttgtttgttagctagaagcccaagggcatttctttgtccccaaggacaatgctccaatccaaaggatttgcatttaggaatttcaggcaccagttggcaaacaggggaatctgtgagctctcctgcccgaattcaggatggacctaagacattttagaatccagccttaggtgagaccactaggtgagtttctgagaaatgatcccggcagccgaccaactcagtctctgcagccttgtaacacatttgctagattcaagcactctagtgaaacacaaatgcacattatgtagcaaacagaattgggataggttacgcagagctaaggcattaaacatcccccttccctccccgactccgcaacgattctaatagccaggcacaagcagcgtcaggatctacgagtagcagctgcagcgtttaaagaaccatcagcttctgcacgtgcgttcgtggcgggcctgtcagtgtgcttttcagccacacctgcttgcccagatggtggcctctgtgagcggcctcagctccttgaggaaggacagtcccggattgtttcacagagatttactgatgggaaaataaccacccatcacctcagggaacattctcacacattttctttatcatgcattaaaaaagttaccagtttttctttttttcccccgtaagacaccagaacttcaagtcttttgcaataagcctggaacacaaacccattcattggttccaaagtggatttgcacagtctccacgaaaactgccaggggctaggtggggccctggtgacccaggccaggccactgaaccagagctggctctgggatttgaaatgacgtccactccttgtgctctttgggctaaatctaaaagggtagctcagctgcctgtgttttttgactctgggaaactcttttccctcatggctttcccagcacagccttacctctgttcctacacagtctccttcatgcgttcttttctgggccctgaaatgttcctgtcttcagagccacgtccttggccctcaccctttccccctcagcacttttctggggtcatccagattcctgacttccatacccatgctactgcctccctttgggacatctcctgggtctcctacagccatctcaaacttctgttgtcctctgttttctgcctcagttactaatttccatgtctcccaaaagttgacctcatgccccagtctcctcctgggattatgggtctttctttgttctagccttttctcctctctccttggtttttcactgtttgcaaaacttttctgccttttcatctggaaaaatccttgcttaaaaacagtcctgctcataggctaaaacctttgtggaacttcacccaacccctgcttcccatgctggaattaattgctgcttttgttggtaaaataagcatgacctagaacctgccggatgccaaggcactagggaccctcagagtctggtgtgggggatggaccgtggttagttagcatttgaagcagtacaataaagatatggcctaagagctgtgggaatacaaaggagggagtcactaatgctccattttagaaatccccatgtaggggaaaattaaatcagagagatgggagcagcatgtgtccctaggtgacatctatggtccactccaagcagccgtgtttcaaatgcagatctgcacctggcaaggctttctttttgtttacctcacctagccaccaatcctcccttacttccaaacacatctatcatctattatttccatcgtgaggtgccacagagcaaagacagtatcatttctcctttttcctcttttgacatctcagcatgaactcatggctataatatccttaactccttcaacatgacattatgatgttagcaaaaactatgcctgaaaaataaaaacaatcttaagtggcacccactcataatgaacttctgggttctgcaccctttacagaccttctgatcagagattgtccctctgccctggggtccttgcatttctttcctgtgggctttgttgtttaccacatgctgttctgatcatgctatctttcatttaaatagaaagatagcatgatgatgaaatgaaaatgatcctagggttgctgtgagtgtaggatacaccagtacctgatgctcacagtttgacaggtcagatcaaactgttattccagagctgaggggagagaccaggcctcctctgggaactgggacagtgaggagaaacaagcatctggtcacagccccatcccatggactctgtcagggtttaggagctaacttgcagggtgaacctgtggacagtgaattttagagatagaagggagtttggcaatagtctagtctaacactattattttacagatggtgacatggaagctcagagaggtaaagaggtgtgtttatggttcatggaggatttgtggcagccagtgtggaagccagtgtgcctgaggccctctctgtttagtggtgtccattccacactacactgtcatccctggagctctgcttgttgttgcttggagctatgagctttggtcatgagtacagccctatggggtagatatatcctaacttatgggtgaggacacagaggtataaagaaaaagaagttgcctaagatcacagggaatccttctaaaactggacagtctcacctacaagatgggaatagaaataccaattgatggaattataagaaattatgggtataaaatttgtcaggatatcatgagctattaattcatatgtttttttcttcacatttcctttcagcttgtgacattcttttatttagatagctagattagagggaatcagagagaattaagccagggacaaaagaagtcacattcttccttcttagttttaaaagtctttttttatggctgcatattccatatggaatgtgcatataacagtattccatggtgtatatgtgccacattttcttaatccagtgtatcattggtggacatttgggttggttccaagtctttgctattgtgaatagtgctgcagtaaacatacgtgtgcatgtgtctttatagtagcatgatttgtaatcctttgggtatatgcccagtaatgggattgctgggtcaaatgatgtgttctcattcataggtgagaattgaacaatgagaacacttggacacagggtgggaaacatcacacatgggggcctgtcatggggtgggggacagggggaagataagcattaggagaaatacctaatataaatgacaagttaatgggtgcagcaaaccaacgtggcatatgtatacctatgtaacaaacctgcatgttgtgcacatgtaccctaaaattttaagtataataataataataataaagtcttggtccttgctgtggatattagcctgttttcatctctcaagagttctgaggcccttcctattttggggattcctccatcacatgagtcttggtggaaggcagggtcctatctcctacttgaaaatatatggggctggatgttccattttttcatagaacagatttccagaacagagaagtgacaaagccctctgggtaaggaagatggggtagagaattgaagaggatggtggcgggatctcagagaaggctgtgtgtcttgcccctccctctcatccagtggagttggctgtaaaagggaatgatgtcagaacatactgagaagtctgagttcaaggctagaggggatgtgtgcagtattctcctctggagccctgggagaaggctgcctcccatagcatcctcatggagccaaaagtgcttacaaacactatctcagtgatatttctttcttttttttttttttttttgagatagattctcactccttcccccagggtggagtgctgcggtataatctcagctcactgcaacctccacctcccgagttcaagcaattctcctgcctcagcctcctgagtagctgggattacaggcgtttgccaccacgcccagctaatttttgtgtttttagtagagacggggtttcaccatgttggtcaggctggtctcaaactcttgacctcgtgatctgcctgccttggcctcccaaagtgctgggattacaggcatgagccactgcgcctggccaacatttcattttcaaatgttaaattaacatatatgttctctactgaccatgagaattcttaagataactgtgtggcaggtttaatgtaatggacaaagagtgccagcctg

SEQ ID NO: 23475 - DNA, 762 bp, Homo Sapiens
  misc_feature (750)..(750): n is a, c, g, or t
cgtggtgcgccgtttttcaagcctgtcggaaaagcgcagtatgcgggtgggagtgacccgattttccaggtgccgtccgtcacccctttctttgactcagaaagggaactccctgaccccttgcgcttcccgagtgaggcaatgcctcaccctgcttcggctcgcgcacggtgcgcgcacccactgacctgcgcccactgtctggcactccctagtgagatgaacccggtacctcagatggaaatgcagaaatcaccgtcttctgcgtcgctcgcgctgggagctgtagaccggagctgttcctattcggccatcttggctcctccacaaaacaattaaaattggcgtacaagggacatacctcaatgtaataaaagccatctatgacaaacccacagccaacataatactgactgaggaaaagttgaaagcattccctctgagcactggaacagacaaggatgcccactctcaccactcctcttcaacatagtactggaagtcacagccagagcaatcagacaaagaaaagaaataaaggtcatcagtaagaggaagtcaaactgtcactgtttgctgatgatatgaccatttaccttgaaaaccctaaagattcctccagaaagctcctagaattgataaaaggcattcagcaaagtttacagatagaagattaatatacacaaatctgtagctgttctatataccaacagtgatcaaatggagaataaaatcaagaactccaccccntttacaatagct

SEQ ID NO: 23476 - DNA, 8743 bp, Homo Sapiens
cagacggaagccgaacgagttcctcggcggctgcaggatgggggactccaaagtgaaagtggcggtgcggatacgacccatgaaccggcgagagactgacttgcataccaaatgtgtggtggatgtggatgcaaacaaggttattcttaatcctgtaaatacgaatctttccaaaggagatgcccggggccagccgaagtgttttgcttatgatcattgtttctggtctatggatgaatctgtcaaagaaaagtatgcaggtcaagatattgttttcaagtgccttggagagaatatcctgcagaatgcttttgatggctacaatgcatgtatctttgcctatggacagactggctctggaaaatcttataccatgatgggcacagctgaccaacctggattaatcccaagactttgcagtggactctttgaacgaactcagaaagaggaaaatgaagaacagagttttaaagtagaagtgtcctacatggaaatttataatgaaaaagttcgagaccttcttgatcccaaaggaagccgtcagacgttgaaagtcagagagcatagtgtgttgggaccttatgtcgacggactttctaaactggctgccacaagctacaaggatattgagtcgttgatgtctgagggtaacaaatctcgcactgttgctgcaaccaacatgaacgaggagagtagccgatcccatgcagttctcaaaatcaccctcacacatactctctacgatgcgaagtctgggacatctggagagaaagtgggcaaactcagcctggtggatttagctggcagtgaacgagcaacgaagacaggcgctgcaggggacaggctgaaggaagggagcaacattaacgagtccctcacaaccctcggtctggttatctcagctcttgcagatcagagtgctggcaaaaacaagaataaatttgttccatatcgtgactcagttctcacctggctgctcaaagacagcctcgggggtaacagcaagaccgccatggtggctactgtgagtcctgcagctgataactatgatgaaaccctctcaactctgcggtatgcagatcgagccaagcacattgtaaacaacgctgtggtgaatgaggaccctaatgcccgaattatccgggacctccgggaagaagttgagaaactccgggagcagctgaccaaagcagaggcaatgaaatctccagagctaaaggaccggctggaagaatctgagaagctaatccaggaaatgactgtgacctgggaggagaaattaaggaaaacggaggagattgcacaggaacgacagaaacagcttgagagtcttggaatatctcttcagtcttcgggaatcaaagttggggatgataaatgcttccttgtgaatctgaatgctgacccagctctgaatgagcttctggtgtactatttaaaggaacatacattgatagggtcagcaaattcccaagatatccaactgtgcggcatgggaattcttcctgaacactgtattatagacatcacgtcagaaggccaggttatgctgactcctcagaagaacaccagaacatttgtaaatgggtcatctgtctccagtccaatacagctacaccatggggacaggatattatggggaaacaatcatttcttcagactcaatttgcctaaaaagaaaaagaaagcagaacgagaggatgaggaccaggatccctccatgaagaacgagaatagttctgagcagctggatgtagacggagactcctccagcgaggtgtccagtgaagttaactttaattacgaatacgcacagatggaggtcaccatgaaggccctgggcagcaatgatccgatgcagtccatattaaacagcctagaacaacagcatgaagaagaaaaacgatctgcactggagcgccagaggcttatgtatgagcacgaattggagcagctccggagaaggctgtctcctgagaagcagaactgccggagcatggacaggttttctttccactcgcccagcgctcagcaacgcttaagacagtgggctgaggagagagaagcaacgttgaataacagcctgatgaggctgagggaacaaattgttaaggccaatctattggtgagagaagctaattacattgctgaggagctggataaaagaacagaatacaaagttaccctacagattccagcctccagcctggatgccaacaggaagcgaggctctcttcttagtgagcctgcaatccaggtgagaagaaaaggaaaaggaaagcagatttggtctttggaaaaactggacaacaggctgttggatatgagagacctttatcaggagtggaaagagtgtgaagaagataacccagtaatacgatcatacttcaaacgtgctgatccattctatgatgagcaggaaaatctcagtctcattggggtggccaatgtcttcctcgagtcacttttctatgatgtgaagttacaatacgctgttcccatcatcaaccagaaaggagaggtggcaggtcggctgcacgtggaggtgatgcgactcagtggtgatgttggggagaggatcgcaggaggcgatgaggtggcagaggtcccctttgagaaggagacccaggagaacaaactggtgtgcatggttaaaatcctgcaagctactgggttgccacagcatctgtcccactttgtgttctgcaaatacagcttctgggatcaacaggagccggtgattgtcgctcctgaagtggacacctcctcctcttccgtcagcaaggagccgcactgcatggttgtctttgatcattgcaatgagttttctgttaacatcaccgaagactttatcgagcatctttccgaaggagcattggcaattgaagtatatggacataaaataaacgatccccggaaaaaccccgccctgtgggatttgggaatcatccaagcaaagacacgtagtcttcgggacagatggagtgaagtgaccaggaaattggaattctgggttcaaatcttggaacagaatgagaatggtgaatactgccctgtagaagtgatttctgcaaaggatgtcccaacaggaggaatcttccagctccggcaggggcagtcccggagagttcaagtcgaagtgaagtcagtgcaggaatctgggactttaccactgatggaagaatgtatactgtctgttggcattggatgtgtcaaagttagaccgctcagagcccccagaacacatgagaccttccatgaggaagaggaagacatggacagctaccaggatcgagatttagagagacttcgtagaaaatggctaaatgcattaacaaaacgtcaggagtacttggatcaacaattgcaaaagcttgtcagtaaacgtgataaaacagaggatgatgctgaccgtgaagcgcagcttctggagatgcggttgaccctaactgaggagaggaacgcggtgatggtcccctctgctggcagtggtattccaggggccccagcagaatggaccccagtacctgggatggagacacacattcctgttatattcctggacttaaatgctgatgatttcagctctcaggataatcttgatgacccagaagctggtggatgggatgcgaccttgactggggaagaagaagaggagttctttgaattgcagattgtgaagcagcatgatggggaggtgaaagcagaagcctcctgggactccgcggtgcatggctgccctcagctcagcaggggcacgcccgtggacgagcggttgttcctgatcgtgcgcgtgacggtccagctcagccaccctgctgacatgcaactggtgttacgcaagagaatctgtgtcaatgttcacggccgccagggttttgcacagagtctcctaaaaaagatgtctcatcgaagttctattcctggctgtggagtgacttttgaaattgtctccaatattccagaggatgcccagggagtggaagaacgggaagcattagcaagaatggcagccaatgttgaaaacccagcttctgctgactcggaggcttatattgaaaagtacctcaggagcgtgctggctgtagaaaacctcctgactttagatcgtctgcgccaggaagttgcagtgaaggaacagttaacaggaaaaggaaagttgagcaggaggagtatcagttctccaaatgtgaacagattgtctggaagccgacaagatctcattccatcatacagtctaggcagcaacaagggccggtgggaaagtcagcaggatgtatcccaaaccacagtttccagaggaatagctcctgcccccgccctctctgtttctccccaaaataaccattctccagatccaggactcagtaaccttgcagcatcctacttgaatcctgtcaaatccttcgtgccgcaaatgccaaagctcctcaagtctctctttcccgtccgcgatgagaagaggggcaagcggccgtctcccctcgcacaccagcccgtgccccgcatcatggtgcagtcagccagcccggacatcagggtgaccaggatggaggaggctcagccggagatgggccctgacgtgctggtgcagacgatgggggccccggccttgaagatctgcgacaaacctgccaaagtgccttccccaccgcctgtcatagctgtcacagcggtcaccccggctccggaggcacaggacgggccccccagccccctgagtgaagcctctagcgggtacttctcccacagcgtctccaccgcgaccctgtcggacgccctgggccccggcctggacgctgcggccccgccggggtccatgcccaccgcccctgaggccgagcccgaggcgcccatcagccaccccccaccgcccacggccgtccccgccgaggagccccctggcccccagcagctcgtgagccccggtcgggagcgccccgacctcgaggccccggcgcccggctccccgttccgcgtccggagggtgcgggcctcggagttgcgctccttctcgcgcatgctggctggggaccccggctgctccccgggggccgaggggaatgcgccggccccgggcgccgggggacaggccctggcctctgattccgaggaagctgacgaggtcccggagtggctccgagagggcgagttcgtcaccgtgggcgcccacaaaacgggcgtggtgagatacgtggggcctgccgacttccaagagggcacgtgggtcggcgtggagctcgacctgccctcaggtaagaatgacggttccatcggcgggaagcagtacttcaggtgtaaccctggctacgggctgctggtcaggcccagccgggtccgcagggccacgggccctgtgcggcggcgcagcacaggactccggctgggtgcccccgaggcccgccggagcgccaccctctcgggctccgccaccaacctggcctcgctgacagctgccctggccaaggccgacaggagccacaagaaccctgagaaccggaaatcctgggccagctgagccgctgccttagggcgaacttttctgggggtgcccggccccttttgagccctgccagtgacagccctgaggagccaggagcccggtggccccttccccaggggcagggcgatgaatgctttttgcacgacacagggctggtgacctccctgggcctctggaagctttgtttcttctgtacccgggtaaagtgggggcctcaactgtgcctcctccggtggatggaaggttctgggtgcccgcaggggctgggggatgctaggactgagaccctgggtggtgcagcgcctggtgatcttgctgtgtgcctgtgcctggggccttatgttgctctttctatcatttccattctggtggccccactaatgtcttaacctaaaccataattgtaaccagtgcctttcctccccactggagggcaagcccccccacccacccaggatgtcctggctcactccgcaagccccccagcctcccaccctggtcccagtttcccgcaaagtgcctctgggggaccccccagcctcccaccctggtcccaggttccacaagtgcctctggagggccctgggctctggcagatggtcctggtgccccagacgggggccgagggcctgagcccccccatccctcctctgccagggtttcttagcggtttctctgtggatgttttggcatctttagacacctggaaagtctcttatgtttgccgtttattcccttcacagaaggcttggaatgtatttatttatatttattttttcaaaatccgaaatcatttgcgagccgcaatcgtcgtctgcctgtgtgggggggcccagggcctgccttgcacgttgcagcctctctggccattgcagagctgctggcctcctgcccaggtggagggtcctggggacggcagaggataaagccccctcctcacatccctctattgcggatccacagtggccttactcttaacttggatgagagcaaaaacctgggagaatgatgtgcttctgtagtcggtgacaaaggaagaggcattgctactttatttggtgcacttttggtttctaggaaggtctttgggtcattttaacttctcggcaactcccagactctcagagtgtggggctggggcctggcggctgggctggtgcagggagtgtgctggttagtctccagaccctcacagcagccacgcccccaggcccaccgtgcatggtgtgggcgggacagccggaagcttccggggtggcctccacctcctggctggggcacttatgctcccagagcctttggtgccaggtttgtgggatgggggttagcgtctatgtgtggaaggccaccaatctagggacaggagtcctgggtcaagattcacacagccacccttggagctggtttctagttctcacatttagtcaacatctagaaagcgctgcggaaggctctggttctctagggacttgaaggcgccaacagagtagtctccatggtgggcctgtcccagccctggctgcgaggacaggttgtctttctctccccagttggcgagggacacgaaggctgcggccgggctggcagagggcccggcccctggggggaggcactcctccagggctctccctgtccttagccgattttgagggaaccctgtggcacctgtccctggatgaagagctgtcacctctgccttgccctttaactcaacccgcttcccagcacagcggctttctttttaaaacctgtttcactgagaagtttgtttttgggtccgctggtgtcactatggcctgggtgagaggccagcactgctgctgccctgaggggaaacgcctgggccgtgtagtggggacgctctgggaatggtggcggacgggcagcgtgggtgggacctggcacttcgtggtggctgagccatccacccagcagcggcctcctgtagcaccatattgggaaagtcctgggggacgtgtgtgtcgtgctttttaccatcggtttgacttacagtggagtagaacgagccagagttcctgacttgagcaggtggatttgggcccaggccctgttcactcttgcttctcggtgcggactaatgtcagcttgtggctgggaaagagggatgtgcagtgacgtggtcaccaaggcagtgagccccgctgaccccgggccagcacttggcaggcaggaggtgcggtctccagagtggtgggccagggcgggctggcctccgtcttctatcttcttttcttgcctccctgaccagcagactcacctcccaagaacgcctgcccgcccacccgccttaggactcccgatgcgctcctggaaggccccaggagtggcaccttagtgtgggtcggcccgcagatggcacccaaggccgggaagggcagtaactgcacacgcggcgctgtcagagatgggggtgggggatgcttctgggggccctgcctccccattgtgtgcccagaacatccctggccccaccccgccacttccctcgggcccttatgaaggactgaggctccagggtgagaaggctcacttctgccccaggcactgcgtccagcagcagaggggacagggggcaggtgtgtgactgggttcctgggtacccaggcctgaccagagggagcgggagggcagaggtgaggagggggaagatgtttctgggcctaccaaggttcaacaagagaacggagctgggaatgtgactgctggagcctgagaggtggaggagttctgatcccccgttacttcctagcattttctcctcttgccttaaaagttccctgtatgtgaaacgggaagtcctgagagtgtgtgttggtggctgtgcgcacgcacacaagacgggagtcaccctgtgcttcctgcccaagatactgacccattgaacccccaaagcatctttctctccacaaagtccgtggtgccttcctggtgggctgcagacactaatggtgttggggggtcttggaacagcttctctatgtgtggattcgtgtaaatgcgaagagttcacatataaagaagtgactttgattctgtgattatattgatttggtacacagtaaatgggagtttaaaaaatccaaagactctaatgacttgtaaagactctaatgatttgtatcatgtaatgaactaaaccacctgtaattttgtaccatatgtgtctttccatcaaatgaccaacagcttctcaataaaaccagaccatttctcacctgc

SEQ ID NO: 23477 - DNA, 4812 bp, Homo Sapiens
cgatggctgtgttgttgaagggcctgtagccggggggttcctggccggatcccggtctacccttagcccagactcgttccggaccccagcccggcccggaacactctgggcgagacggcggtggcaactctccccttgccgccatgcacgacgctttcgagccagtgccgatcctagaaaagctgcctctgcaaatcgactgtctggctgcctgggaggaatggcttcttgtgggaaccaaacaaggacatcttcttctctataggattcggaaggacgttggttgcaacagatttgaagtgacactagagaaatccaataagaacttctccaaaaagattcagcagatccatgtggtttcccagtttaagattctggtcagcttgttagaaaataacatttatgtccatgacctattgacatttcaacaaatcactacggtttcaaaggcaaagggagcatcactgtttacttgtgacctccagcacacagagaccggtgaggaggtgttacggatgtgtgtggcagtaaaaaagaagctgcagctctatttctggaaggacagggaatttcatgaattgcagggggactttagtgtgccagatgtgcccaagtccatggcgtggtgtgaaaattctatctgtgtgggtttcaagagagactactacctaataagggtggatggaaaggggtccatcaaagagctctttccaacaggaaaacagctggagcccttagttgcacctctggcagatggaaaagtggctgtgggccaggatgatctcaccgtggtactcaatgaggaagggatctgcacacagaaatgtgccctgaactggacggacataccagtggccatggagcaccagcctccctacatcattgcagtgttgcctcgatatgttgagatccgaacatttgaaccgaggcttctggtccaaagcattgaattgcaaaggccccgtttcattacctcaggaggatcaaacattatctatgtggccagcaatcattttgtttggagactcatccctgtccccatggcaacccaaatccaacaacttctccaggacaagcagtttgaattggctctgcagctcgcagaaatgaaagatgattctgacagtgaaaagcagcaacaaattcatcacatcaagaacttgtatgccttcaacctcttctgccagaagcgttttgatgagtccatgcaggtctttgctaaacttggcacagatcccacccatgtgatgggcctgtaccctgacctgctgcccacagactacagaaagcagttgcagtatcccaacccattgcctgtgctctccggggctgaattggagaaggctcacttagctctgattgactacctgacacagaaacgaagtcaattggtaaagaagctgaatgactctgatcaccagtcaagcacctcaccgctcatggaaggcactcccaccatcaaatccaagaagaagctgctacaaatcatcgacaccaccctgctcaagtgctatctccatacaaatgtggccctggtggcccccttgctacgcctggagaacaatcactgccacatcgaggagagcgagcacgtgctaaagaaggctcacaagtacagtgagcttatcatcctgtatgagaagaaggggctccacgagaaagctctgcaggtgctcgtggaccagtccaagaaagccaactcccctctgaaaggccacgagaggacagtgcagtatctgcagcatctgggcacagaaaacctgcatttgattttctcctactcagtgtgggtgctgagagacttcccagaagatggcctgaagatatttactgaagatctcccggaagtggagtctctgccacgtgatcgagtcctcggcttcttaatagagaattttaagggtctggctattccttatctggaacacatcatccatgtttgggaggagacaggctctcggttccacaactgcctgatccagctatactgtgagaaggtgcaaggtctgatgaaggagtatctcctgtccttccctgcaggcaaaaccccagtcccagctggagaggaagagggtgagctgggagaataccggcaaaagctcctcatgttcttggagatttccagctactatgatccaggccggctcatctgtgattttccctttgatggcctcttagaagaacgagctctcctgttggggcgcatggggaaacatgaacaagctcttttcatttatgtccacatcttgaaggatacaaggatggctgaggagtactgccacaaacactatgaccgaaacaaagatggcaacaaagatgtgtatctgtccctgcttcggatgtacctgtcgccccccagcattcactgcctggggccaatcaagctggaactactggagccaaaagccaacctccaggccgctctgcaggtcctcgagctacaccacagcaaactggacaccaccaaggccctcaaccttctgccagcaaacactcagatcaatgacatacgcatcttcctggaaaaggtcttggaagaaaatgcacaaaagaaacggttcaatcaagtgctcaagaaccttctccatgcagaattcctgagggtccaggaagagcggattttacaccagcaggtgaagtgcatcatcacagaggagaaggtgtgcatggtgtgtaagaagaagattgggaacagtgcatttgcaagataccccaatggagtggtcgtccattacttctgttccaaagaggtaaacccagctgacacttgagcccagcatcctggggatccagcggatggacagcttggctctcccagagaggtgaaggagcacctggccttaggaatcctggctgccaccaccacaaggctccccatttggacattactggctatcttgtgccctggaacaactctgaattaattagactcatggtctggcattgccagctttttaatgggaaaagagattagttataccttataccattatgttgtgggcaattccagagaattcagtacctgcttggtcaggaggatgtgcaccatcttgcctttgcacaccagtcacctgaacaaggaaacttgtcacaagtgtttgtaaccatggggttgttcatcaagggcttttctattaagtacatgacttcacaaggaccgctcagcatggctcactggagagttccatgagagaacagcactcaagcttctggccgcatggacccgatggctcgcattctgtgtagtgttttacgtctccatggtaactgtgccctgcacccctcggtagccgccctgttagttttcagtctccttttctttctcaccatttatcacttccctcactgccctacccaggctttctctcccacttccctgactctgggaataactaatatttaagcaaggtaagatgagaagcaaggggtctcagttctaggaatacagtgctagttgattgtcaggtatgttgtaaatagaccctctttggccatacactccatgcctagatgcctcggagagcatcattctctgcctaggcaaggccctgcatcccttgcctcaggccgggctgagtgtgactgcagctcctgaggatgggcctgccctgtctggggtatgcgtgatccctagatacatgttcccacagaggtgcctgctccgtcttcgctcaccagacactcaggcaggctggcttagtctttgtgcgtggcgattttgtgctctgggccctttctctttttccagccagtttccattcacttgccttacagcctgccctggccgtcactccccagctttgttcagcaatggtgtggttggagagttgtgctgggatagcgcaggaaggtgggtcccggcaacacgcaggggatgagtggacctggaactgacaatggcgtgctgccaagtgttcctgagaggtgtttaggcacagcagaggggacgcggggggcaagaacagcaggacgctggtttaaaaataactcaccgccaaacctgtggagcagtgtggggcatcctgccagaggtgcacaggctggagtttcaggcactgcaggctgatgacacacagggagagtggccctgcctcctgtcctccccggggtttttgcagactcgaagtctcactgcaccagtgtctttgatggtggtgagggtgggtgatggtgcccagcaccaacagttttagtggcctgtccttgacctgccgtggtcctttgtaaactatggctccatgctgtgtgacagatcaacgtgctgatggtaagtagactaggcttccccaggcatgccgtccgtgggggcctgaagagacagtgagtgccattggccccattcgcagatgtgggagactctgctcaggcctgtgaggctgggcagcccttcaccagagttcggaggagcagtgtgtggcgccacgtcccgactggccatacccacacagaagcagtgctgcccggggcctcatctgggccagcttggactctgcttcctccaggagcagcagggaagctctgggccacctccctggatagcaggaacttgacctgccatgtgtgccctgccttcctggccagctgtgcttgttatcttccattctcacaaactgtctttgaagcaatagaataaagaatgtgtgttttctttcctggtatacatacatgatcccatgctcccaagctccattcttccttccctcaactctctgccctccacagagctatggagaaggctggagatgaaagctttgtagtgaggactgataaagatctcatcactgctccttataataaacctaataaagcaag

SEQ ID NO: 23478 - DNA, 3536 bp, Homo Sapiens
atggggacgacggccccagggcccattcacctgctggagctatgtgaccagaagctcatggagtttctctgcaacatggataataaggacttggtgtggcttgaggagatccaagaggaggccgagcgcatgttcaccagagaattcagcaaagagccagagctgatgcccaaaacaccttctcagaagaaccgacggaagaagagacggatttcttatgttcaggatgaaaacagagatcccatcaggagaaggttatcccgcagaaagtctcggagcagccagctgagctcccgacgcctccgcagcaaggacagtgtagagaagctggctacagtggtcggggagaacggctccgttctgcggcgtgtgacccgtgctgcggctgcagctgccgcggctaccatggcattggctgcaccttcttcacccacccctgagtctcccacgatgctgactaagaagcccgaggataaccacacccagtgccagctggtgcctgtggtggagatcggcatcagtgagcgccagaatgctgagcagcatgtcacccagctcatgtccaccgagcctctgccccgcactctgtccccgactccagcttcagccacagctccaacctcccagggcatcccgacatcagatgaggaatcaacacctaagaagtcgaaggccaggatactggagtccatcacagtgagctccctgatggctacaccccaggaccccaagggtcaaggggtcgggacggggcggtctgcgtctaagctcaggattgcgcaggtctcccctggcccacgggactcgccagcctttccagattctccatggcgggagcgggtgctggctcccatcctgccggataacttctccacgcccacgggctctcgcacggactctcaatcggtgcggcacagcccgatcgccccgtcttccccgagtccccaagtcttagcccagaagtactctctggtggccaaacaggaaagtgttgtccgcagggcgagcagaaggcttgccaagaagactgccgaagagccagctgcctctggccgcatcatctgtcacagttacctggagaggctcctgaatgttgaggtgccccagaaagttggttctgagcagaaggaaccccccgaggaggctgagcctgtggcggcagctgagccagaggtccctgagaacaacggaaataactcgtggccccacaatgacacggagattgccaacagcacacccaacccgaagcctgcagccagcagcccggaaacaccctctgcagggcagcaagaggccaagacggaccaagcagatggacccagagagccaccgcagagtgccaggaggaagcgcagctacaagcaggccgtgagtgagctggacgaggagcagcacctggaggatgaggagctgcagccccccaggagcaagaccccttcctcaccctgcccagccagcaaggtggtacggcccctccggacctttctgcacacagtgcagaggaaccagatgctcatgacccctacctcagccccacgcagcgtcatgaagtcctttattaagcgcaacactcccctgcgcatggaccccaaggagaaggagcggcagcgcctggagaatctgcggcggaaggaggaggccgagcagctgcgcaggcagaaggtggaggaggacaagcggcggcggctggaggaggtgaagctgaagcgtgaggaacgcctccgcaaggtgctgcaggcccgcgagcgggtggagcagatgaaggaggagaagaagaagcagattgagcagaagtttgctcagatcgacgagaagactgagaaggccaaggaggagcggctggcagaggagaaggccaagaaaaaggcggcggccaagaagatggaggaggtggaagcacgcaggaagcaggaagaggatgcacgtaggctcaggtggctgcagcaggaggaggaagagcggcggcaccaagagctgctgcagaagaagaaggaagaggagcaggagcggctgcggaaggcggccgaggctaagcggctggcagagcagcgggagcaggagcggcgggagcaggagcggcgggagcaggagcggcgcgagcaggagcggcgcgagcaggagcggcgggagcaggagcggcgcgagcaggagcgacagctggcagagcaggagcgtcggcgggagcaggagcggctccaagccgagagggagctgcaggagcgggagaaggccctgcggctgcagaaggagcagctgcagagggaactggaggagaagaagaagaaggaagagcagcagcgtctggctgagcggcagctgcaggaggagcaagagaagaaagccaaggaggcagcaggggccagcaaggccctgaatgtgactgtggacgtgcagtctccagcttgtacctcatctcccatcactccgcaagggcacaaggcccctccccagatcaacccccacaactacgggatggatctgaatagcgacgactccaccgatgatgaggcccatccccggaagcccatccccacctgggcccgaggcaccccgctcagccaggctatcattcaccagtactaccagccaccgaaccttctggagctctttggaaccattctcccactggacttggaggatatcttcaagaagagcaagccccgctatcacaagcgcaccagctctgctgtctggaactcaccgcccctgcagggcgccagggtccccagcagcctggcctacagcctgaagaagcactgaggctggcctgcggccttcttggcagcctcgcctcctgtccatgtctatctgtctgtctgtcggtctgtgtcttggtctgttgccctccttcttggcatgccattgtggagggcttggccaggtgtatataaacgtcctctgtgctgggtgtttctgctgcaggtggcaggtggccccaggcctgtttggaggatgggctgggtgggtgggtggggaagaaatgggcccagccccacatggcctgcagacagtgctctgtaaatagttgttttaatttagctgaatgttagcattttagtctttggcattttagcgtttgggaggtagattaataaagtatattccttcaagcctgctgttgataccatgaagactgggcgcctcagtcccagccctgtagctgtgtgtcttgggccaccagtggcctgcaggacgaaggtactgttccatcacctgcggtgtgcctcaggatcaccaggtgcaggcccccaccctcggagatgctgctgcagtgagtggttccactgcctggataacccttgaggaacacgtcagttactgtcacgatggggcaggtggagctccttcctattttttggggtgctccctgtttgtaaaggggagtttgttcattgggaaagacctgggtcttgacacggccctgccacttagtcccctaccctctccattccccaggctccacccgtgctgctcaagtgcaaatggacttgagagtatttatgtgctggtgaagtatgaggtctgagtagaaaagg

SEQ ID NO: 23479 - DNA, 1550 bp, Homo Sapiens
atatatttttactctatgtttctctacatgttttttctttccgttgctggcggaagaggcacgtgcgctgctgaatggagctggtcgctggttgctacgagcaggtcctctttgggttcgctgtacacccggagcccgaggcttgcggcgaccacgagcaatggactcttgtggctgacttcactcaccatgctcacactgcctccttgtcagcagtagctgtaaatagtcgttttgtggtcactgggagcaaagatgaaacaattcacatttatgacatgaaaaagaagattgagcatggggctctagtgcatcacagtggtacaataacttgcctgaaattctatggcaacaggcatttaatcagtggagcggaagatggactcatctgtatctgggatgcaaagaaatgggaatgcctgaagtcaattaaagctcacaaaagacaggtgaccttcctttctattcacccatctggcaagttggccctgtcggttggtacagataaaactttaagaacgtggaatcttgtagaaggaagatcagcattcataaaaaatataaaacaaaatgctcacatagtagaatggtccccaagaggagagcagtatgtagttatcatacagaataaaatagacatctatcagcttgacactgcatccattagtggcaccatcacaaatgaaaagagaatttcctctgttaaatttctttcagagtctgtccttgcagtggctggagatgaagaagttataaggttttttgactgtgattcactagtgtgcctctgcgaatttaaagctcatgaaaacagggtaaaggacatgttcagttttgaaattctagagcatcatgttattgtttcagcatcgagtgatggtttcatcaaaaggtggaagcttaagcaggataagaaagttcccccatctttactctgtgaaataaacactaatgccaggctgacgtgtcttggagtgtggctagacaaagtggcagacatgaaagaaagccttcctccagctgcagagccttctcctgtaagtaaagaacagtccaaaattggcaaaaaggagcctggtgacacagtgcacaaagaagaaaagcggtcaaaacctaacacaaagaaacgcggtttaacaggtgacagtaagaaagcaacaaaagaaagtggcctgatatcaaccaagaagaggaaaatggtagaaatgttggaaaagaagaggaaaaagaagaaaataaaaacaatgcagtgaatcacagatgtctcctgaaagaactcttttagatgaaatcattctactcaaatgtaccttaatttttttttttccctgagtaaaagcaagaaatttcttcctttggaaaaaatatatatattaaaaaaccacttttagatggttttttttaaaaaaaaaaaaaaaactggtaaaattacttttggcagacagtgttttatgaattatgtatcatgttgatatataatatgttaatgtgtcatgtaatttttactttgtacaaagcaaataaagatctttctcaaaaaaaaaaaaaaa

SEQ ID NO: 23480 - DNA, 3532 bp, Homo Sapiens
ccgacagccgcgggtgcgtggtcgtgcggcaagtgagcgatttggtgaacagacactcccttctgtagccatggattgttacagaacttcactaagcagttcctggatttaccccactgtgatcctctgcttatttggttttttctccatgatgagaccctcagaaccattccttatcccatatttatctggaccagataaaaacctgaccagtgcagagataacaaatgagatcttccccgtttggacatactcctacctggtgctgctgctgcctgtgtttgtcctcaccgattatgtccgctacaagccagtcatcatcttgcaaggtatcagtttcatcattacctggctgctgctgttgtttggccaaggagtgaagaccatgcaggttgtagagttcttctatgggatggtcaccgccgccgaggtggcctactacgcctacatatacagcgtggtcagccccgagcactaccagagagtgagcggctactgcaggagcgtcacgctggccgcctacacagcagggtcggtgctggctcaactcttggtatccctggcgaacatgtcgtacttttacctcaacgtcatatccttggcctctgtctccgtggctttccttttctcacttttcctaccaatgcccaagaaaagcatgttttttcatgcaaaacccagcagagaaataaagaagtcatcaagcgtgaatccagtattagaggaaactcacgaaggtgaagcaccaggctgtgaagagcagaaacccacatcagaaatactcagcacttcagggaagctgaataagggccagctgaacagcctgaaaccaagcaatgtgactgtggacgtttttgtgcagtggttccaagatttgaaggagtgctactcctcaaaacgtcttttctactggtctctatggtgggctttcgccacagcaggttttaaccaggttttgaactatgttcaaatcctgtgggattacaaggcgccatcccaagattcttccatctataatggggccgtagaagctattgcaacctttggaggggctgtggctgcctttgcagtgggttatgtgaaagtcaactgggaccttctgggagagctggctctggtggtcttctcagttgtcaatgccggttctttatttctcatgcattacacagccaatatctgggcgtgctatgctgggtatttgatattcaagtccagctatatgcttcttataaccatagcagtatttcagattgcagttaatctgaatgtggaacgctatgccttggtatttggaatcaacacctttattgccttggtgattcagaccatcatgactgtgattgtagtagatcagagagggctcaacttgccagtcagcattcagtttttagtttatgggagctattttgcagtaattgctggaattttcctaatgagaagcatgtatattacctactcaaccaaatcccagaaggatgtacagagccctgctccaagtgagaatccagatgtgtctcacccagaggaagagagtaatatcatcatgtcaacaaaactctaacctcatcgcaacaaacgcaacagtggctttcaaagttatgcaataataaggaaagattttgagatgggtggcatatgttttgccataacttgacatgctttgcaaatctggattccaatggacctttcaaaaccacaacaaaacctcagttttagatgagttctctatgtgaccaattttactggatgcaattgacaggacccgtcatcataattaaacaacccatattggggaccccctgtgactagtagcagctggaaaattctggtttttatcacttgtaaagacatgcagatggcgtggaaccaaaccatgagaaaactccagccatcctggagttgatattcaccatttgtgaggagaaatactaactggactgaccctattgctaggcttaaatacttatttgatcttaccaaagaagtcaacacatgggacctttgtgtcacatgaaccattttctttcctcttctattaagtgtatttctgtttaagttacagttctctaagagaattacaatgtttgtcccatttctaagggcttctcttcaactctaataacagcattattcacgttatgatttgatagtattattatttaatttttttatgattattttccattttgtgctctgagttttgctgttgaaagtctccctcaagaatagcttcagatcctcttgtgtatttgcagaatacacaaggtcatttcccagtggcctgggagaggcagtgagccttctctccaccaccatagacaggtgttaatgcatctatgggccaggtgcagtggctcactcctgtaatccgagcaatttgggaggccaaggtgggagttttgcttgaggccagaggttcaagaccagcctgggcaacacagtgacacctgactctactaaaaaattaaaaaattggctgggcagcgtggtgtgtgcctgtagtctcagctacttgggaggccatggtgggaggatgggttgagcacaggagtcagaggctggagtgcaatggcgtgatcttggctcactgcagacttcacctcctgagttcaagccattctcctacctcagcctcccaggtagctgggactatgggtgcacaccaccacgcctggctaatttttgtatttttagtggagatggggtttcacaatgttggccaggctggtctcaaactcctgacttcaggtgatctgtctgcctcggcctcccaaagagctgagattacaggcgtgagccaccatgcctggccaaaacacctgatttttaaatggtagcaattgtgctaaataaaatgtgtaaaaattttaaagagttgttaacattttttgatgaattctgctgaaaattatctgaacatacctgtttttcgaaacttcaagaaacttcaataagggatgcattgagcagtctgacagtgagaataaagaatgctgagtcaagatttatattaaggctggaagctgtggctcacacctgtaatcccagcattttgggaggctgaagtgagaggttaatttgagggtaggggtatgagaccatcttggccaatatagcaagaccctgtgtctaaaacaaacaaaaaaatttttaattggattttgatatggtttggatctgtgtccccaccaaatctcacgttgaagtgtaatccccaatgttagaggtggggccggctgggaggcgactggatcatgggtgtgaagccttcatgaatggtttggcaccgtcccctcagtgctggtctcatgacagtgagttatcgtgagatctggtagtttaaaagtgtgtagcacctccccactctctctttctcctgctttggccacgtgaagatgcctgctcccactttgccttctgccatgagtaaaaattccctgaggactccctagaagcagatgttgccacgcttcctatatagcctgtgagctaattaaaccccttttcttacaaactaaaaaaaaaaaaaaaa

SEQ ID NO: 23481 - DNA, 6628 bp, Homo Sapiens
gggagccgccgccaccgccgccgaggagtcaggaagttcaagatggccgccgcggagacccagtcgctacgggagcagccagagatggaagatgctaattctgaaaagagtataaatgaagaaaatggagaagtatcagaagaccagtctcaaaataagcacagtcgtcacaaaaaaaagaagcataaacacagaagtaaacataagaaacataaacattcctcagaagaagacaaggataaaaaacataaacataagcataaacataagaaacacaaaagaaaagaggttattgatgcttctgataaagagggtatgtctccagcaaaaagaactaaacttgatgatttagctttgctagaagacttggaaaaacagagagccttgattaaggccgaacttgataatgagttaatggaaggaaaggtccagtctggtatggggctcattttgcaaggttatgagtctggctctgaagaagagggggaaattcatgaaaaggcaagaaatggaaataggtctagtactagatcttcaagtacaaaggggaaacttgaacttgtggacaataaaattactacaaagaaacgaagtaaaagcagatccaaagaacggactagacataggtctgataaaaagaaaagtaaggggggtattgaaatcgttaaagagaaaacaactaggagcaagtcaaaggagaggaaaaaatctaaaagcccatccaaaagaagtaagtctcaagatcaagcaaggaaatcaaaatcccctacccttagaaggcgatctcaagagaaaattggtaaggccagatctcctactgatgataaggttaaaattgaagataaaagtaaatcaaaagataggaaaaaatccccaattataaatgaaagtagaagtcgcgatcgaggtaaaaaatccagatccccagttgatttaagaggtaaatccaaagacagaaggtcacggtccaaagagagaaaatcaaaacggtctgaaactgataaagaaaagaagccaattaaatctccctctaaagatgcttcatctgggaaagaaaataggtcacccagcagaagacctggtcgtagtcctaaaagaagaagtttgtctccaaaaccacgtgataaatcaagaagaagcaggtctccacttttgaatgatagaagatctaagcagagcaaatccccctcgcggacactgtctcctgggagaagagccaagagccgatccttagaaagaaaacgacgagaaccagagaggagacgactttcttctccaagaacacgacctcgagatgatatcctcagtagacgtgaaagatcaaaagatgccagccccatcaatagatggtctccaacccgaagaagaagtagatctcccattagaaggaggtctcgttccccactcagacgtagcaggtctccaagaagaagaagcagatctcctcggagaagggacagaggtcggaggagcagatcacgcttgcgaaggcggtctcgatcacgcggtggtcgtagacgaaggagcagaagcaaagtaaaggaagataaatttaaaggaagtctttctgaaggaatgaaagttgagcaggaatcttcgtctgatgataaccttgaagactttgatgtagaggaagaagatgaagaagccctaatagaacagagaagaatccaaaggcaggcaattgttcagaaatataaataccttgctgaagatagcaacatgtctgtgccatctgaaccaagcagcccccagagcagtacgagaacacgatcaccatctccagatgacattctggagcgagtagctgctgatgttaaagagtatgaacgggaaaatgttgatacatttgaggcctcagtgaaagccaagcataatctaatgacagttgaacagaataatggttcatctcagaagaagttgttggcacctgatatgtttacagaatctgatgatatgtttgctgcgtattttgatagtgctcgtcttcgggccgctggcattggaaaagatttcaaagagaatcccaacctcagagataactggaccgatgcagaaggctattatcgtgtgaacataggtgaagtcctagataaacgttacaatgtgtatggctacactgggcaaggtgtattcagtaatgttgtacgagccagagataatgcaagagccaaccaagaagtggctgtaaagatcatcagaaacaatgagctcatgcaaaagactggtttaaaagaattagagttcttgaaaaaacttaatgatgctgatcctgatgacaaatttcattgtctgagactcttcaggcacttctatcacaagcagcatctttgtctggtattcgagcctctcagcatgaacttacgagaggtgttaaaaaaatatggtaaagatgttggtcttcatattaaagctgtaagatcctatagtcagcagttgttcctggcattgaaactccttaaaagatgcaatatcctacatgcagatatcaagccagacaatatcctggttaatgaatccaaaactattttaaagctttgcgattttgggtcggcttcacatgttgcggataatgacataacaccttatcttgtcagtagattttatcgtgctcctgaaatcattataggtaaaagctatgactatggtatagatatgtggtctgtaggttgcaccttatacgaactctatactggaaaaattttattccctggcaaaaccaataaccatatgctgaagcttgcaatggatctcaaaggaaagatgccaaataagatgattcgaaaaggtgtgttcaaagatcagcattttgatcaaaatctcaacttcatgtacatagaagttgataaagtaacagagagggagaaagttactgttatgagcaccattaatccaactaaggacctgttggctgacttgattgggtgccagagacttcctgaagaccaacgtaagaaagtacaccagctaaaggacttgttggaccagattctgatgttggacccagctaaacgaattagcatcaaccaggccctacagcacgccttcatccaggaaaaaatttaaacaagatgaagaaactccaagggtttgagtaaatacaaagactgaagaaatttcacagcagtttattaatgtatataaacttataaatatttctccagcaaatttgaggaagcatgatatatttgaattaacaccaagggtgatatttcttttagagatgttagttaatctgttttgtgtcttacgtgaaatttcactgtagactgttttaaattgccaagactgcacaaaattacagtgctaatgtatatggttgcagttcacataaagacaaaagcatctgttatgaaatgagtagtaatattgggtggttgatttgttcttagcagacttggcttcattttggtcttgagataaaatggccagcataaatgctgtttatattcacgttttcctaggtgtgtgtgtgcaggccacagcagcatgcccttggtgtagtcagtgccgaaaggggtctgttccttcttgagcctgcctgcagggatggtctccttttaaagcaggttgtgtgcagcattcagtacactgaaggtaagctaaaccatcaacatctctggtgttttaagatgttattttattggaacaactgacaaatgagggatgttagctttgtggcagaattccctgcatgtgtgataactgatcttgttttattttttggcattgcaactgtggcatagttacaatttctgtttgttcatcacatttaaaattggaagagaacgcgcttgatggatagagcgccttcagtgtactgtttcttattaactttactttttttaaatcaacttgctatagactttatatacattttgttaaatatagttcctagtgacatagaaacgatgcgtagttttcatttactaattacaaatgttgaggcctaattctgaaagtcctcatatttaaaggctagacaacgtaatgaaatttttaactatttgtatgtcattttgaaagtgtactgctttatggtaaaagtgtttttcatttgttcattgttttcattatttgtgatcatgttgtctttcaatacaggcataaaccttccactcttgaacaaagcagctgctttttaaaagcggtaattgcttctttaccttttatttcttttgtaaatgaagcttttctttaagaatgtgactttaaagtgttgtctattgcataaaacagttgacactcacttattgtaaagtgaagattgttctactgcatgtgaagtggaccatgcagatttctgtatgttctcagtatgcatcactagataataaagtcttttgtgaacaaggcatttgtagccatttttaaaagtttttgtcttcagtgctggtaagtcaggtaaaccataaatagttaaaagcaaccttttgtttttttcctgaaagtttttaattgaaagtattattagttaaagatgtaaacctagccaaaattaccagtttattaataattaggatcctaattatttcaaaaaatcctacaaatattgtcagctttcagtgtagtgagattattcctgtaggttatggggtataattcaggatttaactaatgtttctgctattttctcacttttccttttgatggtgcggaaagagaaaaaggaaaacggggcacaggccattcgacgccttctccaaggggtctgatttgctgagacaccagcttcaccttcttaacaaggtgcagctcagtggaagatgatgacaaccagaagacatgagctaaggtttctgtcctataaaagatttattaaaaaacaatccttcatttattttttgtctaattttttagttttcagcattatgatttgggttttattggtgtttggtatttagaattagtgctgttgtggagtgcgtctgtaaagtgcttgttttatcatacttcctgcctctcccctcccccagtttctcctcccctaaaataaaaatagtggtcaactttagtaatataaaaggctgctggatgctgagattccacataacacatggttgtcaaaattggatgttaaggattcttagaaaaacagcaaccaccagaatagcatatatctaaaagtagtcttcagctttaggcagatgcaaaagaatacaaactggaatattaagaatactgttcaactcctttagtatctgttccccaacttaccctgtagaaacctcgttattaaccagtgttccagtcttaaagtagacaaaatattcagagccattttttttaagggaaatgaaaaagatactctgggttttttatactccccaatttagcatatctagactacctatttgaaaggaaccctatcaactgtcttatgtacgttacatgattttcctacactctgtaattttgctgaggtgcaatttggaactctgcaagacctactagattgaatttatttagtgaatgctcctgaataaatgtgcattcctcttttagagtagctgtatgcttttcaaatgctatctgccgtgaattttttgcttttattatactttatggcaaaagtgatatcaagtgattgtcagacttgagggctcatagaagtgttaggtacggctctcaaagatgttacagttttttctagggttgggagaatagttgagatctggaaagcatagacattttttacactctggatagactttattcttgaagatcatcagaaatgaggttggaatttcgaggttttgagcagggggagcatcttatattcacccttaaatcgttattaatacatcctgttttcttcattccctgatagctatctcatttcactctactgtctcaaaattttgttttaaaataatagaaatgttttgccattattaagtaccactttattcctaacaaaaataagtactcaggacttttttttcaaaatgaaatatttatgtactgttttatggtatgtggtagagtaagtaaaatgtaatgttctcagttttgttccatatttgcattcctcttatgctttacctgtattttatcatttgtaagcagaactctagctatatggggtagaaataaaatctctgagatgaaacaaaggaatcaacatgataaaatttaggcgaagtagttaagaaatggcccttttgaatgttgaagataggaaagaaagccatatattcaaatatgtaattttcctcatttagttataatgacatctttaccaattgggcttcataaatgtgtttctttcttaatagtatcctagttccagcatatattcaacatgaattttatcattctcctcctaatggaatgtcttccttatagaaatgttcacgacaaattcatttgtgttttttacatgtcaataatgtatgctaaattaaaatgttttccagttattctgatagatgtcattatggcatccttaatttttcttctccttctgtatatagggtaagggactgttctgaagaacctttccatttagtgatcaagatatggaagctgatttctgaaaatgctcagtgtgtactctaattatttatggtaccatttgaattgtaacttgcattttagcagtgcatgtttctaattgacttactgg

SEQ ID NO: 23482 - DNA, 2534 bp, Homo Sapiens
gagtcctctcgttggtcccggaggtggggttgcgctcacaaggggcgaccgtcgccacggtggcggccactgcatcgcgtcccacctccgcggccctgggcgccgtggtgtcgacgggccccgagcctatgacgggccagggccagtcggcgtccgggtcgtcggcgtggagcacggtattccgccacgtccggtatgagaacctgatagcgggcgtgagcggcggcgtcttatccaaccttgcgctgcatccgctcgacctcgtgaagatccgcttcgccgtgagtgatggattggaactgagaccgaaatataatggaattttacattgcttgactaccatttggaaacttgatggactacggggactttatcaaggagtaaccccaaatatatggggtgcaggtttatcctggggactctactttttcttttacaatgccatcaagtcatataaaacagaaggaagagctgaacatttagaggcaacagaataccttgtctcagctgctgaagctggagccatgaccctctgcattacaaacccattatgggtaacaaaaactcgccttatgttacagtatgatgctgttgttaactccccacaccgacaatataaaggaatgtttgatacacttgtgaaaatatataagtatgaaggtgtgcgtggattatataagggatttgttcctgggctgtttggaacatcgcatggtgcccttcagtttatggcatatgaattgctgaagttgaagtacaaccagcatatcaatagattaccagaagcccagttgagcacagtagaatatatatctgttgcagcactatccaaaatatttgctgtcgcagcaacatacccatatcaagtcgtaagagctcgtcttcaggatcaacacatgttttacagtggtgtaatagatgtaatcacaaagacatggaggaaagaaggcgtcggtggattttacaagggaattgctcctaatttgattagagtgactccagcctgctgtattacctttgtggtatatgaaaacgtctcacattttttacttgaccttagagaaaagagaaagtaagctcaaagaggacaattccagtatatctgcccaaggcagcaacaagctcttttgtgtttaaggcataaaagaagaattctgcatagaaacatggctcatattcgaaattgctctatagtcattagaagccagagaactgctaagtctcctgcaatgtttttcttgctttttgccttccccatatatatggaacttggctacctctgcctgaaatggctgccatcaacacaatgttaaaactgacacgaaggatagagtttcacagatttctacgttttattggtggaagctgatttgcaacatttgctaaatggattagatgaatgtacttctttttgtgagcttacttgcctggattgctttaaaattaacctttgtgcaataccaagaaaatagctctttaaaagaatgtctttgtatgtctcaaggtaaattaaggatttactgaataaggtgttgaccaaatccagaccattttattttatttttttatttatttattttttgagatggagtcttgctttgtcgcccaggctggagtgcagtggcgtgatctcagctcactgcaacctccacctcccgggttcacgccattctcctgcctcagcctcctgagtagctgggactacaggcacctgccaccacgcctggctaacttttttttatattttgagtagaaatggggtttcaccatgttagccaggatggtctcaatctcctgaccttgtgatccgcctgccttggcctcccaaagtgctgggattacaggcgtgagccactgcgcctggccagaccattttagaattgggaaattttagtgagaaaaaatgcactgtaaatatgctttagttttaattcagttgggatgcactacctagcgaaaattgagaaactatatacttctcagagaaatatctgacatctattgtcattccattgctattttttttccccagagacttccataatttaaaataaaatcctagatccagttcttgttttttggcataaatacttaatctattttaaatttataaaatctgagcttctaggatccagctgtgtcaacctttatttagcatatataactataaatcacttattacagatgctaaatagatcaccttttacagatgctgaaatgtttgggatatgtttgttgacaaggtaaatggaaatgagaaactttatacttcagttttcagatatatggatctagatcccaaataaatgattaatcttcattggtttctcaaattcaggttgaaatacaaattaatagcctttattgattttacttttatgagtcattgtagacatctataaatataaaagggcctgtacccaaaggatgccagaatactagtatttttatttatcgtaaacatccacgagtgctgttgcactaccatctatttgttgtaaataaaagtgttgttttcaaaaaaaaaaaaaaaa

SEQ ID NO: 23483 - DNA, 6605 bp, Homo Sapiens
ggatccttttagcccaggagtttgaggctacagtgaaccatgatcacaccactgcactccagcctgggaggcagagtgagaccttagctcttgagagagagagagagagagagagagagagagagagagagagagagagagagagagagacagacagacagaaggaaaatgaagaaaggaaggaaaaggaagagagagagaaaagaaagaaagaaaaacacctgcctacctgcctttcaacctgctggatcaccttcacttgtatcttctcaacagtttaggacatcaacaaaacagtaacaatgtggcattttaaaaattctttgaacaaaattttctaaggatatcgtgaggttgtgtgtatcttgtgctaaaatatatagttaatttagtggaggtaaacctgcagaaacatttaattgtttggcattgagtaactggatttgtattattgttcaattagatattgtggcaattgtagaaacttaaccatctctaatataattgactttcattattgatgcatgaagatgtttttattctaattagattggcctcttaagtgattaggtagtgaagcttgtctcatatttaagtgaagagtaaattatttgtatgaagtgtctagaggatgcctaaaattgattattttgtattctaggtaagctaaattttattgttttgaatgaaggcactctgcaagtcttatctaataaatgacacaaaacaaatctgttatcaactgaattgttagtgtttgtttcctgtctgcttggggaagcttatgatttagtggttttttagaaatccagaaagtaggaataataattattcccaacccttttccttctcactttacaaaaagtttgtgaagaattgagaaataaatgctacgaataatcttaagctcttaggtagaagtacttgatcaaaactaaccaggtcatttttctacaattagtgcagaaagctagtttttactaattgttcccacagctactccaggcccatttcatgcctaagaaaactaggtcccagtgagagtcatgtgagtgttgtaggcttcattggttgaataacgtccttacctgtaagtgtatattcagatttagtgaatgtacttcatgtgttcatataaaaaatttcctagaatagctatggagtaggtcatgccggtaaaaactgttagtttgtgacttttttttttttttttttttgagactgagtctcactgttgcccaggctgaagtgcagtgacatgatctctgctcactgcaacctccgcctcccagattcaagtgattctcgtgcctcagcctcccaggtagctaggattacaggcacatgccaccatgcccaactaattcttgtatttttaatagagacagggttttaccatgttggcgagtctggtctcaaactcctgacttcaagtgatccacccgcctcatcctcccaaagtgctgggattacaggcatgagccactgtgcccggccatgacttttataatagatctgtaaaccagcttaagtcatttgaaaatcagagcatactgaaaatgtaataaaacataaatattattgaagatttttcagagtcatcattttgaaaggagttcttgtagttctttagataatagaaaataatgaaaactgagtttatgacgcatcttttgcatatatgatattcttatatacttatctgtactgataagtataaaaaggtagaaaataattctactttgtatttcaggaaattgagcttcatatgaaaactaaggataaagtatctcaatgatgtgtgtgtgtgtatatatatatatatatctccagaaaaaatcattataaagctgcatttcattagaattttcagcaatttagataaataagtcatgattttttttttcctccgagaggagtctcactctgtgccaggctgagtgtagtgtggcatcttggctcgctgcaacctccacttcctgggtttccgcaattctcctgcctcagcctccagagtagctgggatttcaggcatgtgccaccatgcctgacaaatttttttttgtatttttagtggagccggattttaccatgttgcccaggctggctgaactcctgacctcgtgatctgcccacctccacctcccaaagtgctaggattacagatgtgagccaccatgcctgaccagaagtcatgattcttaagaataaaattcaaaataatctcttccgttgtcgattaggttctgttcataaataaatatttatgcagtcaaaaatgaataattgttttcaaacgaggagctcaaggaattctatgtaattttggtttacttactattttatataattattttccaatctgtaagtctagtgattaattcttatattacctaaaatgttttatagacatgttagaggaggacataatgtaaatgtattgtaaatagtaatggtttcattaacttgagctcattttacttatttagtacctgtttggttttagtttatagttgttatttcctgtatagtgtagcttgtacttggaagtagtaaaaccagatttctttatccgtctttatggtaccagacctttcctaatcagactgcagacctttcctgagtatttctaataaagtctgcttacattttttttttggcctgcatagtagtttgtgctatatactctctagaaaatgtaattctggatatttgccgcccataactttcaattaatcaaaatcttgtcaactgccatataggccctcatgttacaaatgtggaagtcagttacttaaagaggctgggctgggcattgtggctcacacctaatcccagcactttgggaggctgaggcaggtcagatcacttgaggtcaggagttcaagacgagcctggccaacatggcaaaacctatctctactaaaaatacaaaaattagctgggcgtgatggcacatgactgtaatcccagctacttgggaggctgaggcaggagaattacttgaaccaggaggcggaggttgcagtgagctgagatcacgccactgcactccagcctgggcaatagaatgagactccgtctcaaagaaaaaaagtttaagccagatgcagtggctcatgcctgtaatcctagcactttgggagaccaaggcaggaggattgctcgagcacaggagtttgaaaccacgttgggcaacaaagtgagaccctgtctctacccacccgccccccaaaaaaaagcaaaaaattgaccagctgtggtgctgcgtgtctgtggtcccaactacacaggtggcagagagaatcccttgagcccaggaggtcaaggttggagtgtgttatgattatacaactgcactccagcctggatgacagagcaagacctaaaaaaaaaaaaaaagattttaaaaaagattgactaagtgaatgagtcctcttcttgaatatcagtcattccaggagagtattttcattaacatatttatgtctcttgttgaagtatccattaagagcaggtagcaaaagctagacagaatatgcttttgaaggattccttccttatgctctttattaatacctttcttaagtttctcaagatctccttttgcctccctcttgatcttaaacgagactgaagtttaagagtctttagccactctgtccccataggaagcaaatttatgatttcagaagttccagcccccaataagaagcactgtccaatcgtttgcagatgtatcttgtaagccagatttcatgacagataagtccattccactgtcatgtgccatgtttaaagtactaaattaggttactctgtagtcaaaacaagtaagcctggtccagactactctagggccaaatcccgtcgactgtccttttgttctgccatgcattcagttgtagcttcctttgccagtgacacatagtgactcttgcaactgaaccaagtaggtatttagtggcacaataaacttgcaatggagagtgactcttgccaaaaccataaccagattaggttatttttagtaaacaactaaaataaaaaattcttgacattgggaagaagtattttaacagaataatagtaatgtttttattgtgccattgtgattttctataaagaaactcccaatatacttatttatatttttttaaatttacaactctttaactgtatccaacatttcactgccaggaatatagtcaggctcgaagcttttttagaaacccatgatccaatccataccaacacttcctttagtttatggcttctgttcatttgcactgtccagaaaggtactgctaccatttgtagtcactccaaaaaaaagtgtgaactacctaggtataactctcataagacgtatacagcagcatctgtatgctgaaagttaccaaaaaagtattacttgcagatgattttgcaccttagttcccaagtgcccctgtgcagaatatggagcttatgtcctgtctctctttgaatgatgaggtgatgaaggagcttcagatgttactgggtgagcttgtattgagtgttacaaagagaagtcattctgcctttctttggctctaattgcagaaagtgaagtcactgcttttgctgtcttggatcaagaccagaaagaaattattgataccaatggagctggagatgcatttgttggaggtacagactaatttatttcattcttacttacaagtaaaacattttaacccttgtttctaccatataaccaagatttattcatttagtaacttctaatttcttcttttaaataattaacttctgccgttatttccatatacttctatcattgtcagtattagagggttttaccagaggaaaaatatgtgtttggaaaagataatttgctactatgctgtaccccagtcattttcacaagattaattgtatctgtcagaaaattgcataaacaaactgcatcaagtacagtatatagtatattcatagcccttcaggcttaaatgttaacacatttttgttctttaaaacaagttgtgatgaatattaaacagtatgctaataactaaggatgtagtcttttgatgataatcctttggttaaaaacatctgtttcaaacacaatagtggttgtttgttatactaaaaagggttaaatttttgcctatttttggctcaataagaactggcaaattttatgtgaactaatgattttggtaatgaatactcaaaaataaaatcaaaacaatagaagacttggcttgatgacttagattgatctaaaatctgattcaaaaattcttttgataagtctaaattccttctagttaagtgtagttaattaagctagtttatagtctctagaaagctttcgcttcctcacagataccccaaaggtctttcctggtctctgtttctttctcttaacatcaagccagaccaggttcctttaaaaaaaaaaaaaaaaaagcaagcaagtggagctgatgattgtccctttttctctggaggataatttgaatcatgggaaacttatttaagtttgtgtgatggttttaacttaatattttattttaatagtcttttgccaacataaatttttatttttctttctctaaaactattcatgcccagtcttttttttttctcccaggctggtgtgcagtggtgcaatctcagctcactgcaacctccacctcccgggttcaaatgattctcctgcctcagcctcccaagcagctgggaccacaggtgcatgcctccacacacctggctgatttttgtacttttagtggcgacgggggtttcgccatgttgggcaggctggtcatgcccagtcttaaatgaactattaaccattaggatgccccatgcccttgttctttggaaagagtctgtaccacagacaacattctacttcactgttatgattgtgttttttttatttccttgctcggaaagtcttcattattgataatattagagtacttagcagccaattttcctatttttttactttttagagctatagatgtatgtaggctaaaatattttattctgaatttaaccatattctgtaatacattaagaaaaccctagtgatttcaattggttagaaattggtcaaaccagggaaattcttagtctagaaacttttaaacttatacactgtatgtacattacttaagtactttaaaatctttaaaacatgaagtattctatttctttgacattcagtgggacacataatgaggccatcatagatttgatggtgacctaaatagccactacctctggccttgggttacttggcttctggccggcaacaacagattctgttacagacacctaactatctgtaatgctacgatactaggtgagacatgtagactttttgagggagggagaggagaggccattcttaggatactgaggtaggaacagctagctaccatttgtattgtggttacaacgataaataaactacttcatcaaagcaattgggatttttttgttagaggatttttcagcctctttttatcctacttcattatatttattgttggggtatagttaggtaagcaaaaaagaaaaagagtatagaacagggatcc

SEQ ID NO: 23484 - DNA, 3653 bp, Homo Sapiens
gcgctcggcgcccaccaggcggacgcccaggagaacccctgcctccgtcgcggctcctggagagctgatcgttcacctgccccggcccgcctgaggacgggggtgccttcatgcggcccccacactcctcaccccgccgccgccgccgtccccgagctccgcacagtgcgccccagccccagcagggcgcacaactttggaagtctcgcggcgctccgagaggcggcagagtccgcgccccagccccgggccgggccgggccagaaccgcagcgtctgggggaagccagagagtcggtaatcgcttcggggatgtaaggcgacagacataggacccccgagctcgcatcagcacccttcggctgcctcccggggtgggggcgggccccgcacacggtaagacctcttgctttcgctcaggctcaagattcaagatacagatattgatatgtatatatatatttaatttcctgtcatccttccaagttatcaggccaccgatgatttttgttctcccttcttgaagaataaatctctctttacccatcggctctccctactctctcccgccgcttagaaataaaacttggctgtattaggagctcggagcaagaaggcgcccaccgagagcgtctgaagcgcgagccaggcgcagttcgcgggacccgggccatgggccgctagcggtcctccagttcgggcccggcctccctgcggccccctccctatgtgagccgcagccaggcgagcggggcgccggaggaagaggaggacccacgggcgccgggccggaaggcagctggcagcaggcccaggccagcgggcgcccgcgttcatgttccgccaggagcagccgttggccgagggcagctttgcgcccatgggctccctgcagccggacgcgggcaacgcgagctggaacgggaccgaggcgccggggggcggcgcccgggccaccccttactccctgcaggtgacgctgacgctggtgtgcctggccggcctgctcatgctgctcaccgtgttcggcaacgtgctcgtcatcatcgccgtgttcacgagccgcgcgctcaaggcgccccaaaacctcttcctggtgtctctggcctcggccgacatcctggtggccacgctcgtcatccctttctcgctggccaacgaggtcatgggctactggtacttcggcaaggcttggtgcgagatctacctggcgctcgacgtgctcttctgcacgtcgtccatcgtgcacctgtgcgccatcagcctggaccgctactggtccatcacacaggccatcgagtacaacctgaagcgcacgccgcgccgcatcaaggccatcatcatcaccgtgtgggtcatctcggccgtcatctccttcccgccgctcatctccatcgagaagaagggcggcggcggcggcccgcagccggccgagccgcgctgcgagatcaacgaccagaagtggtacgtcatctcgtcgtgcatcggctccttcttcgctccctgcctcatcatgatcctggtctacgtgcgcatctaccagatcgccaagcgtcgcacccgcgtgccacccagccgccggggtccggacgccgtcgccgcgccgccggggggcaccgagcgcaggcccaacggtctgggccccgagcgcagcgcgggcccggggggcgcagaggccgaaccgctgcccacccagctcaacggcgcccctggcgagcccgcgccggccgggccgcgcgacaccgacgcgctggacctggaggagagctcgtcttccgaccacgccgagcggcctccagggccccgcagacccgagcgcggtccccggggcaaaggcaaggcccgagcgagccaggtgaagccgggcgacagcctgccgcggcgcgggccgggggcgacggggatcgggacgccggctgcagggccgggggaggagcgcgtcggggctgccaaggcgtcgcgctggcgcgggcggcagaaccgcgagaagcgcttcacgttcgtgctggccgtggtcatcggagtgttcgtggtgtgctggttccccttcttcttcacctacacgctcacggccgtcgggtgctccgtgccacgcacgctcttcaaattcttcttctggttcggctactgcaacagctcgttgaacccggtcatctacaccatcttcaaccacgatttccgccgcgccttcaagaagatcctctgtcggggggacaggaagcggatcgtgtgaggtttccgctggcgcccgcgtagactcacgctgactgcaggcagcggggggcatcgaggggtgcttagccccagggcactcagaaacccgggcgctgcctgctctgcgtttcctcgtctggggtggctctgcagcctcctgcgggcgggcgtctgctgctcctacaagggaagcttcttgctgccaggcccacacatccccagttgttggtttggccactcttgacctggagccatcttcctagtgggccacccctaatcactattgcttcctaaaggtattttcaccctcttcgcctggtacagccctcacagctcttcagagcaagcactggactacaagggcatggctcacaaaaggttaatggatgggggttacctagccctggctaattccccttccattcccaactctctctctctttttgaagaaaaatgctaagggcagccctgcctgccctccccatcccccgctgtaaatatacactatttttgatagcacacatggggcccccatatctcttggccttggttttgatgttgaaatcctggccttgggagagatgccttccaggcagacacagctgtctggttcaggccaagcccctttgcaatgcaagccctttctggtgttatgaagtccctctatgtcgtcgttttcaccagcaactggtgactgtcccttcgacacggacctgctttgagatttcctgacagggaaaagatttctgtccatttttttcctgtgcctaacagcataattgccttttcctatgtaaatattatgatggtggatcaagacataagtaaatgagcctttctgcctcacatcagccctgtgtataaagccattattctctgatgcactgtttgccccagtaactcactttaaaacctctctttccagtgttccctctctccctccagggccactgcttgaagaagaatatgtatgtttctatcttgtatgtctgtgtgcccctcctgccccgaaagtgctgactatggggaaatcttttagctgctgtttttagactccaaggagtggaaattatgtggaagaagcaaacctgatacaatttgcccaaggtaaacagtttgaaaagacaaatgggcctgccaaactgtacagtttcttccccaagagctgttaggtatcaaaatgttgtcctttcccccctccgtgcttttctggttgagatcatgtcattgatgaactgccaaagtcaggggaggagggcagagactttgtgtttacatctgcatttctacatgttttagacagagacaatttaaggcctgcactcttatttcactaaagaaaaactaatgtcagcacatgttgctaatgacagtggatttttttttaaataaaaaagtttacagatcaaatgtgaaataaatatgaatggagtggtcaaa

SEQ ID NO: 23485 - DNA, 2047 bp, Homo Sapiens
atggccgacccgcaggctggctccgcggccggggactgggagatcgatgtcgagagcctggagctggaagaggacgtctgcggggcgccgcggtccacgccccccgggcccagcccgccgccggcggacggggactgcgaggacgacgaagatgacgacggggtggacgaagacgcggaagaagagggcgacggcgaggaggcaggcgcgtcccccgggatgcccggccagccggagcagcgggggggaccgcagccgaggccgccgctcgcgcctcaggcctcacccgccggcaccggtccccgagagcgctgcactcccgcgggcggcggcgcggagccgcgcaagctgagccgcacgcccaagtgcgcgcgctgccgcaaccacggcgtggtgtcctgcctgaagggccacaagcgcttctgtcgctggcgcgactgccagtgcgccaactgcctgctggtggtggagcggcagcgcgtcatggccgcccaggtggcgctccggaggcagcaggccaccgaggacaagaaggggctttccgggaaacagaataatttcgagcgcaaagctgtgtaccagaggcaagtcagagcccccagtttgctggccaaaagcattttagaagttctccttggattattctacagctattatgtgtacataatgaaccatctttagaaaataaaagtgacatcagctctaggctatcgccccattccagcggagacttatgtaggagggaccttccctctacctcccccagttagtgacaggatgaggaaaagaagagcctttgctgataaagagttggagaacattatgctggagagagaatataaagaaagggagatgttggaaacttctcaagctgctgctctgtttctgcccaaccgcatggtgcctggacctgactacaattcctacaaaagtgcctacagccccagcccagtggaaccaccaagcaaggacttctgtaattttttgcccacctgccttgatttaaccatgcagtattcagggtctgggaatatggaactaatttcttctaatgtcagcgtgggcacaacttatagacagtatcccttgtcctcaagatttttagtttggcccaagtgtggccccattagcgacaccctcctctaccagcaatgcctgctaaatgccaccacctcagttcaagccctgaagcatggggccagctgggacttgaagggagcacgagtccaggatggactcagtgcagagcaggacatgatgccatcgaaattggaaggttccctggtgctgcctcacactcctgagatccagaccacgagaagtgaccttcagggtcatcaggctgtcccagagaggtccgcgttctccccaccccgacggaatttctctcccattgttgacacggactccctggcagctcaagggcatgtcttaacgaagatcagcaaagaaaacaccaggcaccctctgccacttagacataatccattccactcattattccagcaaacacttactgacaaatcgggtcctgagttgaaaacaccatttgtcaaagaggcctttgaagagacccctaagaaacacagagagtgtttagttaaggacaaccagaagtacacatttacaatagatagatgtgcaaaagacctttttgtagccaaacaagttggaacaaaactctcggtgaatgaaccactgtcattttctgttgagtctattcttaagaggccttcatctgccatcactcgtgtctctcagtgaaaggctgcttaaacagaaagctggattttctgcagtcttagagcattatagccatttgctactttttttaaaagttaagatgtttgtgtaaagaaatttctaatgtaaagatgatgattttgaaaaattttatatattcctaatatgcatgtactttttcttatcacatatatttaaacttacagatggaaattgcccaatgtgcaaattgttaagtaccacactttacacagcatttcaaaaagcaataaaattgacactgtcttctcaaagacccaaaaaa

SEQ ID NO: 23486 - DNA, 3895 bp, Homo Sapiens
attccggcacagggacacaaacaagctcacccaacaaagccaagctgggaggaccaaggccgggcagccgggagcacccaaggcaggaaaatgaggtggctgcttctctattatgctctgtgcttctccctgtcaaaggcttcagcccacaccgtggagctaaacaatatgtttggccagatccagtcgcctggttatccagactcctatcccagtgattcagaggtgacttggaatatcactgtcccagatgggtttcggatcaagctttacttcatgcacttcaacttggaatcctcctacctttgtgaatatgactatgtgaaggtagaaactgaggaccaggtgctggcaaccttctgtggcagggagaccacagacacagagcagactcccggccaggaggtggtcctctcccctggctccttcatgtccatcactttccggtcagatttctccaatgaggagcgtttcacaggctttgatgcccactacatggctgtggatgtggacgagtgcaaggagagggaggacgaggagctgtcctgtgaccactactgccacaactacattggcggctactactgctcctgccgcttcggctacatcctccacacagacaacaggacctgccgagtggagtgcagtgacaacctcttcactcaaaggactggggtgatcaccagccctgacttcccaaacccttaccccaagagctctgaatgcctgtataccatcgagctggaggagggtttcatggtcaacctgcagtttgaggacatatttgacattgaggaccatcctgaggtgccctgcccctatgactacatcaagatcaaagttggtccaaaagttttggggcctttctgtggagagaaagccccagaacccatcagcacccagagccacagtgtcctgatcctgttccatagtgacaactcgggagagaaccggggctggaggctctcatacagggctgcaggaaatgagtgcccagagctacagcctcctgtccatgggaaaatcgagccctcccaagccaagtatttcttcaaagaccaagtgctcgtcagctgtgacacaggctacaaagtgctgaaggataatgtggagatggacacattccagattgagtgtctgaaggatgggacgtggagtaacaagattcccacctgtaaaattgtagactgtagagccccaggagagctggaacacgggctgatcaccttctctacaaggaacaacctcaccacatacaagtctgagatcaaatactcctgtcaggagccctattacaagatgctcaacaataacacaggtatatatacctgttctgcccaaggagtctggatgaataaagtattggggagaagcctacccacctgccttccagagtgtggtcagccctcccgctccctgccaagcctggtcaagaggatcattgggggccgaaatgctgagcctggcctcttcccgtggcaggccctgatagtggtggaggacacttcgagagtgccaaatgacaagtggtttgggagtggggccctgctctctgcgtcctggatcctcacagcagctcatgtgctgcgctcccagcgtagagacaccacggtgataccagtctccaaggagcatgtcaccgtctacctgggcttgcatgatgtgcgagacaaatcgggggcagtcaacagctcagctgcccgagtggtgctccacccagacttcaacatccaaaactacaaccacgatatagctctggtgcagctgcaggagcctgtgcccctgggaccccacgttatgcctgtctgcctgccaaggcttgagcctgaaggcccggccccccacatgctgggcctggtggccggctggggcatctccaatcccaatgtgacagtggatgagatcatcagcagtggcacacggaccttgtcagatgtcctgcagtatgtcaagttacccgtggtgcctcacgctgagtgcaaaactagctatgagtcccgctcgggcaattacagcgtcacggagaacatgttctgtgctggctactacgagggcggcaaagacacgtgccttggagatagcggtggggcctttgtcatctttgatgacttgagccagcgctgggtggtgcaaggcctggtgtcctgggggggacctgaagaatgcggcagcaagcaggtctatggagtctacacaaaggtctccaattacgtggactgggtgtgggagcagatgggcttaccacaaagtgttgtggagccccaggtggaacggtgagctgacttacttcctcggggcctgcctcccctgagcgaagctacaccgcacttccgacagcacactccacattacttatcagaccatatggaatggaacacactgacctagcggtggcttctcctaccgagacagcccccaggaccctgagaggcagagtgtggtatagggaaaaggctccaggcaggagacctgtgttcctgagcttgtccaagtctctttccctgtctgggcctcactctaccgagtaatacaatgcaggagctcaaccaaggcctctgtgccaatcccagcactcctttccaggccatgcttcttaccccagtggcctttattcactcctgaccacttatcaaacccatcggtcctactgttggtataactgagcttggacctgactattagaaaatggtttctaacattgaactgaatgccgcatctgtatattttcctgctctgccttctgggactagccttggcctaatccttcctctaggagaagagcattcaggttttgggagatggctcatagccaagcccctctctcttagtgtgatcccttggagcaccttcatgcctggggtttctctcccaaaagcttcttgcagtctaagccttatcccttatgttccccattaaaggaatttcaaaagacatggagaaagttgggaaggtttgtgctgactgctgggagcagaatagccgtgggaggcccaccaagcccttaaattcccattgtcaactcagaacacatttgggcccatatgccaccctggaacaccagctgacaccatgggcgtccacacctgctgctccagacaagcacaaagcaatctttcagccttgaaatgtattatctgaaaggctacctgaagcccaggcccgaatatggggacttagtcgattacctggaaaaagaaaagacccacactgtgtcctgctgtgcttttgggcaggaaaatggaagaaagagtggggtgggcacattagaagtcacccaaatcctgccaggctgcctggcatccctggggcatgagctgggcggagaatccaccccgcaggatgttcagagggacccactccttcatttttcagagtcaaaggaatcagaggctcacccatggcaggcagtgaaaagagccaggagtcctgggttctagtccctgctctgcccccaactggctgtataacctttgaaaaatcattttctttgtctgagtctctggttctccgtcagcaacaggctggcataaggtcccctgcaggttccttctagctggagcactcagagcttccctgactgctagcagcctctctggccctcacagggctgattgttctccttctccctggagctctctctcctgaaaatctccatcagagcaaggcagccagagaagcccctgagagggaatgattgggaagtgtccactttctcaaccggctcatcaaacacactcctttgtctatgaatggcacatgtaaatgatgttatattttgtatcttttatatcatatgcttcaccattctgtaaagggcctctgcattgttgctcccatcaggggtctcaagtggaaataaaccctcgtggataaccaaaaaaaaaaaaaaaaaaaa

SEQ ID NO: 23487 - DNA, 4378 bp, Homo Sapiens
gacaaaggaggattcatgtccaaagggctcccagagaccaggacggacgcagccatgtcagagctggtgcctgagcccaggcctaagccagcggtgcccatgaagcccatgagcatcaactccaacctgctgggctacatcggcatcgacaccatcatcgagcagatgcgcaagaagaccatgaagaccggtttcgacttcaacatcatggtcgttggccagagtggactgggcaaatcaacgctggtcaacacgctcttcaaatcccaagtgagccgcaaggcctccagctggaaccgggaggagaagatccccaagacagtggagatcaaagctatcgggcatgtgatagaggaaggcggtgtcaaaatgaagctgaccgtcatcgacaccccaggctttggagaccaaatcaacaatgaaaactgctgggagcccattgagaagtacatcaatgagcagtacgagaagttcctgaaggaggaggtcaacatcgccaggaagaaacgcatccctgacactcgtgtccactgctgcctttacttcatctctcccacaggacactccttgcgacctctggatcttgagttcatgaaacacctcagcaaggttgtgaacatcatccctgtcattgctaaggctgacaccatgaccctggaggagaagtctgaattcaagcaaagggttcgcaaggagcttgaagtaaatggcattgaattctacccccagaaggaatttgatgaggatttggaggataagacggagaatgacaaaatcaggcaggagagcatgccttttgctgtggtgggaagtgacaaggagtaccaagtgaatggcaagagggtcctcggccgaaaaactccatgggggatcatcgaagtggaaaacctcaaccactgtgagtttgccctgcttcgagactttgtcatcaggacccacctccaggacctcaaggaagtgacacacaacatccactatgagacttacagggccaagcggctcaatgacaatggaggcctccctccggtgagcgtggacacagaggaaagccacgacagtaacccatgacgaccacttctctgtgtcatcacacatacccacttcacacacacacatcccaaataccaccaccaaccaccttcttcctctcaactctgtcccacaggcctgtctggtatttgtggagcatcttgtctgtgtgtgtgtgtgtgtgtgtgtgtgtgtgtgtgtgtgtgacagagagagagcgagagagcctgtgtgtgtgcatgcaggggtgaggtattttcactgccctccctggagagtcccttgtaagtttggctcctccatgcctgtccattatctgtctcctttccttgtgtcccaaaacaaagctgtttgcctcactcaggagatctgggggaggtttcatttaaaagtgctgggagcaggtgagccacaggcaactcttctctcggaacctgcacacaaactggggctatagagattctccaaggacagatggcagtggagctagacctgagtagggggcagggagttcaggacaaccctcctgtaagttgggggtggtctgggggtaaggctggggcttcctgggaaaaggaaggccatgagaaggcagagaagtaggccagagctgggttcttgcagaaagcatcagtgcctacaaatggagctccacccttcagtctgtgtcgtgttcagtgtcacaaagctaccacctgtcaccagagcctactgctgctctccactcaactggcctctgctgccaggccactgcctgtctctgcttccgactttgtcttctttctccctttccctccttccctcatacattgctttctctccctctcctgcgtgtctctgacatctctcacttccttttagatgaatctactttaggttcattcctatatttagcatttatgcccagtctacttccagaaatgactttagactgcctttcacataaaatcacaaaactacaggacagtacaaacagattgccagagaaatctgggtcaaagaaaggaataggaaagaaagtttctgtagtcaagcacctgaacaggccctgagctcacaggcagccaatgtaaagagggaaacacagtgagttatgcagttcccagtgtccagttaaaggaagcacacatgctagtcatgtgagacaaccttttattgggacatcaggttctagaactaattctaaagaagtatcagaaacaatatacataatttgtctttcttagtaatttggcttcaaagacaaatttttgaccacacctccgttttctccgtcagacttctctcccttctaagcaggcttctctgttgctccatttgcttcatacatacttgacctctcttttctattccccatcacttttgtgctgaagctaatcatatttatgtctgtctttctctacttttccctaattccctctcctcctgactcctgtagacattcccaatgatacccaccgtcatacatttaggcttttcttgcctttccctgaagccctgtatttattaatgcatatatttcccctgcttgttgtacaagtaagttactcttttcctttaatctgtaagattcatgaaattcggggccagggaaacagtttagccttagggaagggaaaacactaagtgaaactgtttacaataacctcatacaaccttctgtcccatctcctggttcagcctaggtgtttcactggtcctctatgaatcccagcacttataatcccagtcttttatcactcaggtgctaggaaaaaaaacatagactcaagacccaagattcaatggaccaggagaaaggggggcggtgatcaggtcaccagtgaccccaacctatgctctcggtctttcctggaggctgccaacccagccctcatcctcccttgctcacaaagttacagggtaggcacctgtcaggacagaacagcagcagcgctacagcccagaggttatacatttcaacagaacagggatccttggctactgtagaagcagtcctgtatggagaccttggaccagcaggggaagatctatgggcatgggaggtgggcgttggaaaggctgagtaggaatggtgcctggcacccctgaaccatgatctgagcctccctggagaaggtattttatatgtctgctgccagctgctggtctccacaccctcaaccgttctcaacccccctgcagggagaaggcctcctgggcactgtccttccacctgtgccagccaccccctgccccactgctgaatgaaggccatttcaagcgctgcttctcactccattcctctcagctgttattgctgcagggccaagccctttttagtgctgtgctcgtccagctcaccaccacagcccctctcagccctcagtaggtgggaggggccagctgcctctttaggccagttgcatcctccatttatccaaaccactcctctcctcccagtggagtggggttctgccagtacagccctactgcatcatctgcgtcagccggtcctagcccatctgcagggtgaaagaactcatcaagagctccttctgcccttgtaagcccatcccagctacttgtaaccatctctaagggcaatggcattgctccctacccattcatctgcatgagctactcttggcttccttaaagggtcaagaaagcaatttttctgcttactagattcattgagatcagctgtgtgagccccaaagtgggacaagggtgtctccttcattacttaaagatattcatgagggtgggtcactacagatgttggggagcaagggctaggatcactttttaaaaaatcaccacttgtggctgtcccagagtgcggttgtacatcctccccacctcataacgcagccactgaggaagagtggttttcctaagaagacattgctggagttgactttcttctgtccaaacaaacaaacaaaaactaaacacacacacaaacccccagaaacccacaatatgtacacgctaaggaaaaactagcacccttctgtccactcagcaataagagggatctcttcccacctaccctacctactcctacccccaacccccttccccattaatgtgagtaatgaattagcctgaccacaggtggtcactgtaggctaatggaaaatacccaagggagggcaaagccccccatcagatgcatgaatgtttgcgaatgttgactgccactgccccacacactgtgtctttatagaattcccctttgcccaccctcttcctgtctccacctggacacaacttgctcaaaggctggtgacttgtgggccattcatctacaaccaagtcctgatggagcaagaggcccacgcctaggggatgcaagaacaac

SEQ ID NO: 23488 - DNA, 3244 bp, Homo Sapiens
cggcgaaagtccagtatgtgggtccagggtcactcttctagagcttccgcaacggaaagtgtgagtttttcaggaattgttcagatggatgaagatacacattacgataaagtggaagatgtggttggaagtcacatagaagatgcagtaacattttgggcccagagtatcaatagaaataaggatatcatgaagattggttgctcactgtctgaagtttgcccccaggccagttcagttttggggaatcttgacccaaacaagatttatggtggattattttctgaagatcagtgttggtacagatgcaaagtactgaaaatcatcagcgttgaaaagtgtctggtgaggtacattgactatggaaatactgaaattctaaatcgatctgatatagttgaaattcctttggagctgcagttttctagtgttgccaaaaagtataaactttggggactacacattccttctgatcaagaagttacccagtttgatcagggcacaacctttttggggagcttgatttttgaaaaggaaataaaaatgagaattaaagcaacctctgaagatggaacagttattgctcaggctgagtatggcagtgtggatataggggaagaggtgcttaagaaaggatttgcagagaaatgcagacttgcttccagaactgacatctgtgaggaaaaaaaattggatcctggtcaacttgttctcaggaacctcaaaagccccattcctttgtgggggcatagatcaaaccagtcaaccttcagcaggcccaaggggcacttaagtgagaaaatgactcttgacttgaaggatgaaaatgatgcaggcaatcttataacatttccaaaggaaagtttggctgttggtgactttaatttagggtctaacgtcagcctggaaaaaattaagcaggaccagaaactgattgaagaaaatgaaaaacttaaaacagagaaggacgctcttcttgaaagttataaggcgttagaattgaaagtagagcagattgcccaggagctgcagcaagagaaggcagctgctgtggatttgactaaccacttagaatacactctgaagacctatatagataccagaatgaaaaatctggcagctaagatggaaatactgaaagaaatgaggcatgtcgacatcagtgtccgtttcggaaaagacctttcagatgctatacaagtgttggatgaagggtgctttactactccagcttctttgaatggattagagataatatgggcagaatacagtctggctcaggagaatattaaaacttgtgaatatgtgagtgaagggaatattttgattgcccaaagaaatgaaatgcagcagaagctgtacatgtcagtagaagattttattctggaagttgatgagtcatctcttaataaacgcttaaaaacattgcaggatttgtcagtctctttagaagcagtgtatggacaagccaaagaaggagcaaattctgatgaaatacttaaaaaattttatgactggaagtgtgataaaagagaggagttcaccagtgttagaagtgaaacagacgcttctctgcaccgtcttgtagcatggttccaaagaaccttaaaggtttttgacctatctgtggaaggatcactgatttcagaagacgcaatggataatattgatgaaatcctagagaagactgagtcaagtgtctgcaaagagctggagatagctctggttgatcaaggtgatgcagacaaggagataatttcaaatacatatagtcaagtactgcaaaagattcattcagaggaaaggctcattgccacagtacaagctaagtacaaggacagtattgagtttaaaaagcagcttattgaatatttaaagaagattcccagtgtggatcacttgctatccattaagaagacattgaaaagcttaaaagctctactcagatggaaattggttgaaaagagtaatttggaagagtcagatgatcctgatggctctcaaattgagaaaataaaagaagaaataactcagctgcgcaataatgtctttcaggaaatttatcatgagagagaggaatatgagatgctaactagtttggcacagaaatggttccctgagctgcctctgcttcatcctgaaataggattactcaaatacatgaactctggtggtctccttacaatgagcttggaacgagatcttcttgatgctgagcccatgaaggaacttagcagcaagcgtcctttggtacgttctgaggttaatgggcagataattctgttaaagggctattctgtggatgttgacacagaagccaaggtgattgagagagcagccacctaccatagagcttggagagaagctgaaggagactcagggttactgccattgatattcctgtttttatgtaagtctgatcctatggcttatctgatggtcccatactaccctagggcaaacctgaatgctgttcaagccaacatgcctttaaattcagaagaaactttaaaggtcatgaaaggtgttgcccagggtctgcatacattgcataaggctgacataattcatggatcacttcatcagaacaatgtatttgctttaaaccgtgaacaaggaattgttggagattttgacttcaccaaatctgtgagtcagcgagcctcggtgaacatgatggttggtgacttgagtttgatgtcacctgagttgaaaatgggaaaacctgcttctccaggttcagacttatatgcttatggctgcctcttattatggctttctgttcaaaatcaggagtttgagataaataaagatggaatccccaaagtggatcagtttcatctggatgataaagtcaaatccctcctctgtagcttgatatgttatagaagttcaatgactgctgaacaagttttaaatgctgaatgtttcttgatgccaaaggagcaatcagttccaaacccagaaaaagatactgaatacaccctatataaaaaggaagaagaaataaagacggagaacttggataaatgtatggagaagccaagaaatggtgaagccaactttgattgttaaattattattgttgttgttgcagaggttctttttaaaaactttgtttggtttggttaatacacagaaatatctagaaatgttctgggactagttgagttgtatctttagtattcaggttgtgaaaaataaagatgtttggctatgcaaaaaaaaaaaaaaaaaaaaaagg

SEQ ID NO: 23489 - DNA, 3280 bp, Homo Sapiens
gcttccgaaaccttactatgatattgttaagtcaggcatccacgtcaagcagaaagaccgaactatgaaccttcaagatatccggtatattctgaagaatgacttaaaggattttactggagcccagagaactcaaccaaccgagagccccagagtgcagagatacggactccatcccgatgtcaatgtctatctaggactgacttcagaacaccccagagagacacctgacatggaaatcatagaactaaaggaaatgggcagtcaacctcattcaccaagggttcactctttattcactgaggggacactagatcctcaggccccagatccatgtctgatggccagggagactcagaatcaagatgctccttgccctgctccatttatggcagaagaggccagcagccccagcacaggtcagccaagcctctgcagtttcgaaatcaacgagatctactcaggctgcttgattttggaagatgacatagaagagcctccaggagctgcttcatctttggaggcagacggacctaaccaggtagatgaactgaaatccatggaagaagagctggataagatggagagagaggcgtgttgttttggcagtgaggatgagagctcttcaaaagctgagacagagtactcttttgatgactgggactggcaaaacggttcactcagttcactcagccttcctgagtcaaccagagaagccaagagcaatttgaacaacatgtccacgactgaggagtatctcatcagtaagtgtgtgctggatctaaagattatgcagacaataatgcacgagaatgatgataggctgaggaatatcgagcagatattagatgaagtcgagatgaaacagaaggaacaggaagagcgcatgtctttatgggccacttcaagagagtttacaaatgcctacaagttacctctggccgtgggccctccatctttaaactatattcctcctgtcctacagctttcagggggtcagaagccagacaccagtggcaactacccaaccctaccaagatttccaagaatgctgccgactctttgtgaccctggaaaacagaacacagatgaacaatttcagtgcactcaaggagccaaggacagtttggaaacaagcaggatccaaaataccagtagccagggaagacctagagagtccactgcccaagccaaagccacacagtttaatagtgcactcttcactctgtcaagccaccggcagggaccttctgcatcacccagctgtcactgggactctaccaggatgagtgtggaacctgtttcttctgaaatctataatgcagagtccagaaataaagatgatggaaaggtacacttaaaatggaaaatggaggtgaaagaaatggcaaagaaagcagctactggacagctcacagtacctccttggcatcctcagagtagtctgactttagagagcgaggctgaaaatgagcccgacgccctgctgcagccccccattaggagcccagaaaacacggattggcagcgagttattgagtatcatagggaaaatgatgagcccagaggaaatggcaagtttgacaagacgggcaacaatgactgtgacagtgaccagcatggcagacagcccaggcttggaagcttcaccagtatcaggcacccatctcccagacaaaaggagcaaccagagcatagtgaagccttccaagcaagttctgacacattggtggctgtagagaaatcttacagtacctcgagtcccatagaagaggactttgaaggaatacaaggtgcatttgcccaacctcaagtctctggtgaggaaaagttccaaatgagaaaaattcttggaaagaatgctgagattttgcccaggtctcaatttcaacctgtacgaagtactgaagatgaacaagaagagacatcaaaggagtcaccaaaggaactgaaagagaaagacatatcattgacggatattcaagacctgtctagtatctcctatgaaccagacagctcttttaaggaagcttcatgcaaaacacccaaaataaaccatgcacctaccagtgtcagcactccactcagcccagggtccgtttcttcagctgccagtcagtataaagactgccttgaaagtatcacatttcaggttaagacagagtttgcctcttgctggaacagtcaagaatttattcaaactttgtctgatgactttataagtgtccgagagagagcaaagaaactggattctctccttacttcctctgaaactcccccttcaagactgactggtcttaaaagattgtcttcatttattggggctggatcccccagccttgttaaggcatgtgactcatcaccaccccatgccacccagagaaggagcctgcctaaagtagaagccttctctcagcatcgcattgatgagctgccaccaccatctcaggagctacttgatgacattgagctcttgaaacagcagcagggctcatccacggtgttgcatgagaacacagcaagtgatggaggaggcactgcaaatgatcaaaggcacttagaagaacaagaaactgacagtaaaaaagaagatagtagtatgcttttgtccaaagaaactgaagatcttggagaggacacagagagagctcactctactctggatgaggacctggaaagatggctgcagccacctgaggagagcgtggagctacaagaccttcccaagggctctgaaagggagacaaatatcaaagatcaaaaagttggtgaagagaaaagaaaaagggaagatagcattacaccagagagaaggaaatcagagggtgttctagggacttctgaagaagatgaactaaaatcctgtttttggaagcgactaggttggtccgaatcatccaggataatcgtgctggatcagagtgacttgtcagactgattggaattggatcatagacggactcctggcctgagtttgagtgtcctggttgtaagctcctttcttctctttctgcttcagttgctgtcagggcagcagttccagttctgtaagtctcactttgttcagctgccacaatagacatcatcgtttggccctctctgttagcagcacattcaaccatttgttttcagtcagatttctgaaaagtgagaggtagttttgatagtaaaaatttttggttgtgcctagaatggctttggttttgttgatgttaattttcaaaaactttaactcttgttatataataaaatgtttaattttaataacagaaaaaaaaaa

SEQ ID NO: 23490 - DNA, 1071 bp, Homo Sapiens
cgaggggagcgagaggcgcggagagtttggcaggcagacccagaaatccctggagcgcggcggacccggcggccggaggggcgaccccgcccgatgtaacgcgccccgcccgagccccggcccctgcacgggggggggtgatgtgagcagagcccaggaatgccttatgtggatcggcagaaccgaatctgtgggtttctggacatcgaggagcatgagaacagcggcaagtttctgcggaggtacttcattctggacacccaggctaactgcctcctctggtatatggacaacccccagaatctggcaatgggggcaggagctgttggagctttgcagctgacctacatctcgaaggtgagcatagctaccccaaaacagaaaccaaaaactccattttgctttgttatcaatgccctgtctcagagatatttccttcaagccaatgatcagaaagatatgaaggactgggttgaagccctgaaccaagccagcaagatcaccgttcccaaaggtgggggcctacccatgaccactgaagttctcaagagcttagcagctcctccagccctggagaagaagccacaggtggcctacaagacggagatcattggaggggtggtggtccacacacccatcagccagaacggtggggatgggcaggaagggagtgagcccgggtcccacaccatccttcgaaggtctcagagttacatccccacgtcaggctgccgtgcttccactgggcctcccctcattaagagtggttactgcgtgaagcaagggaatgtgcggaagagctggaaacgtcgcttctttgcacttgatgactttaccatctgctacttcaagtgtgagcaggaccgagaaccactgcgcaccatattttttaaggatgttctgaagacccatgaatgtctggtcaagtctggtgatctcttaatgagggacaacctgtttgaaataataacaagctccaggaccttctacgtacaggcagacagtccagaagacatgcacagctggattaaggagattggcgcagctgtccaggccctcaagtgccacccc

SEQ ID NO: 23491 - DNA, 2834 bp, Homo Sapiens
agatcccagaggagaaggaaggagcagaggattcaaaaggaaatggaatagaggagcaagaggtagaagcaaatgaggaaaatgtgaaggtgcatggaggaagaaaggagaaaacagagatcctatcagatgaccttacagacaaagcagaggtgagtgaaggcaaggcaaaatcagtgggagaagcagaggatgggcctgaaggtagaggggatggaacctgtgaggaaggtagttcaggagcagaacactggcaagatgaggagagggagaagggggagaaagacaagggtagaggagaaatggagaggccaggagagggagagaaggaactagcagagaaggaagaatggaagaagagggatggggaagagcaggagcaaaaggagagggagcagggccatcagaaggaaagaaaccaagagatggaggagggaggggaggaggagcatggagaaggagaagaagaggagggagacagagaagaggaagaagagaaggagggagaagggaaagaggaaggagaaggggaagaagtggagggagaacgtgaaaaggaggaaggagagaggaaaaaggaggaaagagcggggaaggaggagaaaggagaggaagaaggagaccaaggagagggggaagaggaggaaacagaggggagaggggaggaaaaagaggagggaggggaagtagagggaggggaagtagaggaggggaaaggagagagggaagaggaagaggaggagggtgagggggaagaggaggaaggggagggggaagaggaggaaggggagggggaagaggaggaaggagaagggaaaggggaggaagaaggggaagaaggagaaggggaggaagaaggggaggaaggagaaggggagggggaagaggaggaaggagaaggggagggagaagaggaaggagaaggggagggagaagaggaggaaggagaaggggagggagaagaggaaggagaaggggagggagaagaggaggaaggagaagggaaaggggaggaggaaggagaggaaggagaaggggagggggaagaggaggaaggagaaggggaaggggaggatggagaaggggagggggaagaggaggaaggagaatgggagggggaagaggaggaaggagaaggggagggggaagaggaaggagaaggggaaggggaggaaggagaaggggagggggaagaggaggaaggagaaggggagggggaagaggaggaaggggaagaagaaggggaggaagaaggagagggagaggaagaaggggagggagaaggggaggaagaagaggaaggggaagtggaaggggaggtggaaggggaggaaggagagggggaaggagaggaagaggaaggagaggaggaaggagaagaaagggaaaaggagggggaaggagaagaaaacaggaggaacagagaagaggaggaggaagaagaggggaagtatcaggagacaggcgaagaagagaatgaaaggcaggatggagaggagtacaaaaaagtgagcaaaataaaaggatctgtgaaatatggcaaacataaaacatatcaaaaaaagtcagttactaacacacagggaaatgggaaagagcagaggtccaaaatgccagtccagtcaaaacgacttttaaaaaatgggccatcaggttccaaaaagttctggaataatatattaccacattacttggaattgaagtaacaaaccttaaatgtgacccgattatggccagtcagacaatttaaatgccttgcatataacgggcactcattacgtgttattaaattgattttatgtcaattattttatgtgtagtaaaaaaaaagcaactgatgcagctgtgttaaggagccaaagacaataggaggcactggtaaattttggcctctctcaaactaaaattttcgtgtatttcccccccaaattataaaaacataactagaaaatattaaaaggtcatatcagattattaacattatatattcattaaaggcagctttaggaaacaggaatatactacaagagtgttttgtttgtgtatacaaatcattccatttttaaatggcacagatgcttaagggctataaaaacttctaatttcttataaatatgttagcactttttttaagttagtgattacagtttacctactgtatagaataattttctaataatggatggtattctaaaactcaattgaggcattcacattttaaaggaagtattgtctttcaccttttatgtgttctttttgcaaaaatctacaaagtgacagctgtgttcagagcttagatcccaaaaacgtgatctcttttagttactatctgggcagatggtagtatatctaatgaaatggtgattaatttaaatgtataatctggaaatatgtaaaacttgaagtattttttgtccaggcaaaggtactcattggcctcagttctccatctctaaaatggagtggatgagatgatgtgataactgcagtcccttctaactcttaaattcttttcattctcacagattcactctatcattattgttattcatgtaagaaacgttttagggagaaaaattacactttaaaattaatttagttttctatacagttgttttctttactcttgaaaagttatgacagctttaacgtctcttgtcttctgtaattttttatttctaaactcctatcatttccaagctttaactgtactttatcagagccttcatttctggtatgtgttatatgccctcaatgtattcactgactgttctgtaatttcagtttgtctgttccttgtcagaatgtttcaagtaaaataaaaaattaaatgt

SEQ ID NO: 23492 - DNA, 2387 bp, Homo Sapiens
cagagctagcccgggaagcccacactggcggccacggagcagagtccctcacccccaccagctgtagctgaacgtctggatggtggagaagagcagggttccgagtctgaggaagacataaccttgtgcctgcctgcccacctctctctctggtcctgttcatctctcaggctctgagacactgaccttcactgctcagttaaaggttccagggattccactttgtctggacccatccagctgagtgaacccagggtggtggtgtatctggggagagtgaggagtgggttgtccaaacaccagggaaagagccctttggggcctcagacagaggagtgaagctggaaccatcagggaacatgagtgaattttggcacaaactgggctgctgtgtggtagagaaaccccagccggtgagtctccccaccccccatcctaacccaaagagcagtcagttactgtgtgctgtgaggtagccacaccatctaggatctgccatctaaaaaagcacacttcttgcctccctctgtgtcaggagcttctatggtcaggcagctgtatatgtggaacaaaggggactgggtgatggaagaagtgaatagtcctagctattacctcctgttcctgtccattctgagctgggtggggtttgtaggtggagctgcatacctgtcagttttccccattatttcatcatcagtcagaggtgactttgacatgtcctttctttgtccagtgttcactctgcaggccactgccctcattactctggttcatgtcttctgtgtgcttttgttgttccagctttgcctttcatgccctagtgatttccctggtaaaatgccacatcccctcttcccaccaggcccttagcttttcagtggttttgaagactcttttcccttcctccgtgctgactgggaggaagggccttaagacatgactccttatcttctccaaagcagaagaagaagagaagacggattgaccggaccatgattggggaaccaatgaattttgttcacctgactcacattggctcaggggagatgggggccggagatggacttgccatgacaggtgcagttcaggagcagatgagatccaagggaaaccgagataggccatggagcaattctaggggcttatagctccaataatggaatggttctgccatcttgaaacccccattctgtttccagcccagaagaaatgctgcccctaccagatccctccttgaaccagtgatctaaggacccctcttttccctatctgcctaacagtgcctcacaaggcttgggggctggactccctctactccctctggccatagcccctcctggagatggggtcaaggcagcaggactgatcaagtgactactggttagccagagggagcgctgaagcctaggaaaccctcaggtctgagataggagttctctaggaacctggaatgagttcctgtctcctgaatgatggtctgggtgccacctgtttttaaactcttaaacctggaactccttaaatggggtaggtgggtgagattatcaaagctgaagctggctttgctgagaagctccctacctccctgcccttctcctccttcctggctgggaatgaactaaagcagatgtctaagcaggggctgggggggtgcctactcccttttccactctatctttagatttcaaaccttaggcttacagccctcaatatctctctgctaacaccagtgtctctttctagttaggcctctaatcttctgtttctgtttaccagcttcccagcaactttccttttttaaaatattaaaaatttaattcaggttctcttaattatcctcatcctgctgttcctccgcccttaactctatccctattaggaaccttgtttcccaccgaataagagttaaggtaagaggtagctcttcacctgatgacattccatttaagttttggggcatctttcctgccctctgccaacctccctgctggcccaggtgagaggaggaagaggggtctggaaagaaacccagaatgcggcagaactaggagtaagtccatctcaaggtggacttctgatcattgaggatggtgagataaataggttgaaaacaatcatctgtgagtttaggagtcttaagatcctcacagcacgggagcagggagaggctctagaacaaggtttcacaaccgagatgcctttgacattttgggctgaagtgttctttgtaaggaaaacctgtttcctattttgtgcattacaggatatttagcagcacgcctggcccactctagttatgacaaccaaaaatgtctctatacattgccagatttctcctagggggcaaaatcgcctccatttgagactacaactctgagttccgt

SEQ ID NO: 23493 - DNA, 3739 bp, Homo Sapiens
acattttaaagatgttggaagatccatatgctgcctggaggctgttgtttctagggacacaagtatccagcctatattgttacaattttttttcaagaactgccgtcttctttgcctgcactaatggaacatcatcttcagcgggctatttcagcacagcaggtgtatggcgagaagagggataatatggttataccggtcccagaggcagaaagtaatattgcttactatgagtctatatatcctggggaatttaagatgccaaagcagctcattcacatacagccttttagtttggatgctgaacagcctgattatgatttggattctgaagatgaagtatttgtgaataaactgaaaaagaaaatggacatctgcccattgcaatttgaggagatgattgaccgcctagaaaaaggcagtggtcagcagccagtcggtctgcaggaagccaaactactgctaaaagaagatgatgaactaattagagaagtttatgaatattggattaaaaagagaaaaaactgtcgagggccatctcttattccatcagtaaaacaagagaagcgagatggttccagcacaaatgatccttatgtggcttttagaaggcgtactgaaaaaatgcagactcgaaaaaatcgcaaaaatgatgaagcctcttacgaaaaaatgcttaagctgcgacgagatctaagtcgagctgttactattctagagatgataaaaagaagagaaagaagtaaaagagagctattgcacttaacactggaaattatggaaaagaggtataatttgggcgactacaatggagagatcatgtctgaggttatggcacagagacagccaatgaaacctacttatgccatccccatcatccctattactaatagcagtcaatttaaacaccaggaagcaatggatgtgaaggagttcaaagttaataagcaagataaagccgatcttatccgaccgaaacggaaatatgaaaagaagcccaaagtcttaccatcgtctgccgctgctactccccaacagacgagtcctgctgcactgccagtcttcaatgctaaagatctgaatcagtatgactttcccagctcagacgaagaacctctctcccaggttttgtctggctcttcggaagctgaggaagacaatgatcctgatggtccttttgctttccgtaggaaagcaggctgtcagtactatgctcctcacttagaccaaactggcaactggccttggactagtcctaaagatggaggattaggggatgtgcgatatagatactgcttaactactctcaccgtaccccaaaggtgtattggatttgcacgaagacgggttgggcgcggtggaagggtcttactggacagagctcattcagactatgacagtgtgtttcaccatctggatttggaaatgctctcctcaccacaacattctccagtcaatcagtttgccaatacctcagaaacaaatacctcggacaaatctttctctaaagacctcagtcagatactagtcaatatcaaatcatgtagatggcggcattttaggcctcggacaccatccctacatgacagtgacaatgatgaactctcctgtagaaaattatataggagtataaaccgaacaggaacagcacaacctgggacccagacatgcagtacctctacgcaaagtaaaagtagcagtggttcagcacactttgcatttacagccgaacaataccagcaacatcaacagcaactggcactcatgcagaaacagcagcttgcacaaattcagcaacagcaagcaaatagtaattcctccaccaacacatcacagggttttgtttctaagactttggattctgctagtgcacagtttgctgcttctgctttggtgacatcagaacaactgatgggattcaagatgaaggatgatgtggtgcttggaatcggggtgaatggcgtccttccagcctcaggagtatacaagggcttacacctcagtagtactacaccaacagcacttgtacatacaagtccatcaacggcaggttcagctttgttacagccttcaaatattacacagacttcaagttcccacagtgcactgagtcatcaagtaactgctgccaattctgcaacaactcaggttctgattgggaacaacattcgattaactgtaccttcatcagttgccactgtaaactctattgccccaataaatgcacgacatatacctaggactttaagtgctgttccatcatctgccttaaagctggccgctgcagcaaactgtcaagtttccaaggtcccatcttcatcctctgtagattcagttccaagggaaaatcatgaatcagaaaagccagcactgaacaacatagcagacaacacagtagcgatggaggtgacgtagcttcctccgagtggaactgcagcctggggacttgattaggtgctatgcatcagtagcattttgaatgcaagggatgatggaaagcagcacatgcgtttctgtggcagctgtggggacttgacagcaatgctcatctctcatgcttcaatttttcttttcttactgttaataggaaaaaaatcaacatctgtaaattaagaatacagcaattatctgtacagtactgcatatttgtaatacccttgtatatatgttacttgaatacagaaatgttcatttgtgatgctttgcacttgggggtggggggtgggagggaaatcaattgcaacaaagagtgtgagatgtgagattgtatagagatgaagtgtcatcacatcatgtgcatggtgcggaacctgctgttttatctatttattgtgccgtgtttacagttttttgtacactgtaccttcattggttcctgtgctgtagtaaatgtgttaggtagctgtggactccttggtattttgtaaatggtataacataacttggttcccctctgggtccttgagttttctgtgtatcatgtgaaaaaaaatggtgacatacatacagaattttacaaaaaaaaaaaaaaaaggcatcagtttttttaaaaatggggaatgtactattaaatggggatcttcctggtctactatcattaggacaagtaacaagctaaaaatgaagtctcttgaatctttccatccccaacttgcccacaaagctgtgggtggtttctggtacttaaagcactaatattatgttgctgctctgcgaacagcccagtagtcccatttccttccacaccaaaaagtgttaaatcaagtatgcaaatggagtccttacaactggagtttatgttgtcttgccctttttttagcacaaaaaaaattgtacttttttattgtcgaattgtttaaaagacttcattctttacttgttcttacgaaaaggatataagggagaagaatgcagtaattgctgtacgtgtatcatcattccagtttctaaaaacagccagccagcttttttccttttaagattctccagaaggctgcaaggccagaaccacaaatatcgggtgccttcctttggaaatatttgacctctcttctgtgaagagaatggtacttaacagactactactagtgctttgtcagtaccgaagtctgaatgcccagtccaatggcatacattatccttaaggtttttaatcccacctggaaaaattgtgatagaattctcacaaaataaacccagggcattacatgttgacaaactaaaaaaaaaaaaaaaaaaa

SEQ ID NO: 23494 - DNA, 201144 bp, Homo Sapiens
  misc_feature (32870)..(32870): n is a, c, g, or t
  misc_feature (32891)..(32893): n is a, c, g, or t
  misc_feature (32896)..(32896): n is a, c, g, or t
  misc_feature (32908)..(32927): n is a, c, g, or t
  misc_feature (33188)..(33188): n is a, c, g, or t
  misc_feature (33190)..(33191): n is a, c, g, or t
  misc_feature (80784)..(80803): n is a, c, g, or t
  misc_feature (98111)..(98130): n is a, c, g, or t
  misc_feature (99420)..(99421): n is a, c, g, or t
  misc_feature (99425)..(99426): n is a, c, g, or t
  misc_feature (99431)..(99431): n is a, c, g, or t
  misc_feature (99433)..(99433): n is a, c, g, or t
  misc_feature (99436)..(99436): n is a, c, g, or t
  misc_feature (99447)..(99447): n is a, c, g, or t
  misc_feature (99449)..(99449): n is a, c, g, or t
  misc_feature (99453)..(99453): n is a, c, g, or t
  misc_feature (99467)..(99467): n is a, c, g, or t
  misc_feature (99501)..(99501): n is a, c, g, or t
  misc_feature (99647)..(99666): n is a, c, g, or t
  misc_feature (100042)..(100042): n is a, c, g, or t
  misc_feature (100161)..(100167): n is a, c, g, or t
  misc_feature (100170)..(100170): n is a, c, g, or t
  misc_feature (100172)..(100172): n is a, c, g, or t
  misc_feature (105543)..(105543): n is a, c, g, or t
  misc_feature (133982)..(133982): n is a, c, g, or t
  misc_feature (134012)..(134012): n is a, c, g, or t
  misc_feature (146096)..(146114): n is a, c, g, or t
  misc_feature (184338)..(184357): n is a, c, g, or t
ttcagtcttcctctttggccatactgtttttgctaatcgttttataacctttaaattgttggaactgtttgaggccaggactataaccccgttcatgccttggctgaaggtggtaggaaagagtttctctgtctttaaggaaagcctgcttagcttttggccatgggcaattgacttttcaccttctcagctggtttacacacaagattctctgtgaggcaaaaagccagatacagcctatttcaattgcctcacacccggagaagggaaaagtggtccatctttacaccatggtgtagagctgcagcaaacagaaaatcttcaaggcagtgtcagcagctaataacatccacccacacacacttgaattcactttatggggcttactcccatatgaagtaacgccaaaaaacattgacctgtataaacatgatcaagttctattatcataccactggaataaacagcagcagtttagaaaaaaaaaaagttcttagttaacagaactatgatcaacatacttttatgtgaggggctccatttctaccaacaaagagcgatgttttaagagtgaatttctcgcttaaaccttgttactttagttagtttatcaatgtatagccctggctgctgatttttggctagcatggctttccagggcagaggtttcagactcccaggcaggtgaggacttaggtctctccgagaaatgatgtagtagagctttctcatttgaaagaacaggaaatcaggcaacaaaggttactaagggtcaggatgactcatgcagccatatgcatgagggctatatagggagctgtgagtatggaggtgggcggagtctgccagtaagaggcaccaacgcctcaccaccttcccagaggaccatgtgagagattgatttttttctctactttttgttggtgggatgtgaaatatcgttaatcaccaaatgctgactatccatatggatagtgggaacccttggggtgggcaaaaattatttctttgggctcattctcctatccagagagctgggaaattagatgcttcatagcctggtcatttctgatttccaagtactctatccacatggtatcaaaaagaactattcctttttttctttttctttttttcttgtttccattttccctccctccctccctcctttccttccttcggtccttcctttcttccttccttccttcctttccttccttcctaccttccttccttccttccctttcctccatccttttatgcagccagccagccagccagccagccagccaatatttactgagtactttccacagccataggcaaatggctgtggtccaggaatagagagggtcgaagccttttccaggagggcagggccagagtgatgcagagaagtgagggagctgacaagaggtggcaaccagtaggaggtgaagggtgatggagaaggaggagtcagggataacttctgactggaagacttttcctccccattttgtatagatctacagtctctgctagaaactctggaacttgggtatcaccagaaacaaatgaaatgtgaaagatattgtttatctatctatctatctatctatctatctatctatctatctatctatctatctaatctatgtatctatgtatctatgtatctatgtatctatctatctatctatctatctatctatctatctatctatctatctatctttaaaatgcttagacacactgcactaaggttctgctgggcaaatttttcacttgataactgtcatcaatcaatatgctatcatcaagtgattgtgtaccagtttacttagtcaaaagttataagaagcaaaaatggcttaactgtgtcaatgagccctaaaaaatcatacaagacaagctagtgaaacagaacggagacttgaggagaccaagtctaaagacagagaacactgatgaaatggaagacgaattgggaatgagatatgtaaaaataccctgggactaattatatagaaatgctgaggatatatcattcatgaacctgtaaaagcatacaagaaatatttttctaacaaagaacacctcagtgcatgatagttaacaatgcatgactgtctgatagaaggatttctcttgattcactgttggagatgcctgctctagcataaaagctgtttacaggaaacaggcagagctgagagttgcagagaatatgggcaggaggacaattcagtataaatgtctctgtgttgctaaatccaatcacagaaccgtatgttgctctctcaagtgcttgattgttgaactcattcagtgcatctaagaatgtaattgttaattttgcgtacaataaaatgtgtaaataattaaatgcattaagactttggtaaatctataaaatatgatagcttgtggaggtggaaagcaccagggaaggacagggaagggtgagcattcagatggggaggtcccatgctggtagttaccttctgtatcccagaatgtgacaaagaggtcccgaagactgaaacaccaaggacagttgatgttttcgtcttgaatgttctacttcctatggtaggcgcatatcctaaagtaaaattagaaagatttctagtaataagaataaaagcaaaagtacgtttgtctttagtgctagaaagggggatgtagctagcaggagtcaccttaggtcacttaaatcgcgattcagtagtcttccttcttcatcacacaacttaatattttactgcagttgtttatttttaattttattacagaaaaattcactctttttactgtgtatttccacgtgctttgaaacatacatacactcatggaatcaccaccaaaattaaaatgcggaattgctccacacccgaaaaagcacccttgtgctgtctctttgtagtcaacgcttcctctcacctttaaaccctggaaaccactgatctatcctctgactctttagctttgccttttccagaataacatgaaaatggaatcatgtagtaacacagcatcttttacattagggaatttaaaacaaaagcaagtaaacaagcaaaaacaaatactagagccccattccctgaatattctggttaagtaaaatttactatgtcagacacctcacatcgtaatacttctcaaaatatttttcccaatcaaagcaacttttgtttttctttctcttggtccttgccctcaattgcttaagaatttgagaagaagagagggtaactttgcatttgtttcctgtgtgatcatgacagtaatttggctgtacagaggagattgctttgtaatattttgtctgggggtgaggcaatgttggtgtttttctagcaattttgtaaatataatctgaactagagaggaaaactcactccatggtgtccaattagaatttttctgaaagagagaagataaaaagggagtgggatgaagcatagttaggcacataaaaattagaaaaaactctaaggacactcctttgtgattgtcagcttcctacataaaggaatataaaattcttgaaacatgaaattgcaaggcatgcaagggaaaaccaatgcatgtgggtttgtttggatgcacacacaaattcaactgcctgcttcattgaggcaggcagaccagctcaaggtgcagcaggagttagttgttttaatttccaacactctttctgctcttatcttcatgatctagagcacattaaataaaaatatgaaggccaggtgtggtggctcacgcctgtaatcctagcactttgggaagccaaggcgggcggatcacctgaagtcaggagtttgagaccagcctggtcaacatggtgaaaccccatctctactaaaaatacaaaaattggccagccatggtggtacgtacatgcctgtagtcccagctactcaggaagctgaggcaggagaattgcttgaacccaggaggcagaggttacagtaagctgaggttgcgccactatgctccagcccacgcaacaagagcaaaactccatctcaaaaaagaaacaaaatgaacgttacaagagcaaaattttaccttcactttcccttcacaattattgcttttaattaaaaaaaaaggggggtggtggtggttgggaatgtgggcttatttggtttcattccataaactatggaactgacattacatattgggggtcagggtggggtataataatataatataggctgctgctggcctttctcatcttactaggtcgtatttattgtgcatccacactggaataggacagctgctgtttggctgctgctatcttggtgtaatttctttctagtatgtcaccttgcttttcctaccaattattaaatcatttgcatcaacctcttgtatgtgtctgaggtttgggctctgcctttgtgcttatcaccagtattaaacacgggagcaccaaaggacaccgagggaaacaccacataaacacagtgatggatatagtggcatagcaacccagggggtgcaacatatgggttagagcctcatgttttctcaactttcaagttgtgatagaatcagggccctcacaagctataaacatagatttttatctgcaaatgcattatattcgaagtcttgcccaaatctgttatgttttattaataaaaataaaactaaatttagttgtgaatgaaataaatctaacttttaagataggaaaaaaatcataaaattggtgaatttgatgttcaatcgctggcatcagatggtgaacagatgctttataaacacatagcacaggaaagagcatgggtttactgagagcaagccatgccaaactaaccttctttccttttatgatagagttgacactgagaggagagaaatttttaaaaatagtgtatcttgatttcagtcaggataaaatgtttccttgagacaagatggagtgaactcaaactgaatagtaagaggacagatccaggccaggcacggtggctcacgcctgtaatcccagcactttgggaggccaaggcaggctgctcatctgaggtcaggtgttcgagaccagcctgaccaacatggagaaaccccatctctacgaaaaatactaaattaagcgggcgtggtggcgcatgcctgtaatcccagctactcgggaggctgaggcaggagaattgcttgaacccaggaggtggaggttgcggtgagctgagatcgcgccactgcactccagcctgggcaacaagagtgaaactcagtctcaaaaaacaagatgacagatccattgctgattaaacataattaatgggccaaaggcaacttcaaaggaggtctataatggcatgccacagggctctaaaactttgcagttttatcaataactcaaatgaaatgtatacatgcccttacacaacattttgagagacaacaaatacaatgaatatcaagatacatatatatataatatgtatttctttttgagatggagtttcactgttgttgtccaggctggagtacaatagcacgatcttggctcactgcaacctctgcctcccaggttcaagcaattgtcctgcctcagcctcccaagtagctaggattacaggcatgtgccaccacacctggctaattttgtattttttaagtagagatggggtttcaccatgttggtcaggctggtctcgaactcctgacctcaggtgatccacctgcctcagcatctcaaagtgctgggattacaggtgtgagccaccccacccggccatatatatatatttttgagatggagtcttactctgtcacccaggctggagtgcaatggcttgatctcggctcattgcaacctctgcctcccatgttcagatgattctcctgcctcagcctctcaagaagctgggattacaggtgcatgccaccatgcccaactaatttttatatttcatcatggggtttcaccatgttggccagggtggtgtcgaactcctgacctcaagtgatctgcctgcctcggcctcccaaagtgctgggattacaggcatgaaccaatacgcttggcaatatttttttaagaaaaaaaaatttcaggttgcaacagcatccaaaaagtaaccaatgattttaggtgaagggtgaagacaaatgtaaactcttttttttttttttgagatggcgtcttgctctgtcgcctaggctggagtgcattggcgcaattgcgactcactgcaacctccacctcctggactcaaacgattctcctgcctcagcctcccgagtagctgggattataggctcgcgccgccacgccccgctaatttttgtgtttttagtagagacggggtttcaccatgttggccaggctggtctcaaactcttgacttcaagtgatccgcctgccttggcctcccaaagtgctgggattacaggcttgagccacccggtgaaatgtaaattgttaaacctgtgtttttgaaaatgcataagtataggataagggagaattgactttctgaagaccagaacattttagtcaatttcaaacacaatgtgagtcaattgtataaaacaggttccttatcctgatgaggataagaatagtatccttgtcagatggaaatgcccattcagctgtactttctagtggttacgcccatagtagcactgttgatggaaccaggtatctgactttaggaaaagatgttccccaactggagctgacccagaggagcctgaccaacttggggaaagtttaaagatctcatcacgtggagaataggggaaggcaccaacacgtattgagtgtctactttgagcttaagggagaaggagaaaaggcagggaataaacggaggatggaataagaataggtaatcttccttaggtttaaataataagtgcttgccataggaaggagccccagaacacagttatcaataatagagactcacacagagcattctacactagagctgctgtcctcttgaccagaataagggtaaggtgtgtgtgcgtgtccaggaaagtaggcagctaggaagtgatcagagcatacactcctgccgccacaattctaagtgtcttcccctaggggaatcctatttcttctcaggcacatttgtttattcattccatgttcactcttgttatttacttcttgccaggctttgtgttaagaattggggaaacaaggttgaataaacccagtctgtaaagaaaaggagctcacagtctggaggggcaaatgggcattgtgcctgcaagttggcccactgagagcctaagaagtgaagttatgaatccaggattactcagttatcaatgaagtgattaaacatcatccatacagaccttcagagctggagggaattttggatacctactcagcacatagttttcaaacagtgccttgtggaaccctagggcatttcttagggattgctgtgtgtgagagaggagattgaatcagaaggtgtctgggaccattctctactcacacttcaagcagagcagctccacttctatctgtattattatttttattatttatttatttatttattttgagacggagtctcgccctgtcgcccaggctggagtgcagtggcacaatctcagctcactgcaacctctgcctcccgggttcaagagattctcctgcctcagcctcctgagtagctggaattataggcctatgccaccacgcccagctaatttttgtatttttagtagagacggggtttcaccatgttggtcaggctggtctcgaactcctgaccttgtgatccaccggcctcggcctcccaaagtgctgggattacaggcattagccaccatgcccggcctatctgtattatttattcattattgctatgtgaatgaacctgaagaatgcttactgttactgctaagtatttaaccacaccccatgcccatgcaggatgatagtgaatagtggccaaaagatactataattagactcatgtaattaaggaatatttttgtcttgtacctattatgtgcctataaagactatgaaatctatttattcagtgatttattggaataccaaataagcaaagatcctatgtgctaaagattctaatattgtgctaagattttccctcagatgtttggctttctcaaattccctgagggctagaactttgccctactcatttgtgtttcccaagtgtctaacgcagtgcctgacacatacaggatctccaaacgcttgctgaatgtgtgaggaaggaattaaaataatgtaccgccgggcaaagtggctcatgcctataatcccagcactttgagagaccgaggtgggcagatcacttgaggtcaggagcttgagcccagcctggccaacatggtgaaaccccgtctctactaagaatacaaaaattagccgcgagttgtggcaggcgcctgtaatcccagctactcggaaggctgaagtgggagaatcacttgaacctgggaagcagaggtcgtagtgagccgagatcagaccgctgagctccagcctgggtgacagagcaagactccatctcgaaaaataaaagtaaaataaaataatgtactaactggacccagaacagattttccaattgattattgacaacaaaggaatctgaattatctaataaggtgaataagtacatattcatatatatatgtatatgtgtgtgtatttacatttttataaaagtgtaaaagtatatatactttttttcctttcttcaggtagaaacctctcctagattgtcactgaataaacattagcactaactatggcaatcaaatcacatattgattggtgtcagagaagaattgaacattcaactctgaagcagtgttatttcttccatctgcaaacactctgtcccccatcccttctttgtgtatcctggaatccaagtcataaataatgataggtatttctgtcaaaggtatttctcagaggagtgatatgtaactccctttcctctgatacactgactcactaagcagctacccttgtgaattccaattagcaatacttcttgctatgtctggtccaactttcagacaaacctagtgttcaggattcctatagccatttataggtgtagacaggaagcattcagatatccccagaggtacctgataaccagctgatccatgactgtctgtcttgggcttggccagcttgaaatcttgacattgtggttctccccagagaaggtgccttttggatgtgagataaagacattatgactagatagtgcatggtgagggtgtttttctagttttaccgaagtgttgatctgtaaagctgctaccagcacacacacacacacacacacacacacacacacacacacacacacacaattaaccacagatatcctcatgggaaattgtcttaggaaagaatggaagccaagattttatatatagaccacagaaggtgatgggtaatgttcttggaagggagttgacaggcaatagctataagttaactcaggaaagcaaagaaaatccccaaagagctaagggagaggttagagattctgctttttattagcaattcatagctctcaagtttcatacagtctttaaggctcccctcttcatatagaataaatgaaattattttataaattgttcctcagattcgtatctgtacattctgggaccacgagttgtagcaggatgtgattttcctcattctgggcatctaagttctacagttaaggacactgaaacaaacctttagtcgaataaagattggcacattgtttcttctcccataaacattgaatggtccaggaagggccaggtgtggtggctcacacctgtaatcccagcactttgggaggccaaggcaggtagatcacccgaggtcaggagttcaagaccagcctggccaagatggtgaaaccctgtctctactaaaaatacaaaaaggaggagtggtagtcccagcttttgcatgaatgtccacattgggactttatcttaaatgtgcaagacacaactcttggccaggcgtggtgaaccgagattgtgccactgcactccagccagagaatgcactccagcctgagcaacagagccagactccttctcagaaaaaaaaaaaaaaaaaagacaactcttaaattggtgttctactgtccttgaaccaccatacctttgcagaagtcattctagatcatcaatctgaccataaaacacagtttgccaaactggcaactaactgcacctatttgtgattagtttggaagaaacttgaaagtgccccttttaactgtccacttattccctgcctgggcacggaattctctcccacgcttaataacggacacttttaaaaattatttttactccccacagagttggcagattgctgtttcagagagttaaatggaatgcctccagtggaagtatcccgttttctagaatggaaagtctatcttcacagtgtcataatccaggtgccctgggctgagacttcccctgcctaggcggtaccctgggtagcacagctgaactggctgtgaactaaacattcattttttattagcagccaggctggacagagatcacacaagaccaacctgacaacagcagcatgctgctctgcttcagaagtaatttttttttttttttgagacaagagccttgctctatcacccaggcaaagtgcagtggcatgatctcggctcactgcaacctccaccttctgggatcaagcgattctcctgcctcagcctcccaagtagctgggattacaggcgcatgccaccatgcctggctaattttttgtacttttgtattttttttttttttgagatggagtcctcgctctgtcgcccgggctggagtggcctgagccaccgcacctggcccttcagaagtaatttttaaggaaggatcttgtcctgggtggggggttgggcaaggctgtgaaaagcaaacaaaaatcacatgtggcctaataggaggccagtggaaatacacatgatgaaaaagaaacttacaaaagcacattattaatttctgaacatgctaataccatccaataacaataagatctaatatttattgaatgctgattactcatcagctacattccaagtacttctacatgtacagttatgtgacacataagatgtttaggtcaccactgacagaatgtatgatggtgaccccataagattacaaaaattcctattgcctagtgacatatgtagcaagatgcattactcacgtgtaataagtaatgtgatgctgctgtaaacaaacctactgtgctgccatgcctatagaagtctaggacgggctgggcacagtggctcatgcctgtaatcccagtacggtgggaggccaaggcaggccgattgcttgagcccagaagttcaagaccagccggggcaacatagtgagagcctgtctctacaaaaaatacaagaacaaattagccaggcatggtggcgcatgcctttggtcccagctactcaggaggctgaggcaggaggatcacttaagcccaggaggttgagtctgcagtgagccatgatggtgccactgcactccaacctggagagagagtgagacccggtttaaaaaaaaaaaaaaaagcctaacaaataaaagtatgtatagtacagaatacttggtaatgataaacagtatgttactggtttatgtgtttactatactttttattttttagagtatactcctacttatttaaaaagaaaaaagaaagttaactgtaaaacaggcttagacaggtccttcaggaggtattccagaagaaaggcattgttatcataggagatgaaagctccatgcatgttactgcccttgaagaccttccagtgggacaagatgtgaggtggaagtctatgatagtgatgatcctgaccctgtgtaggcctaggctaatatgtgtgtttttaacatattagtttttaacaacaaagtttaatcagttaaaacaatttttttaatagaaaaaagctcatagaataaggatataaagaaagacaatgttttgtttgtttgtttgtttgttttttgagacagagtctcgctccatcacctgggctggagtgcagtggcacaatcttggctcagtgcaacctctgattcccaggttcaagtaattctcatgcctcaacctcccaagtagctgggattacaggcgcccatcaccacacccaactaacttttgtctttttagtagagatggggtttcatcatattggccaggcttgtcttgaactcctgacctcaggtgatccaccctcctcggcctcccaaagtgctaggattacggttgtaagccatcgtgcccggccagaaagaaaatgtttgtacagttgtacgatgtatttgttttaagctaagtgttattatgaatgaatcaggtggggtgtagtggctcatgcccgtaatcccagcactttgggagaccgaggacggaggatagcttgagtccaaagttcgagaccagcctgaacaacgtggtgagacctcgtctctacaaaaaataaacaaaattatccatgcgtggtggtacatacctatagtcctagctactcaggagactgaggtgaggggattgcttgaactcaagaggttgaagctgcagtgagctataattgtaccactgcatttcggcctaggtgaccccgcctcaaagaataataataaaagctgggcacggtggctcacgcctgtaatcccagcactttgggaggccaaggcgggcggatcacttgaggtcaggagtttgagaccagcctggctgacatggtgagaccccgtcgctactaaatacaaaaaattagccggtcgtggtggtgtgtgcctgtaatcccagctactcaggaagctgaggtgggagaattgcttgaacctgggaggcagaggttgcagtgagccgagatagcgccactgcactccagcctgagcaaaaaacaataataaataaataagtttgaaaatttaaaatgtttataaaattaaaaagttacagtgagctaagatttagtattaaagaatttttttataaacatgtagtgtaactctacagtgttaataaactctacagtagtgtacagtgacatcctaggccttcacattcactcatcactcactgactcacccagagcaacttccagtcctgaaagctccattcatggtaagtttcctatacaggcgtgccatttaaaaaatcttttaggccaggcgcggcggctcacgcctgtaatcccagcactttgggaggctgaggcaggcggatcacgagctcaggagatcgagaccatcctggctaacacggtgaaaccccgtctctactaaaaatacaaaagattagctgggtgtggtggtgggcgcctgtagtcccagctactcgggaggctgaggcaggagaatggcatgaacccaggaggcggagcttgcagtgagctgagatcacaccactgcgctccagcctgggccacagagcgagactctatctcaaaaaaaaaaaaatcttttatactatattcttaatgtaccttttctatgtttagatacacaaataccactgtattacaattgcctactgtattcagtacagtaacatgctatatggttacgtagcctaggaacaataggctatattgttcctaggtatagggatgtggtatcctataccatctaggtttgtgtaagtttattttatgatgtttgcatgacgacagagtcacctaaggactcatttcttagaatatatttgtagttaagcaatgcatgactctattgactcatgaattcttaccacagacctatggggcagtactattgttaccctcattttataaatgataaaactgaggtacagagacagtaaataacttgaccacggtcattcagctactcaagagtcaaggctgggatttaaaaccagatcacatggtttcagaatgttcacacttacctactatactgtctcaagagcaaggatgttttggttcacttgacaaatgaagatagggacctctttcattataagcctattttaggctaaaatagaagggaaggggacacagtgaatccaggccttctggcatggctcctcagccctttctgagctggcctgggacagccttcctacctcactgatgccacttcctactgagcgactttcctgcctacctcactgatgccacttcctactgagcgactttcctgggctccagacccagtaagcgactttgcctgcacccaccttattttgctctactccctgtgcttttatgcctttacccatctgccctggaaagctcttctaacctttgaatgggtaaaggcataaatgtatgctggagaaatcctcagctcagggccaggcacgctggctcacgcctgtaatcccagcactttgggaggccgaggtgggtagatcacctgaggtcgggagttggagaccagcctgaccaacatggagaaacccctgtctctactaaaaatacaaaattagctgggcgtgatggcacatgcctgtaatcccacagctactcgggaggctgaggcaggagaattgcttgaacctgggaggcggaggttgcagtgagccaagattgcgcctctgcactccagcctgggcgacagagctagactctgcctcaaaaaaaaaaacaaaaaaaagaaaaaaaagaaatcctcagctgagttgtcaactcctctttgaaactttctcagacctttcaggctgagtcgtcgctcatttgtgcttcctcagttcctggcttctaccttcttcatagcttgtttcatgtaatgttaattcttacttgctttctccctcttctaagctgagagctacttcaaagcatgggtaggacctagcacggtgtatgggacatgggtggtaccccgtaaatgtttactgaaaaaaaaatgcctaaagcaattgttaacatcatcagatagataattatgggcattcagagattctgtcttcaagcttatataaagaacttatttttggctctaattatcctgataattttctcattactttcacttattgtggcttgtggatcaattgttgacattttataaacatttcactatttgacaatgatgatactaaaatacgaattaagcaaccattctaaagatagtgatgatgataacatatacgctggtaacatctttattttcagccgtatcatggaatcctctgtttccattctgctaggtaggcaggtatgcaggtagaacttgtgagaggatatgatttttgtttccatcttagatatgacaggaacttggaatttttgacataaatgacgaacatccgggattcttaaacaatctttaaaaatggaatgccttaaaagctgggcgcagtggctcacgcttataatcccagcactttgggaggctgaggcaaatggatcacttgagttcaggagttcaagaccagcctggccaacatggtgaaaccccatctctactacaaatacaaatattagccgggcgtagtggcaggcgcctgtaatcccagctacttgggagcctgaggcaggggaattgcttgaacccaggaggccttggagattgcagtgagctgagactgcgccattgcactccagcctgggcaacaagagtgaaactccatctccggaaaaaaaaaaaaaaaaaaaaaggaatgcctttgggaataatttatttataatttatgtataacatatagacaaaccattagttgattttactaaagagttacaactaattggcctggcgtggtggctcacacctgtaatcccagcactttaggaggcagaggtgggccgatcacgaggtcaggagatcaagaccatcctggctaacacggtgaaactctgtctctactaaaaaaaaaaaaatacaaaaaattagccgggtgtggtggcaggcccctgtagtcccagctactcaggaggctgaggcaggagaatggcgtgaactaagcagaggcttccctaaaagtgatcttcaggataaaggcagaggaagaggctccatgactgggattggtgttgaggagagccagagaagcaagctacagaaaagagaaaaaattaatatgcaagagagtaaacaacacgaaggaaaagaacccagtgtggaaacactacacgtgagaaaggtgtctgtaaggatgttctacaaagcaaatgcttggatattaattcattgcagcaggagatggtaagcctcatgataaagaaggagaaaaaatcaagtcaagggctctgaggtactgacccaggtatacttgactatgccagcaactgtttagggggagatttgagctacacttgtagcaaaggcaaaatctgtaattagttgtaactctttttttttttgagatggtgtctcgctctgtcccccaggctggagtgcagtggtgtgatcttggctcactgcaagctccgcctcctgggttcaagtgattctccagcctcagcctcccaagtaattgggactacaggcatgcaccaccatgcccagctaatttttgtacttttattacagaccatgttttgccatgttcaccaagctggtatcaagctcctgacctcaagtgatccgtccgcctcggcctcccaaagcgctgagattataggcctgaaccaccgcgcctggcctaaagagatctaattcttagcaaagtttcaccagggagtctctcctcacccccaccccatccttcccacaaagaattagaacaatgtccctactacccctgctgtatctctgactttttactttaaatctcagcagaatattttactaaatgttttgatgtggttatataaaatcatccctgctgacaaggaaacactttttgaaaaaagttttcattatcaaacagtaagtacagctgactgccgtgacctttaacccatttctgagtctcccctcattggacttgggtggaggggactggtaccaataaagtcaaatgcttaataatttatgcaagtgcttgaagaaatttgaagttgaatatttctatcatcttgaaatggagaaagaatctgtaaacagcaaagccagacgccctagaggaaaagatttacagattaaaataagattgcaatctggtaaaaatatttgcaacacatgtaacagtcagaaagttgaaacacttggtttaacaagagcttttaacagataaataaggaaagaataaacattggattttaaacaccgataaacatgaaaagatgtttaatctttatttttatttaatccatattatttttcagtttaatcaaagaaaatataaatcaaaacaataatacattatatatatatatatatatatatatatatatagtaggcataagttaaagactgataagactgttgaaaagggatgaaaaactaggcttactcataccaatatatatctattaggatggctaaagtaaaaaatactgaaaatatcaagtgctcaaaaggatatggggcaattggaaccctcagacatcgctgatgagaaaacaaaatggtacagccaccctggagaacagtttagctgtttcttgtaaagttaaacatgcgcttaccatatgactcagcaatctcactcctgggtatttatgctaggaaaaggaaaatttatacttgcacacaaaaaacttgtaagtgaatctttatagcagctctattcataactgccaaaaactgagagaaaatgtcctttaatgtgtgaatggataaaccaactgtgcaacatccatgtaatgaaatactacttagcaataataataataatattaaaaaccccagaaccattgatgcatgcaacaaatatggataaatctcaaaagcattatgctgagtaaaagaagtcagtctgaaggatttcatactctaggattccatttatataacattattgaaacgacaaaattatggggacagagaatagatcagcggttgccaggggtttaggtgtgtggagagggtgtggctataaagaacatgcaagggaatttttttgggagatgaaatggatctgtatcctaattatggtcatggtaacacaaatctatatatgtgtttagattcatagaactgtataccaaaagaaaaaaagtcatttttactctcttaaaatgaaaaaagaaaaagcctgggcattctaacaccttgtttgtgagagtacacattgataccaagttttatggtgggcaattttgctataaatacagaaagtttgtctgttctattattcagcaatcccagttttgcaaaactatgctaaagaatctttgggggccgggcacggtggttcacgcctgtaatctcagcactttgggaggccgaggtggacgatcacctgaggtcaggagtttgagaccagcctggccaacattgggcaaccctgtctctactgaaaatacaaaaattagccgggcatggtggcgcatgcctgtagtccgagctactcgggaggctgaggcaggagaatcacttgaacctgggaggcagaggttgtagtgaactgagatcgtgccaccgcactccagcctgggcaacagagtgagaatccgtctcaaaaaaaaaaaaaaaaaaaaaaaactttgtgtacgtgtgcaaagagaatacaaagatgatcatggctgcattttttaaatgactataaaaaagaggtacaaccagccaggtaaagtggtgtgcacctgtagtcccagctactcgggagggtgaggtgagaggaacacttgagtccaggagtttcaggccagcctgggcaacatagtgagacccctgtcccaaaaacaaaacaaaacaccaaaatgtctatctgtaggaatttgttttcaagttgtgatacataggtacagtgaaatattatacattcatttaaaatgatgataaaatctgtatttgtttacatgaaaaactgtccactataatgtagtgaaaataatagattacaaacaatatatatggaataaacttgtttagaaacaatttctagaagaaggtacaatggacagaattatctctgggaagtgggtttataatgattctcattttcttctttgtatctttttcatagtctttctacttttgttatgtctggacatttgattatgagcatgtattactgatctattttaaaaattgattttaatttttacaaaaactcatgtaaagcttgaaggttcgcattttagaccatgttaaaattttcctggatcaaaacagacttattcaaatatcttgtaccctgtcctccaaaattgcctgccaaaatacactacaaaagagagcatttagctgcatattttttggactgctgagatcaacaatattatttccatggcttaaatttttaccctccagtatgtgtgggttacaaacactcttccacatttttgaggcattgcttttgatattttaaatgtaaattcagctgtgcgcggtggctaacgcctataatcccagcactttgggacgctgaggaaaggatcacttgaggtcaggagtttgagaccagtttagctaacgtggtgaaaccccgtctcttttaaaactacaaaaattaaccgggcatggtggcaggcacctgtaatcccagctactcaggaggctgaggcaggagaatcacttgaacttgggagacagaggttgcagtgagccgagatcatgccactgccctccagcctggccacagagcgacactccatctcaaaaaaaaaaaaaaaaaaaaaggccaggcgcagtggctcacgcctgtaatcccagcactttgggaggccaaggtgggcggatcaactgaggttgggagttcacgaccagcctgaccaacatgcagaaaccccgtctctactaaaaatacaaaattagccgggtgtggtggtacatgcctgtaatcccagctactcgggaggctgaggcaggagaattgcttgaacccaggaggtgaaggttgtgttgagctgagatcccgccattgcactccagcctgggcaacgagcaaaactctgtctcaaaaaaaccgaaaaaattcccccaaaaaaccaaaaaaaaacagcaacaacaaaaaaatcaaataatgtaccttgtttagcataaagcataattatatgcatatggtgattgggaggatgaaatggaaaggttatttattactgactttagaaattatgtcctgatagattgatggttgatttaaatataacttcttgtcaagcatctgtttttagaatcaaattactatgactctgcagtttccttgaaatctcatagtatcacatctctgtttgcctttgcatggttttaagaaaatgaggagtgtgaaacttcaaacttcgttttcattgtattacatttttgaatgacacactggtcatttcctagaaatataaggtgacaaatatttcacagaaacataaggtgctattatctcattcaatcttaggtcactcaaaattctttctctcccacacattgaagattcatttgggaatgcttttgtcttattgtgcacccccagtgaaggggtggtaagtgtttttcattttgcttcctttgtttatctacagggttccattcaataaacaaagggacttgggtcaaacttcaggctcttatgggtttggatgtaatctttggtctcatttttagttaccaacagagagtgttgcttctgacctctttgactcttccctgctgaatttactatgcctttgatacttgtgaagggtgagattttcgaggagtactgttgtttttgttagaggttgtaatgtctttcttcgctttgtgattcaagttgtgttcagttacaatcataagcatgtgcctaaaaaaatcagatgcaaactagcaaaagtagaaactcagggtgacagtctttaagaaaagatgcaattcttggggctgggtgcggtggcttatgcctataatcccagcatgttgggaggccaaggtgggcagatcgcccgaggtcaggagttcgagaccagcctggccaatgtggtgaaaccctgtctctactaaaaatacaaaaattagctgggcgtgctggtgggtgcctgtaatcccagctactcaggaggctgaggcaggagaattgctggaacctgggaggtggaggttgcagtgagcctagattgcgccattgcgctccagcctgggcaacaagagcgaaactctgtctcaaaaaaaaaaaaaaaaaaaaagatgcaactcttattactgacacagaaatgaaaatttagttacatagtattgtaaaaggactatcagctaggtttagccttaccaagatttaggtaattcatttcctgctacactcatattctcagccacttccctcatcacattttcagggtgcagtatataatagcgtcaactcgtgtaattccccctactccccatgaacttctaggccaaggggccacacggggtggggcatatagtataaaggagtaaggcagactgttggagaaaaacagggattaggccaggtgcggtggctcacgtgtgtaatcccagcactttaggaggctgaggcgggcggatcacgaggtcaagagtttgagaccaggctgaccaacatggtgaaaccctgtctgtattaaaaatacaaaaattagctgggcacggtggcaggcgcctgtaatcccagctactcaggaggctgaggcaggagaattgcttgaacctaggaggcggcggttgcagtgagccaagatcacaccactgcactccagcctgggtgacagagtgagactctgtgtcaaaaacaaaaataaatacaaaaacaaaaacaaaaacaaaacaaaacaaaaaacaaggattagtgaggactttgcaaagtgcaaacagcatgctccatctaaagagagcttttcagtactagctgattgttgttgtgtggaaatacgtcttgtatggtgagatcttccaccttttcaacagaaatgagaaacacaaacatttctgtgtgacacttccaaacttgttggctatttctgtttttctttttttctttctttctttcttttttttttttgaggcagagttttgctctcgttgcccaggctggagtgcaatgacgtgatcttggctcgccgcaacctctgcctcctggattcaagcgattctcctgcctcagcctcccaagtagctgagacatgtgccgccatgcctgactcattttgtatttttagtagagacggggtttctccatgttggtcaggctggtctcaaactcctgacctcaggtgatccatctgcctaggcctctcaaagtgcagggattatgggtgtgagccactgcgcccggccctagttggttatttcaaacaaaatactaacactcttcagcccaaaccatgtgtcagagagctgggtgtggccagtgggcccctggtgtgcaactagtcttcagtgatgctactgtatgctagtgacagcacaactgaccactgaaaatatggtgcacgatggtgaacagattggatttcccatatctctagaaccccagggctttgaggcaattctgatagatggagggggagcgagagagagaaagaggagggagaggtatcacatgaaagagatactggactttctgctaataaatgggtgggtatttgggtgagtagataggaaattaaaaagaaatatgagagatgggcgtggtggcttgtgcctgtaatcccagtgacttgggaggctgaggtgggagtattgtttgagaccaggagtttgagatcagtctgggcagcatagtgagaccccgtccctaaacataaaattttaaaaaatcagctaagcgtggtggtgcgtgcctgtaatcccagctacttaggaggctgaggcaggaggatcccttgagcccaggagttagaggctgcagtgagctatgattgtgccattttacactagcctgggtgagaaagcaagactcccacatctgagacagagagagaagagagaggcagaccatatttgaactccaggctggtgaataattcatactgattaatttaattgaaaatatttatttaaaatttgcagatcggagttttggaaaggttacatttattaaattattgttggactatgaggaacacattgttgcttggaataatatttaattatgatgatgatgatgatgatgataaatgacaataataaacaactatcatttattgagcacataccatataccaggcccagtaccaagcagttcacatatattatacatctaatacccagagcaactctataaggcagctctatatgttgcttccatttgaaagatgaataaactgaggtacagagatgtgaagtaacatgctgatggacacccagatatgatctgcagataagaaggataagtcagaagatcagataagcagaaaggtttaaacacacaggactttcatttagtagcaaactcttatgattggtctaaaattctattttcttttacagtttacctactcatcaaatctgtcttaactatttttgtctctccaaattctcttctgttctttgttactatgtacacatgcttttaaaatatgttaggatttgctgtttccatgtgttaatttcttgtttgcctttcttcatttataaactctttcctcctactaattattgacaaactctatttttcttttttttttttgaaaaactctatttttcatatcatttttctaaatttaaaaatagcatataaggctgggcatggtggctcacacctgtaatcccagcactttgggaggctgaggcgggtggatcacctgaggttgggagtttgagaccagcctggccaacatggtgaaaccctgtctcaactaaaattacaaaaaaaaaaagttagccgggcatggtgatgggcacctgtagtcccagctactcaggagattgaggcaggagaatcgcttgaacccgggaggtggaggttgcagtgagccgagatggggccactgcattccaacctgggcaacagagtgagaccctgtctcaaaaaataaagtatatatatatatatataaaaatatttacgtgtgtgtgtgtgtgtgtgtgtgtgtgtatacatatatatagcatgtgtttattttataaattttgtaaaatacagacatatatgaaaaaattacctataatcttaccatccacaggtgattgctgttagcacctatctgggattttttttttcttttttctttttctttttttttttttttgcagtcttttctaggcacatatattcaatgaaaaaggttatcaatatagtaacagttattttttattgaatgttaaccatacacataaatatagctttgctttttttttcaattcgcatttaccatgagcagtttcctatatcacaactctttgaaaacattattttcacctttcatggctatataacattctatcatgtgaatttatcaatgtgcattttagaattgttatcagatgattaagtatttttaaaatgttcactcatcaataaaatagtgacaacattcttgaacataagttttttttaccatactatcggatatttccttagtataaattcctccaagtaaaattagtgggccaaaggctttttttttttgaggcggagtttcgctctcgttgcccaggctggagtgcaatggtgtgatctcggttcaccacaacctcctcctcccaggttcaagcaattctcctgcctcagcctcctgagtagctgggattacaggcatgcactaccatgcctggctaattttgtagttttagtagagacagggtttctccatgttggtcaggctggtctcaaactcctgacctcaggtgatctgcatgcctcggcctcccaaagtgctgggattacaggcatgagccactggtcctggaccaaagcctcttgatacattttgctaaactatcagaatgttgggcctctttgcaccctactaacaccctcagtttttatgagtatgattacattattttccctcttttccccaacctcctattctattttccttagataccttaagactgcacccccaacttagctttctgttctcattcaggcagtgtgtccagggcttccaatcccagtggtgagtaggcagatgtgggggcttcctgttgaactctgttaggtaattgagccactcaaggggaaaccagctttggggtcagctctgtggcaagcccaggactctatgaatggagctcattcctcactaatttacacaccaggacaagtagccagctaagaaattgctctaatttcactggacgtcagtcaccagaagaatggagatacagaaggaaaataaaaggcctgctcccacagtggggtcatagcacatctccacatttaacctttgacaaggcaaaagtatttcttctgtccagacaattccagaagtcataaggaatactgggcaaggatgggtcaaaacaacacagactattgagggcaacaaaggaaaaaccatgcactcctgaagaaatcgttcccaaaatgctgaaagagaaagaggattgtctctctagaagtctaatagaaaacagtatctggaacatttcctaggatttttttttttttctaatgacttactctcttattaatatgtcagagaaaagaaaagctcctggctaagaaataaaacagtccctcatcccagaaatcacagccaggaatatggattcttaagtgtcaaaaaagtactctgaataaggaaagaaacgcagatgcactgcttctattataataagcgcttgatttcttttaatcccctgagtccaattattttcttggcaaatttaagggtactgactgcttctgtgaatctattgttacacttgataatggatctgagttgggggtaatatttgcctatcaatttggatacttaaaaatctctctctctttcttcatataccctctatctcacaactttccatttaatgagggaagtgaatttcttttttctgcccctctttcctactgcttctagaataaaagcataacaggacgacaggagtggagatgagaggaagcgtttccaagcaatgggaaagtatgatgagagtcgtgagttggtagaatgggggtgagtaaggggtggggtgtggatggatggaagaggatggaggaggaagcaggtcatatgatcaggcttcaaaggccttccaatatcttgttttcagaggctttgtaggtcttcttacagaactttgagggtatttttcctttgtgagcaaaggagaaccatagtaaattttgagggatgggctgggtgcggtggctcacgcctgtaatcccagcactgtggcaggcagaggcaggtggatcatttgaggtcaggagttcgagaccagcctggccaaaatggtgaaaccccgtctctactgaaaaaacaaaaagttagttggatgtggtggcatgtgcctataactccagctactcgggcagctgaggcagcagacttgctggaacccgggaggcagatgttgcaatgagttgagattgtgccactgcactccagtctgggagacagagtgagactccatctcaaaaaaaaagaaattttttttttggagggagaaaatatatgattagattgtttttgtgttggtttgcttgtttgtttttttccccaagcaaaaaatcactttactgcaatagggaagacaaataggaaggggaagaaactagagacaggaacagcagtttggaggttctgcaatacagaagcccagatgtttggcttggacttagacactgggaatgaaaaataaatgatgaattaaaaaaataaaatatttgggaggtatacttgacctgaccttggtgctttttcaaatgagaagagaaagatagagacagatgaaaaagttaagcaaggatgactatgatttcccatagtgaatgtctggatgatgatatcattaaatgaaaatttttaaaaaggcagatggtagaaggagatttgaaggaaagacaagaaatttgtttgttttggatttacttgtagaatgacctgcaaaattttgtcctaataaatgttaacaagtggctttccatacaaaaaccaaaccaaacaaaaccctgatgtaaaccaaaaataaaattctgaggccccccttcaccatctgaatgaacttcctcctctgcaagggcactcttaaaatttaacatgaaagactggttcaggtcatgacgggaagtgggggtcggacaggcctcattatgcctctctggcattaacatcaacacagaccttaagtctgttaagaagcatttacaatctattctctctgaagcctgctacctgaaggcttcctctgcacactgagaactttggtctccacagtcctttatcttaagccagacatttcctttctattgatcccaggtctttagataaactcaaccaattgtcaaccagaaaaattttaaatctatctataacctagaagcccccacttcaagttgccctgcctttttgaactgaaccaatgtatttcttaaacttatttgattgaagtctcatatctccctaaaaaccaagctgcaccccaaccaccttgggtgcatgttcttaggatctcctgagggctgtctcctgagggccaagatcactcatatttggctcaccataaatctctaaatattttacagagttttactcttttcatcgacactgatttatattggatttccaatggtgtaatattcatgccgttggccgatttcaagctagctggtagagatatgcaaacaaacaaacaaacaaaaagagatatgcaaaaacaactcttgtgagcttgtgtgctggctccaacacaccatgctgctggatattctaccaggcagcatagggcgcacggtgggtgagcctggcaaggagacaagagctggcggtacagggcttaaatgaagccaagggcgtgaataatattgatgaggagagcaagtagaaatgaaaagagaaaaccagtattaggagatctataaagaaacaatagtcagaaaaagagtggttaaagaggcagaagaatcagaagagaaccagattcatgaaataaaagagaggaatcagtttcaggaaggaaagtgtggtcagtagtgtcaaataccagagactgaatagcctaaggatttaaaagaggtcaacagcaccaccaattaagcggtttttctgagcttaagatatttttctttatttttctatgttaaaaatattttataaagaaaaagaaaaaaagagatcacatttgcccccccaacccgtccctggcctctctctctctaaggaagtcgttaatgaatttgggcagaatagattcagagctgtgagagtgaaaatttgactgcagtgggtgaggtgttaataaaagggagggggtagagatgaaatctttccagcagtttggctcttaaggggatagcttgaaggaaagagggttggaagggtggtttttaaaaagaattatcactcactaatcaactagaaatccagtggaatatgcagtatttgtctgtaatccagcaggctaacttctttttgtttttttttttttttgagacggagtctcgctctgtcacccaggctggagtgcagtggcatgatcttggcttaccgcaacctctgcctcccagttcaagcaattctcttgcctcagcctcccaagtagctggaactacaggcatgcaccaccatgcatggctaaattttttttgaatttttagtagagatgagtttcaccatgttggtcaggctggtctcaaattcctgacctcaagtgatcacccgcctcaacctcccaaagtgctgggattacaggccggagccacagtgcccagccaaggctaacctcttgatcccaatgacaaacagaacaaacatcttactcaagtccagaagcaataataattttgaatcttgcttgcatgtcaacaggagccacattaatacagaagaggatcacactggtccaattaaattgaattgattgagagcctctgcaatacatggtctactgcacaaataatgatggttcctggtacatttttatttgaccattgattgctcgatttgtttctgtgtctaactgtgtattggaattaagctgactcaatttgaactgcaggtccttttatccctcttattttttatttatttatttattttattttaaggcatttctcactctccagaaaatctctaagatttcagctattaggcatttgtctttttttttttttttttttttttttatgagactgagtcttgctgggtcgcccaggctggaatgcagtgtcacaatctcggctcatcacaacctccacctccctgattcaagtgattctcctgcctcagactcccgagtagctgtgactataggtgcaaaccaccacgcccagctaatttttgtatttttagtagagacaggttttcactgtgttggccaagctggtctcaaactcctaacctcaagtgatctgcccgccttggcctcccaaagtgctgggattataggcatgagccaccgtgccccaccaggtcttcttaatcataacaaattcatcttaaaacatcattttagaatatattattttttattcttcattgacttcctgcattactctatttttttcagagtttctagcaaccagtatcattggtattttaaacaatgtgtacatgtacatttatgcagatgagttaacatatatcaaagcaacctccaaacaatgccatttaggtaatctccaatttaaaagcctcaatagaatgataagattgagcttttctgtagttccatgacctccagcagagtctgcaaggccacagctgcctgaagattgattctgtaattagaagatgccagggtcatctcagaatagaacctcaagccacccaggctacatttacagaatcagcctctccagaaaaacagcaacaaaggagggccttcctatgtatttggaaggagtcacctagaggagggacttggggttttggtgttggtgtggggggcagggatgggatggggagggggaagcttattgaaatatactaaaagacaaaccaacctaagggctggagggaagaaaattcacacttgtaagcttctttttcaaggggcatctcttaggctctagcttttgagattcagtatatatatttttttgagtcttgctctgctggagtgcagtggtgtgatctgggctcactgcaagttctgcctctcaggttcacaccattcttctgcctcagcctcccgagcagctgggactacaggcgcctgccaccatgcccagctaattttttgtatttttagtagagacggggtttcaccctgttagccaggatggtctcgatctcctgatctcatgatccgcccgcctcggcctcccaaaatgctgggattacaggcgtgagccaccgtgcccggcccagtatttttgttttatgaagatattacatttgtaaagtatgagcttggtgtcagcaaacttatatccctgtgtacaaactggccgaatcacttagccactttgggccaaatcacttagctcttctaacagtaagaaatcaacaagaaaaataaacatttcaaacattacaatgtgttcatgtattcactgtgggggatgaccagattctcgaaaccacaggttgttcttagtgaaacaagtttgggttggggccatagacttgtgtatttagaatcaatggctgttctctctctgggactttgatttttttcttgggctcatcccctttttgtagtatcttatctttgtcttatttgtataggacttaactgttcccattcccttattagagcaatctaagtgattaccttcataccttttggaattatatgcttcaaaattccaaaaagaatgattttgggctgggcacagtggctcacacctataattccagcactttgagaggctgaggtggatcgcctgaggtcaggagtttgagaccaacctggccaacatagtgaaaccccgtctctactaaaaaatataaaaaattagccgggcatggtggcaggtgcctgtaatctcagttactcgggaggtggaggttgcaatgagcccagatcgcaccattgcactccagcctgggcaacaaaaggtgaaactccatctcaattaaaaaaaaaagaatgattttggtggtcgacttcaaataggtaggagaagaaggagagaggagatggagggtcagggagatctaattactctctaaaatcatgctaggaaagataacaccttttaataacactctctgcttttataacatcattctgccaaggagctcaaaggtttcaacaaagttcactttcagaaaacccctttgaggaagacagaatatacatcttctctccattttaaagatgaagaaacaggccgggcacaatggctaatgcctgtaatcccagcactttgggaggctgaggccagaggatcgcttgagctccagagtttgagaccagcctggataacatggcaaaaccctgtctctacaaaaaaaatacaaaaattagatgggtgtggtggcatgcacctgtggtcccagctacttgggaggctaaggtgggaggatcgcttgagcccagggagtcaagtctacactgagccatgattggatcactgcactccagcctgggtagacagagcaagaccctgtctcaaaaaaaagaaatgaaagagaaagaaagaaagaggagaggagaggagatgaggggaggagggagggggggaggaaggaaggaaggaaggaaggaaaaaaagatgaaaaaagaaaaaaacaagatgaaacagaggcagaaagactttacgtaaattgctcatcatgtggttgtcaagtttgaccccaaaacccaatttattgaccaaggttattctttgactgaggcaagggggtccgctctcctgggccttgggctttagaaagctcatctctggcctttctgagatccatccctttctttttatttttcttgacacggagtcttgctctgtcactcaggctggagtgcagtggcatgatctcgactcactgtaacctctgcctcccgggttcaagcgattctcctgcctcagcctcctgagataacaggcgcccgccaccacatctggctaatttttgtatttttagtaaagactgggtttcatcatgttggccaggttggtttcgaactcctgacctgaggtgagctgcccaccttggcctcccaaagtgctgggattacaggcatgagccactgcgcccagctcagatccatccctttctaagggcaaacagtccatggtgcaaaggggccatgccacccagagttatgagtacctgggactccagaattccttgcctggtggcctccacatgcacttccagggcctgcttgggcctcttctatgcgtctgtcctgagtgttgatagaaccactgatgtgagtacctgggcttgagccgtggcctggagatcctgttgactgtagcatggagggggcttgtgcagctgaatgtctgcatgcaggtggtgggagttctggaatatgatggagctggaggtgggaagagaagtaggcttggggcagctctctcatgccacctcattctggccaaaactcaggtcaaactgtgaagagtctaaatgtgaatctgcccttcaaggtggctacaaaggtatctttgtcaaggtaggagaccttgtggcctccacgtgcacttccagggcctgcttgggcctcttctacgggtctgtcctgagtcttctatgaatctgcccttcagggcagattcatatttagactcttcacagggggatcaataggtncgcccatgcatggactcagtnnnagnccccctctcccnnnnnnnnnnnnnnnnnnnncctttttttttgcccctccagtgttttgggtagttttgctcccctacagccaaaggcaaacagagaagttggaggtctggagtggctacataattttacacgactgcaattctctggctgcacttcacaaatgtatacaaactaaatacaagtcctgtgtttttatcacagggaggctgatcaatataatgaaattaaaagggggctggtccatattgttctgtgtttttgtttgttggttttgcttgtttctttatttgntnntgggcccccatcctctcaatttatgaggagaaaccacctgagggttctctttggccccttaaaagaactaggtaccttaagctcgggaatttccaaggcgtaattcccctcatataaaaaaaaaaccagggttgatcacaaaaaacaaaagcagcccattacccagaggactgtctgccttcccctcaccccagcctaggcctttgaaaggaaacaaaagacaagacaaaatgattggcgtcctgagggagattcagcctagagctctctctcccccaatccctccctccggctgaggaaactaacaaaggaaaaaaaaattgcggaaagcacgatttagaggaagcaaattccactggtgcccttggctgccgggaacgtggactagagagtctgcggcgcagccccgagcccagcgcttcccgcgcgtcttaggctggcgggcccgggcgggggaagggcacgcagaccgcggaccctaagacacctgctgtaccctccacccccaccccaccccacccacctccccccaactccctagatgtgtcgtgggcggctgaacgtcgcccgtttaaggggcgggccccggctccacgtgctttctgctgagtgactgaactacataaacagaggccgggaagggggcggggaggagggagagcacaggctttgaccgatagtaacctctgcgctcggtgcagccgaatctataaaaggaactagtctcggcaaaaaccccgtaattgcgagcgagagtgagtggggccgggacccgcagagccgagccgacccttctctcccgggctgcggcagggcagggcggggagctccgcgcaccaacagagccggttctcagggcgctttgctccttgttttttccccggttctgttttctccccttctccggaaggcttgtcaaggggtaggagaaagagacgcaaacacaaaagtggaaaacaggtaagaggctctccagtgacttacttgggcgttattgttttgtttcgaggccaaggaggcttcgggaagtgctcggtttcggggactttgacccggagccccacatccccaccacttgcaactcagatgggaccggaggcggtgttaaatggggagactatgtcctagtacgagctctggtgaccccaggactctgcgctgctgcgcttggggcttgcccgacggtggagaccggggagcatctctgggcgtggagacccgggcgcagtaccccgggctcagaggggtcgggggttcccgggcgtgctgagggcgctgctgccgggtggggagagctgcaggtccggcaccgagcgctgctttgttcggagggccctgagctggctagaaacccttctggttgcaggtcggccagtacctacggagacaaatgccagcactgagtcttcactcggttcttaagaagctggtctgttctgacctgggaattggctatatgctcccccggactggagcggcacagtcccggactgtgaatccgggaactcgagttggaggtgtcccaaacggtccgtggtgctattgctcactagaggccttgggtctttgtttgacctgaggggtagggaggtcctgcctacagtctccgtgcgctcagctgagctggtgtccctggcgcagagcgcggacgagttttgtttccttttctttttttttttttttctttcctttaagtctcggtctgtcgcccaggctggagtgcaatggaacgatctccgctcactgcaacctccgcctcccgggttcaagcgattctcctgcctcagcctcctgagtagctgggattacaggcgcgtcaccacatccagctaatttttgtatttttagtagagacggggtttcaacttgttggccaggctggtctcgaaccctcgacctcaggtgatccaccggcctcggcctccccaagtgctgggattataggcgtgagccaccgcgcgcggccgagttttgtttcttttaaaaacaagacttaggagagcctgcggagacccggaggtggggtgcccaatcctccctctcccacgttccctgcagccccatcttccagaccgttgctgctggtctctcggggcagcttctgcctgggcgcagatggggaagctgggccgaggtggtgccgtggaatgaccgggagtaaccccggcgggcggcgcagaactcggagctccgccgcggggctgggctgggctctgccgtgagggtgggggtgctgggcgcgcgggctgcggtggcccccggagactggcccgcagcgcctcctggccggaggacctaggaatcggccggctctactaggtgtctttgctcgcggttccgactgtgaatccggtgaagaccggtggttgcagacggggaggaactatgaggttgaggcgaaagcccgttttgtttttttttttttgtttttttggttttttttttgttagcgtgtttgccaactcccaggccattggtaaagcaggaaggttcttggggcggcggacggtgccagggttatgtgtaggtgcctctttaggtatatcttttatcaaaaagaagcaaagaaataagattaaaaataaacaaagaaaaaagttgtctggcactggcagtaattggcctgcctttgcagcactgataccattagcttttaaaatccgacttttcattgacacttcaagaagagaatgggtagtatatacacattcatctcatagtggacaaatttcatatttaaaaaaaccttctgggtactgaaatcagcaagtcacttgccctccatggccgaatccctgcttcccacgaagagaacctcacaaaaatttcccccaagttaaagagtggaattttcttgatttttttttcttttttttttaacggccgtagtttagaacccagacttaaattatgatcttcttttcaaacaaaacttaaagtccttaagttttcatctccccttttatttcaacctattcttctcatacctaccacaaaaataatggaggctttctgttgagaaactttccgtttctgttgagagtatcattctcttgagaaactttctcctaaatcagagaaagtatggaagcatggaaagtattcctgagtagaacttctacagatattacaatatttttcaaatacaaagtttccattgtcagcctgtttcccaagtgcttccacaaaccattaaataattccacaaaccattaaaataattaatgctagggaattttaggaaaacattggtttacaatcagaaggacaggggaagtgggtcttcagccttcacgatgactacaagccatttaagggactagaattgctactgttgtcagagcaatttaggagtctgtatttgagcacccgcatagtgttccagaatgacatatctgactgtaacctggacacgtgtgatatgttgtctcccctgcagatgagcatttgaaatctcaaccctcatatttctacgagtgcaggcctataatggaccctgggcacattttttttttttttttttttttttgagatgcagtctcgctctgtttcccaggctggagtgcagtggcacgatatcggctcactgcaacctccacctcctgggttcaagagattctcctgcctcagcctcctgagtagctgggactataggcgcacgccaccatgcctggctagtttttgcatttttagtagagacagagtttcaccatgttggccaggatggtctcgatttcctgacctcttgatccacccgcctcagcctcccaaagtgctgggattacaggcgtgaggcaccgcgcccgacccctggacacattttgacttagaacatattttcggtttgtgtgagacagtgcattagtgcaggattggaaaagagtgatcaggaattgattgttttcaaggattggttccttctgctcaaggaagtcccattgtaaacataaaaaaatgaatgaaactgaagaagttcagtgacttagctttttagtatcttctgtagtacttacctttttggagaggagttggttgggatatttttccatttaaattttttttttaaagggatcttctctcccataagccgggatacttaagctatatatgtagtggctacaaattaaggtcttcactgttttcatttttagctcctagaataagtgaacattaccttagatagactcttctaattatgaagatatctagatgtctagaaaatatcaaaatgcatgtggtttttgcatttctaaaatacttttaaaaccaaatacttttttttttttttttttctgagatggagtcttgctcttttgcctaggctggagcgcagtagaatgatcttggctcactgcaacttccgcctctcaggttcaggtgattctcctgcctcaacctcctgagtagctgggattacaggtgcgtgccaccatacccggctagtttttgtgtttttagtagggacagggtttcaccatgttggccaggctggtctcaagctcctgacctcaagtgatctgccagcctcagcctcccaaagtgctgggattacaggcatgagccaccacacctggcctcaaatacatttttttaagtatccagatattaaataaataataccattatagtagttgttatggtcatttactctagcatcaaatgttaaaagatcattctgaacacttgttttgtttatgctgagagaaggcctactccaaaaaatgcaaccatcttcgtatctgcatgtggatacaaccatgaatggccaaagttattgcaatgttgaatagacacttatatagcactgtgtggcaagtactgtttgaaatgtttttcacgtgtttattcattgtatttattttgagatagggtcttgctctgttgcacagggtagagtgcagctgcacagacaaggctcactgcaacctcagcctcctgcgctcgcgtgatcctcatacatcagcctcttaaggagctggggccacaggcacgcaccactgctcctggctaaatttttacaattttttgtaaagacaaggtctcactatcttgcccagactggtcttgaactcctgggctcaagtgatcctcccacatcagcctcccaaagtgctgggattacaggcataagccactgtgcaggtcatcaaatgctaattgaattttcacaacaaaaccatttattgtccctagtttacaagattaagtaaatgagaagctaatttttctctggctatataccttgcaagaggcagagctaagacttgaacccagccagagttctttaactccagcactaacatttcagctgctgcaaccagggagcttttcaaggatgatcaccacattctctacattcatctgctataatccttatcagaatctacagcctgtatcatattttccttgttgctgtgagtgggtcagccaaattctctttaacttgaaaccttggttgcgtagggattgcaacatcctggaaagaatagaataaaatttactcaactcaattttttacttggttcataatgaaaactatactattgcttcagtcagatgtttgcgaatagctgtgtgatctcaaaatgttttcctatgtgatctatataaaatggaatgatagagtattaggctgtaagggcataagaaacaaaggaaaaagagaagtgaactgttagtttagttgtaaaacctaactttggtgaattgtaaaaatttgttataatacaatatgattcttgcttgtcctgtccttgatgaagttgtggaccttttgaaataagctatttctctgttactgctgttactgtttagaaatcaaatttagttttttcttaagatatacgtatttttggaagataaacacagtttcaaagtctgccttgttggctgggtgcactggctcattgttgtattcccagcactttgggaggccaaagcaggaggatcacttgaggtcaggagttcaagaccagcctggcaaatatggtgaaaccccgtctctactaacaatacaaaaattagctgggcgtggtggtgggtgcttgtaatcccagctactgggattgggaggctgaagtagaagaattgcttgaacctgggaggcggaggttgcactgagtcgagatcgtgccactttactccaacctgggcgacagagtgagactccgtcttgaaaaaaaatgtctgccttgtaaaagtgaaataggatgagaaagtgcctttcttattaattggtgtaatgaattagaaataaactctttgaagacacctcttggtaaaaatagttacatttactgttgatttatggtatgttggatatgtttttaagttttccgtgtaataactcagttcattctcatgagtgaaataggtgcttttattgtctttatagatgggaaactgaggtataggcaggctaggtacattattatggagttcgtaagtagtggagctgaagtcgcatcccagacagtttggcttccgtgagtttaccaatctcatggtaaagactttgtcagactatcaaagttttgacaaatgaaatattagcaaaaggccaaaagggattctctattttcatttgagtatcttcacctgaaaatagttgcctgaataagtagcctgcatagaaaggtacattttagaaatacttgaggccagagaatgaaaagcttacataaaattgatttccggtggggccttcagttactctccattctacgaagaccacaaatagcattcaggcaaagagcatttattccaacaatggaggagcactggatttggttcctaaaacaaaataaagtttgaaatcctgtctttcccatgttgaaaacaaagttggtacaaaaccctttagctttggcaaacctcctttaagacccgatttaaatgcttccctcctcatgaagctcttctggatccactccttcccatcactaagttgaaagtcagatccccttctctttacttccattagacttggattacagcactctttgtatcatgtatttaattctgttttttaattacagttaacatttatttgtcttcctcttgagtgtatgcttctctagaggaaggtctttgattcattctcccctggccttaattcatcccacttaatatggaaaaaatttaataaatgctgacttgaataagtccaacaaggagaatgggaagctcatgtttgcttcctgtcttctaaaagactacttaagataacagggtaatcacagaaaagcattagaaatagagttatatgagaaacaactgtagttaaggctaggtttatgttagactgagaaattttagtgcatacttaagttatttaggccaggttactttttgtagaacaaacatttcagtttcgctcagtttcatttccgtttctgaggcagctgtgatttaagaaaatgctctagtctgtggcattccatattcaagtactttgagttgtatattaatttatttttgttaataagagtgagatgactcactaagtaatttagagatttaaacacttttttaaaaaacagtaacttcatatgcattggatctattcttctataaagtcttttcttggggggtgtttgtttaaaattccccggtgttttctctgccaaatccaacttccaagaagcatttggaagtcaaaacattttatctggttagtcttaaagtccagatattttgtgatagctggtatttagtttatgatatttcccaggaagaactttttagtagttgaaccatttatgaaagacttccttgaagctaccttagagagttgatttagttcttcctaaataagtaaatagaatattagtattaggacatcttggagtatagatgcaaatattggtgaaaaagaacatggatatcagagtcaaattaatgtagattggaattctggttattactaatggatatctgacattaggcaagttgctgatcactctttgcctcagtttcatcatctgtaaaataggtatttgtgtttgtgtataatgtgaaccgtataatataatgcttggcctatagtgaaatttattcatacgcgtgttttcagtgattttaaaagcttgctttaggccgggcgcgatggcttctgcctataattccagcactttgggaggccaaggtgggcggatcatgaggtcaggagttcgagaccagcctgaccagcatggtgaaaccccgtctctactaaaaatacaaaaattagctgggcgtggtggtgcaagcctgtaatcccagctactcaggaggcttaggcagaagaatcgcttgaacccaggaggcagagattgcagtgagccgagatggtgccactgcacagagcgagactccatctcaaaaaaacaaaacaaaacaaaacaaaaatcttgctttatagtttacttccacatcaaattgtctttatcccatgttacttgcattgatatcccagacatgaaaagaaaaaaagatgataacaatgacagttattaaattaggttccactcttattctagatcaccaattcatattactattcagacttggaacattaaattttagttaaactttttttcaaatatgcatataattgtcagtggttactatattttggggaagagattgttgacttctttgaagaaagatacggattttctcttcagaagaaatacacatgggctcatataatccaaattttatgtgtaattacagggtgttcatgaatgcccacaaatccattaagccatgtgaccttggacaagtcattttacttttctgttttttaggttgttggtctgtaaaatgatactacttgacttttaaagagcccttcaagctcttatgtcctctaaccccaggtctgtattcagaagaaggggtggtcctttaattagagccatctagagatctgaggaacatgctgggcattagtgtaacataccatgtggattttgagaggtaaagaaaaaataaccagggaatgcctcagagcattcctgatcagatcgatgacagaagaaaggaatgagagggaggagaggaagctgttgaaatttcctatttacctgctttgagtgaatgaagatttgaatcatagaaccagaaggggttctcatctgaaatgcaaaggaaggaggagttggtttaattcaataagtttcagttgagtaaacatgatttagtgagacactgttcttgcttctgactcaccatttggaaaatctctctaaaataaaattggactctccatctcggacatcattttgggtgtaggttttgcttttttttttgagatggagtctcgttatgttgcccaggctggagtgcagtggcgcaatctcggctcactgcaacttccgcctcccagattcaagcagttctcctgcctcaacctcctgagtagctgggactacaggcgtatgccaccatgtccggctaatttttgtatttttttaatagagacggggttttactatggtggctaggctggtctttaactcctgaccttgtgatctgcccaccttggcttcccagagtgctgggattacagatgtgagccacagtgcccggcctaagttttacttcttataatggactcctgttaagccaataggtgatgaaaggaaaccataaccaactcttcaggctcattcatccttcaagaatagcatgctagtacccatcctaggaggagaattggactatacctcatgaggatagtttgaagtatctcagaagaccctcactgggggtaggtcggtaagacacaaagctttctaaagcactgtaccaaatttgttgtttgagagatcataacaaattagaagtggaaagaagaaggagtaaaaggaagaagaggtttctggccaggagcagggagggggaaggagctgctaggaagatgtttggttgtcatatccctgttcacccttgctttgcaaaattcttgtaggatgccaggttgggagtaattgtttttcacaagagtcaaaccacgcttgttttcttgaagaagcaagtctttggagggtggtggcttgaaatctgttggatctggtatttaggtgatacactttgacataaaggcaacactgatgcaagcagcagctttccttggaaaggcagggagaaagtgaaggcccagactgatgagcttacactgacctgcagacccttctccattcccaggcatgtttggtggcagagtttaccttagttggggttaggctgttgtctggtactgtgagagagaaggaagaagaagatacgatattaacaacaacaatacatatttatatttgaaaattaaatgcactaatacacctatagtgctattaaacaaatttatttgttcagcaaatgtttgttaaacaccatgtactgtggaaagtactaggtgctggacagaggtcaaaagacttttaagaatctgccaccattaatgatctctttctgcttggcattcaaggctctttgaaataagactgtgacccactttgatagttttgtcctggattataagacacatgctcgaaggaactatagctggttttctcaccagactgattaacatatagtatggtttggtacctgttaaatgagtctctctctacaggttttcatcttctactttaagaaccccttcctggcattgtttggctcctcattgttctggaatctcatgtccatctcatgtatttgccttggttcacacttgatcttctactcatattcctcaccttactgaaattttacccatcaaccagaccgtgggtgatggaacacagcatgggctagttcttcttatatatgatctcatttaattttcactggaactctgagataggtagcatttcagcccactcaagttgactcaaatttttgtaatcatcaatatattttaaaataactttatatttgacctgtaattggaaaaccaatatgagttatcataaatgaaaggtaattttaaaaataattaggatgaagacaaattatttttctcacagtctatgtataagataaactattggttcccaaaggccccagctgacaatgagacttctcttactttgttgaaaagggaattagcaagcattaaagaggtgtcaaaaagaagactaaacaaaagcttactcctttttttttttgagacgagtcttgctctgttgcccaggctggagtgcagtggcaccacctcggctcactgcaacctcttcctcctgggttcaagcgattctcctgcctcagcctccctagtagctgggattacaggtgcatgccaccacacccggctaatttttgtatttttagcagagatggggtttcgtcatgttggccaggctggtctccaactcctgacctcaggtgatccacccacctcggcctcccaaagtgctagaatcacaggtgtgagccgccgcacccggccgcttactccttaatgtactaagaatgttatatataggctgaagaagtgctgaaaagaaccatattttctcatgatgtggttcaatgtttaatactgtgcttgttcatctcctaaaatcctctgaatatcacttaaattcatcctgtgtaactctcccacatttggggaaatactgagcttgcctattattatattagccccatatttcagatgatgcacctgagccgaggagaagttaaataacttgttcatggttccatatttggctaatggcagagccagggattcaaactcttgtctctctgactcccaggtttgtgcttttcccacttggctgaatttctcatgctacctcctccataacacctttcctagaacttttaaggaatgcttcccctgttctctcatagcattttaatgtaagttgccaaagtgtcccagtttgcacccctaccagcaatgtgggagaaaatagcaacatatttttgatgttggggtctagtgttacggtttcttctgctctttgggatgtatattccatggctactgaatacccaagtcccaaacagttttcttagactcagaaggtcatccacttcagcttcttcatcaaaaagacatattttctggctgggcacggtggctcacacctgtaatcacagcactttgggaggtggaggcaggagaattgcttgaacccaggaggctgaagttgcagtgagcccagatcgtgccactgccctccagcctgggtgacagagcgaaactctgtgtcaagaaacaaaaaaaaggacttgttttctgttccattacccacagtggtagaatggcgtgctaaatttattctccagctgccattaactgcaaattaaaatcttagtctcttgcctctttaatccaggcttcttcatactataccagaatttaggataactattacagtgccctttataggaaagaaagaagaaattgtgtctgtagatgtctgttcctttcagcttaaaatggacactgaaatgttaaatattggactggcctcatttatttctcctgtctgttggtccaatttgaatcttaaggcgtctttcaactggaattttttgtttctctcaactaaaaattgttctttgtaagtttgaatcagaacaaaatcctgaatgttgagggtttcctaaaggctgtttctttatgcaaaagcctgaaacccgatgttgatgttggctgcttaaaattaactgtgaatcaaggcagggtttttatttttattttttttttactttaatgattgtgttaattatagtgaaaaccttgagttcacgagaaagaaagcctttggtcaagtattgtttattaagttgtcagtcttgttgcaggatttgcaaatttagtggaattagtgccatttttcagtttacaattccagtcacatttcacatgatcagagcatggctttcttctctgtggagcaaatagagggctgtctgacacttggttccagtggcttccattaagcagagtggatatgtccctggagtctgcagagaagggcatggcactctgaccccagatggcactccgttttgggacattgtccaattctagttcatagcatatgtgaccaacaccagctctcacctgatgtaaacacttagcgcgttgttgcttgggggattggattgtgtgaatttttcaaaactacagttgacagaaggaggctaccaaaaatgaaacccaataattccatttttgggaattattcccacttttgttccatttttcccactttgttctttggcacacagaatgtttgatttgtgaaaatcttaataacagtagttttttctataaggaacactcagaatcttgataatattggaataatacagatccttttgtaggatcctctcagacctcatataatagagttcatgtagtcaatatttaaagaaaaacacccttaagtttttgtttttcagaatcacaagtaagtggatttaaacttgtgatcttattcccctttcttctcttaatttagtgaggcagccagcgagagggtttgttttggttattctaaagaaggagtttgcttgtaagttttggagggcaagacttagactctgtgtctctgtgcttgccctggaactttgattaaattgtcactaaccgagttagctggccctcgccgggctgcagaaatagaagtgtcttgcacacatgacatatgactgtctcaagagctggctggtgaaaggacgttctggagaaggctgccgatactgtatgaactagaactggacaagagcctggagattggataactcagtttggcgcaagtaaagggaataaaagtgttaaggtggcaaaattgtatccaggtgtttataggctccctgagttcctgacttgagcctatctatgggtttagagttcaaggctctttaccagtgctgacaatcttatactctaggttgaacctccggggaaggtgcccttgcttgatggcatgtttaccaggggttctagagcctcaatcacagattctctctagctcacatgaagttaatgaaaatgaatgtgcttccctacaaattagagaggctttgaggaaaaatcagattaaatgcactcctgcttgaacttatgtttcttagaacacagctggaaattttgtcacacaaacctttactttcagtgacatttcttgactggtttgttactgtagtgaatctgctttaactatcttttcttatcgctgaggttttacttccattctacatgtgattgtggagcgctgcgtcattgtgggttcagtgtagtggagagtaggaagatggtgagacacagtagcttgttgcacattgcttaatttatcagggatcactgatgagttagtacactagagaagattgtaggtagagctgaaaagatggaggaattataaggctcagatttctctctttttttttttttttaagatggagtttcactcttgttgcccaggctggaattcaatggcatgatctcggctcactgcaacctctgcctcctgggttcaagtgagacttgatggtctcacttgatggtttcctggctcagcctcctgagtagctgagattacaggcacccactaccatgcccagctacttttttgtatttttagtggagatggggttttatcatgttgaccaggctggtctcgaacttctgacctcaggtgatcacctgcctcagcctcccaaagtgcagggattacaggcatgagccactgcgtctggccaaggctcagatttctaatagagatttctaatggacatagaggctggaggaaatgggatggacaggaaaactgagtcaggtgccaaaaacttgtagggggccgggtgcggtggctcacgcctgtaatcccagcactttgggaggctgaggcgggtggatcacgaggtcaggagatcgagaccatcctggctaacacggcgaaaccccgtctctactaaaaatacaaaaaattagcgtgttggcaggcggctgtcggtagtcccagctactcgggaggctgaggcaggagaatggcgtgaagccgggaggcggagcttgcagtgagccgagatcgcgccactgcactccagcctgggcgacagagccagactccatctaaataaataaatagataaataaataaaataaaataaaaacttgtagggaggtggcagtgtgctatggaggataggtgcaacctctgtgagaatgtagagaaaatagtataagtgagtggtgaggacccccaagagggggttttatagtaaaacaatggtcagaagtggcaacaggataccgtataatgctttcacctctaccaatgcactgggtactggagagcgctccagtttgctctggaaaggccctttctgtggacaaagaatacagaaaagagattcctttaataaaccacccactctgtgtcccacccttgatgaatacttcactgtgaaattgccagaattaatcatggtaatagctactgtacacttactttgttccaggaactggataaatgttttacatacattatcagttctattttttggagaagatacaggggctcagagtccctagggttccagagctggtgagtagcagagtcaggattcaaacccagctttctctgactctaaaacctcctttcttcctgctgaaacaattaactcaagacaacaaaggagttaaggatttggggagttttctgcatggtagaatagacccaaaggaaaagaaagaaagacagtgactaagatttgggtttgtctgccccaccaaatgctttgagcagtttcataaatataaatccttcaggttgggagaaggttgaacatctgaagacactgattcttcagagatgtaatccaaacaaagtgatctttggtgatatggtcactaaaccatttatcccaaaattctcttggaaaaccgtcctataacagcagggaacattatccagccaagtttttctgcaaataaagggttgctgatagaggcttgcctgcttgtgtttctgtagctcagggtgtttatgaattcactaatcccttcccttcagatcccttttattctggtgttatgattgtgactgaaaaaaattgattttttttctatgacatagaatgttgaaaggttgatttcttttctagaggaaagattctttttttctatgtgctacataccccccgaccagggaaaaggcaaatagtggtattgtttgctgaagtcttcctttgaaggttgcttggtgtttgcttagtggaaatcagcaggggaagagaggctatctctaacattttgttagagtttcttcgtagttctatagtgatgaaacaaggacttggggtacaggacagatctgctttcagaaatcctggctcttgtgaggtttagaagccctgagaccatttagctggtggcaacgggaatgttgagggtgataaataggatctttggttgtccaagtatcagtgacatgatatagatggagttaaacctttaggatctccttatttatttgtttgtttatttttgagacagggtcttgcactgtagcccaggttggagtatggtggcatgatcataactcactgcagcctcaaactcctgggctcaagcgatcctgctgcctcagcctcccaaggtgttaggattacaggcatgagccgccacacccggtcaggatctcctgtaaaattatattgttgacaacatgaagaattatgcttctcaaaagctagttatagatttgtacaatattcatagatttcttgtttcagtttttacaaattcatagcccttattttgaaaattagctattagcaataattttgtctaggaaattggatgtgtattcaagtgaaagaaggaagtacagttacctattatcttattgtaactaacaatcaagtaagtgtgatgcatttggtactttaaaaactgcacccaagttacagattattggaattaataaaattcactggatctatatatttttaaacggacagtgtgatagcagaacctcttatagaatgatagaattcctctggaatgattggataacttcatttcatccttgacttttaccttggaggatttcttaccccttttggcttctcaaatttgactattaaaatgttgcctttaaaaataggaacacagtttcaggggggagtaccagcccatgacccttctgcaaggccccctaactcaaggtagtttccctggaactgtggtttatggaatgtttcaggagtgtgaggaggtataatttaaggctgtcctagcaaggatacccttaaggatagagggcccagtagcatctggaggccagaaaagttaaactgaggcagtcagattagcttcaggctcaattaagctgatgggtcagcctgggagaaattgcaggatgactctcaatatcccctcccacccccacagcagccacgatctgtctgtctttaatcatgggtgcagtgaacctgttctttccaggtgtcttggccttcagtaaccttgttaggcttgtccctgaacgtggctaccgatccaaagacacatgatcagagaggcaattagagaacagaccttttccaaagcaagcatgttctgttgggcttagaagtttcatgtcctaatattataggaccctgtgcatctctctggagatgaggcacatgagtcatatctgtgattcttgcttttgtgtcaacatctcatgaataggcaatcagagctttggcaccaatgtattttcagttcatatctgatgtagttaaatccacctcctgctttgtagtttactggcaagctgtttttgatataagacatctagaacactgtaaatatataacatttttatttgtctattatacctcaattacgaaaaagacatctagaagcaacctcatcaagagagatactgaggccgggcatggtagctcacacttgcaatcccattactttgggaggctgaggcaggtagatcacttgaggtcaagagtttgaaaccagcctggccaacatgttgaaaccctgtctctattaaaaatacaaaaaagttagctgggcttggtggtgggcacctgtaatcccagctactccggaggcttagggcaggagaatcacttgaacctgggaggcagaggttgcagtgagctgagatcacaccactgcactccaacctgggcaccagagtgagattacatctaaaaaataaaataaagtaataaaaaagagagatattgatagctgttgttggaaatttcaacttccatctcacttctggtaactttttggaagtttgttgaacaaagtggaatacacgcacatacacacacacacatactctcttgtttgtttaaggtttaatgaaatagctgtcatataatcactgtttttgaaagaggagaattagttgctatctgtacattttgggtatgtgaactatttggatagaactctgagaaatgcattcagaacaacaaacaaaatcataggagaaatagctaagtgggaaggggcatataagagttgttgaaaaagttatttcttgagaaaccagctctaatgctaggcaagtcacttgctttgggggaggcctcagcttctctgtctataagattgcagcaggggtgtagtgggaatgagtcttcaacattccaagagattttatctactaatacgacagtcaaatggagcatgactttgtggaagcctctcctcttccacccagaggggccaatttctctgtcccagtgagatgttgacacttgtatgatccctgcttggagacttccctcttctggaacctgccctggctcaggcatgagggctgactgtcacccttcgataggagcccagcactaaagctcatgtgttggcagtgttcttgcgggaaggaaaaagaccagccagcccatttgttactgcacaagcaaacagcttctggtagctgtacagatacatgcactttctttcctcactgtgtttccatagacagatttagtgctgtagaagagtagagggcagtcacgggaaggagttcctgtttttcttttggctatgccaaatggggaaaaatcctcctatcttgtctttttagtgtcatcctctctccccttttcttcttctttataattctcatctctcatctctcctggaaatgtgcatgtcaagttcaaaagggcacaatgttttggtgaggaagaggtgggagaacacgtgccaggtgctaactagggtcatcatttcccccttcacagccagcttcctgtgaatgtgtgtgtgtgtgtgtgtgtgtgtgtgtgtgtgtgtgtgtgtatttcttttgccagcatcactgaatctgtctgctgtctggtattccaggttttggtttagggaaaagtaaaagtaattttataatcccagctgtcatttaagccacccctttgtgggtagcatatggtccactctctcagttcattgtcctaaagatgcttcatcagaaaggaataacttccaccccgttactctctgtccccttactctgctttatttttcttcgtcaatcctaccaccaccacccactgtttgaacaacccactattatttgtctgtttcccatccctggtagaataggagccccatgaatgaaggaactttgcttctgttgttcaccactgaatctctaaggtatggaacacacctggcatgtgataggcactcgataaatatttgttgtggctcatgggcaccttgcagagttaaggctgcagttgtttgtggaatttataagtggtaatgaatatttatctactattcctcttccaaggcgatcacacaataatcaggctttacactatccagttcttaggtcttccaagttatgacttgtgaggtatgttaattatgataatagaaggcagtttatttggttcagatttattgatgtgtaatttaccacagtaagacttcccctttacaaaagtatgatgagttttgacaaatggatacacatgtgtatctaccactgccatgctccttttcagtctgtcgtcccctccacccatgaccactggtcaccactgcagtgatttctgtccccttcatttcaccttttccagaatgtcatataaatggaatcatgcagtatgtagttttttgtgtctggcttatttttcttagcattaggcttttgggattcatccaggttgtcgcatgtaacagtagcttattcctttttatggctgagtaagtgtcccagttttatttatatatttatttatgaggaggtgtctcactctgtcacccaggctggagtgcggtagcgcgatctcagctcactgcaacctccgcctcccaggttcaagcaattctcctgcctcctgagtagctgggattacaggcacccaccgccacgcccaactaatttttatatttttagtagagatggggtttcaccatgttggccaggctgatctcaaactcttgacctcaggtgatccgcccacctctggctcccaaagtgctaggattacaggcatgagccactgtgcccagccccagttttatttattcaccagttgatggtcttttcgacaactaattgtttccagtttttggctattctgtataaggcttctataaatattcacaaatacctaggatgggatgactgggtcatataatagtactgtataaccttagcagaaactgtcaaactattttccaaagtggctcttccattttacaattccacagtgtattgagtcccagtgtctccatacacatgctagcacttttaatatttaatttagtgggtatgtaatgatatctcattgtggttttaatttgcatttctctgcagctaatgatgagtgtttctgcttatttgggaaggttttaatttagcagtctgttgtattctgtagatattaataacttcaaaatatcagtggcatttgcagttaaaatttccttaaaaaattggccaaaggtttccagcagtcacttctgccatgcccaaactgtatgaaacaaggctgaggtgtggagattgtcacattttggcaaggagtgatccacttgggtgactgatgagacccagagagcgtacgcctcgggcttgagggtgaggacgggcgggaagtcgactgcatggccctgctggccttgggaggctgcccagtccttagctaaagctggcagttatgggaaacagacttagattctattacgtttttcaggatgtcccaggagtcacctgggaagctcagcagtcctttgtgactttcaagcatatggtagaagctgctgaacacagagctccctctttggggataatttgcccaaatcatttaatcaggcttgagaaatgagttaccacaggtccaggagtgctgccacccttgaattctgacaccctatttctcctatccgtctcttaattaattaagcagacatccccaagtgcttacgacaagccaggacccttttgcatactaaggaaaacagggatgaaggaaacagaaatggtctctgctctgactcagaaggtagaaatcctctttcccagccaagtcttcctagggagcacgtaggaagggctctgaacccacgtgtcagttgcaggggaggatatcaggaaaggacattgaagaagtggagacctaagtttgagacctaggcattagccaggctagcagtgcttgaaaaagtgtcttaggacaagagaactcaccagtgaagtcccagtggtaggagagcgtgcagcatattctgagcctgtatacacatctccagggcattgcttagcaggtggggagtggcaagagagtaggctggagtcacagaagggaggccaggtagaccttggtgagcactggactctatgttcaggtgctgaggagctggcaaaaggttttaagtcggggagaggcatgttcagatatttggtctagctgagtaactttgggtgctctgtgacaaatggttgggagaccagtgaggtggcagttgcggtcatctaggagcaggatcagagtggcctattgactgggatgactgtgaagtgggatcctttccagccagtaactggaaatgtgtatgagggcagaagtgagtgtactgcatttgaaacattgagaaatctagtacatagtactgtctcttttatatcttttttttttttttttttgattttggtttgtttgttcactaacttggaaaactgatgtggaaatgtccctttggcttcagttacctgagcagaaggggccgggcattgccaaactctcctcttaggacagaattgctcccagtattgatcattgtgttctgagttgggggagcaaattgtgcaggaggccaggtcagtgccaaggtgggtgggaggaattggagcaggaagcttgcctaagtgtgcccagcaaagccacggtagaactttctactgtggctctatgctacttcttagcaaccttctccatgtgcttcctggagagtccttggagtcagaacctttttcttgaaacccagacactttacttccaagaaaatgctgtccaagaaaactcatccttcccttcttctcatgaacgttgtgtagaggtgtgtcttctcttcctttgagcttttccactcagggtttaggggaggtgatattctatatttgggtttggctctgggtactgcaacactaggctattaagatttcatccttactgctttgcccctcctatctttccagaaacccacaatggatttgctagaaataatggaacgtcctgtttggacaggatataaccatttctcagctagaggatattgttggaatgaagaaagataaatggggagaagggaactcacattgctttggcacttaaattaagccatgtactgtgttgggaaattatttatattatctcgttgaatccacagtagaacacagttgaacaccatacaaggtaagtattgtcatccttattttaccatgaggaaattgatgcttagagagcataaagccttggccaggggcacatagttgggaagccggggctaattcatgcctgggctctttctgatagttttccttttttaattgtcccctcctcattgttaccttggggatttcaagagattcatgtagcttctaaatcaacgaactgattcctggagagcagcttctgtatgagaaaaatctagctaattatttatttcagtgtctctggaatgcaagctctgtcctgagccacttagaaaacaatttgggatgacaagcatgtgtctcacaatgctgctctggttgccagtgctgtgctgccagttgtcatctttgaacaaactgatgcagtgctggtttaactcttcctctttttggagtaagaaactttggaggcctgtgtccttctagaagtttgctgagcaaatggtaaggaaaagaaataggtcctaaggcttgactatttcagagaatttcttgatttattggactgtcaatgaatgaattggaatacatagtggtaggctgtcttttcttctcagacactgcaatttcctccaatctcttgacttttctagaagttttaatccaagtccttgttgggtggtagataaaagggtattgttctactagagactgaccttggcatggagatctcatttggactcacagatttctagtctagcgcttggttttgtatccatacctcgctactgcattcttagttccttctgctccttgttcctcatgcccagtgtcccaccctacccttgcccctactcctctagaggccacagtgattcactgagccatttcataagcacagctaggagagttcatggctaccaagtgccagcagggccgaattttcacctgtgtgtcctcccttccatttttcatcttctgccccctccccagctttaactttaatataactacttgggactattccagcattaaataagggtaactgctggatgggtggctgggatacacagaatgtagtatcccttgttcacgagaagaccttcttgccctagcatggcaaacagtcctccaaggaggcacctgtgacacccaacggagtaggggggcggtgtgttcaggtgcaggtggaacaaggccagaagtgtgcatatgtgctgaccatgggagcttgtttgtcggtttcacagttgatgccctgagcctgccatagcagacttgtttctccatgggatgctgttttctttccagagacacagcgctagggttgtcctcattacctgagagccaggtgtcggtagcattttcttggtgtttactcacactcatctaaggcacgttgtggttttccagattaggaaactgctttattgatggtgctttttttttttttttttgagacagagtctcgctctgtcgccatgctggagtgtagtggcacaatcttggctcactgcacctccgcctgccaggttcagcgattctcctgcctcagcctcccaagtagctgggactacaggtgcctgccaccatgcccagctaatttttgtatttttagtagagacggggtttcaccgtattggctaggatggtctcgatttcttgacctcgtgatccgcctgcctcggcctcccaaagtgctgggattataggcttgagccaccacgcctggccgatggtgctttttatcatttgaaggactcagttgtataacccactgaaaattagtatgtaaggaagttcagggaatagtataagtcactccaggcttgaggcaaaatttacaaatgctgctgactttgtatgtaaggggaggcattttcttagaaaagagaggtaggtctctgggattccagtatgccatttccatcctcagtgtttttggccacctgagagaggtctattttcagaaatgcattcttcattcccagatgataacatctatagaactaaaatgattaggaccataacacgtagctcctagcctgctgtcggaacacctcccgagtccctctttgtgggtgaacccagaggctgggagctggtgactcatgatccattgagaagcagtcatgatgcagagctgtgtgttggaggtctcagctgagagggctggattagcagtcctcattggtgtatggctttgcagcaataactgatggctgtttcccctcctgctttatctttcagttaatgaccagccacggcgtccctgctgtgagctctggccgctgccttccagggctcccgagccacacgctgggggtgctggctgagggaacatggcttgttggcctcagctgaggttgctgctgtggaagaacctcactttcagaagaagacaaacagtaagcttgggtttttcagcagcggggggttctctcattttttctttgtggttttgagttggggattggaggagggagggagggaaggaagctgtgttggttttcacacagggattgatggaatctggctcttatggacacagaactgtgtggtccggatatggcatgtggcttatcatagagggcagatttgcagccaggtagaaatagtagctttggtttgtgctactgcccaggcatgagttctgatccctaggacctggctccgaatcgcccctgagcaccccactttttccttttgctgcagccctgggagccacctggctctccaaaagcccctaatgggcccctgtatttctggaagctgtgggtgaagtgagttagtggccccactcttagagatcaatactgggtatcttggtgtcaatctggattctttccttcaggcctggaggaatataataactgagacttgttttatttctgcagagggttctaagccattcacttcccagatgggccaataatgctttgagtaatctggagatcatctttaatgcgcaggtgaatggaactcttccacagagggatgtgagggctgtagagcagagtgaactccctgaaactcagacgtcagctctttgtctctctatctctgaacacccttccttagagatcccatctctaggatgcatttctctgtagttagtttctaagtctcttgttcctgttctgcctttatttttttttcctggattctaagccagtatccccacttggctgtcttaatgtagcttaacatgtctgtaatcaaaatgatcatctttctgagattcaaagggctataagggactttggagagaatttcattcagttttcctcaaactagaataatgcttgcactgtctgtaaaagaacaaaagtgtcaaagcatccttttgttcactaaatttccttttttattatagtgttacttaaatattaggaagtaaaagtaggtataaacttcttataggctgttattatacaactatatgacccatacatatttacaaattaagtgcagccaaaattgcaaaatcaataccattcaaattaataccttaaatgtggtgaggcagctgttgttcaactgaaaccaaattataagttgcatggcagtaaatgctatcatgctgatcattttgagtttggccagtctatattatcatgtgctaatgattgaattctccacccatttttctacttgtatgaccttaatttgatggcacctgttccatcctcatgagtttgctacaattatactggtgccaacacaatcataaacacaaatataaacttgggctttgaaatcttgtgccagaacttggctttaaagtaagcatttaaaaaatccatatgtgtttattagactttgtttagatgactgttgaaatgaaaacaaagtgtttaaaatcctcttagagaacttaaatataatccctcagcaatatgtatacagatcttcctttgagaaaaactgattgtgttcagcctctcatgttacaaatggggaacctgaattctgaggtctctagtgagagaacagggactggaatctgtggatcctatctgttttaataataattgtaaagtataatagataatattatattaataaaataaaagcaaacacttagaatgagcttccatgtgtgaggcactaactgattaggcattattaactagatttattccttttaaggccccgcgatgtactgttatttccacatgttgtagctggggaacgtgctactcagagaggttaagtaacttgtctgaggtccacaccactaacaaggagcacaggtagggttcaaatccagataatctgactttggagctggcactctaactcaatgtgcctaatcgcttttcagtggtgtcattattttgcctattctccatctgagaatattgaagtttctgactccttccttgcctttctccctgcctcccgtggttatccccaggtcttggtgttccagtcctctatgtccgtccttactcttattcctttgctacagtgtgatccagggctcctgccccttcttatcctggtagagggggcccacttgctgggaaattgtctccgccatggtttatccatgttgtgtgtccattagtgagtagtgggaagaatcatatcatgttggcaatgaaaggggggctatggctctggggtagtctagtctgaacctcttattttacggatgagaaagctgaggtacaaagcagggaagggatttcttgaggtcacccagccagcaactgagctgcaaccagaagctgagatccccaggactagggccgagcctcattctgtcccatcacagtgacttttcttccctcctccaaactatttttattttttatttttttgcagctgcttagcagcttgaagttagaagaaagggcagggaaaaggttttccgtgcttagccagggaaggaatcctgcaacaggatgtggggttgggtcattcaaattgggccagactccactggtcttgttgcttcttgcttggtattgcagatgggtttaaaagtgttaggattagagagataggcaggtttagccaaaggcagtttgtagccttgtggcagagttctttttaaagaaggaagtgggatgcaacaccctgacacaaaggggcttaagttgttataccactgcctgctaacctgttttccttaactctcttcctgatttctaaaggaagtatattttgctgaatcagaaagaaaagtgatttatttcaggttgctgatgcttagattgttagagttggaaagatctggcttgcatcttgtacagctgacagaactggggctcaggggggcacaggtgcccagagttggtcagtcaggaaagtagcaccagaaccagtctcctggtggccctacagttgcagacccttttttgctttgctctctgtgtatactaaagcttctatgtctctgaatctcaagttctgactggtagctactttccaatccacctggcttagatttctagattatattgtttagacgtcagaacctcttaagggttttggggccacttgttagctcacatagtgagaaccagccctgcccattaggtaggggaagaagttagcagtccatgatagctgttgcctgcagcgtatggatgttcattgcacagttcctgtctcctgagatcctggagtgtatacgcttggcctcagagcccagcacagagcctggcccttgggacatgcttagtaagtatttactgaatgagtgggaaatgtcttaaggcccattagtttgcaggtcttgaggaggctcccttgcactaggaagaatagaaagcatacataaagcctgtgtgctgccgccaggaagactagaaacgctatgttcagcctggagctgaatggtataccccagagcaaccctgttgaaaggcagtgcttgccttttcattctgtgtcctggtttgctggtaactcctgggtcccctgcctctcctgtacccccattgtgcagactgaggggggaccatcagccagggttagttttccgctgtttctgttaggcaaagaataaattgaattgagttgtgaaagttgggtgcaaagctcagtttgggtccaaagtaacagttaacttgtgtgggtggcaggtattcagtacaaacagggctggggacaggaaggggaagagaacttcagagctttcacgatcctcatctggttttaggctgatccagaggccaaggtccccatggaacaaactggacaaagtgagggtggccacatggcctcttttcttttgcctttattattaattttctcaaatagatctgactagtcatgtggctgggaaaatagttaattgtgatttttttttttttaaactgagtctcactctattgcccaggctggagtgcagtggtatgatctcagctcgccgcaacctctgcctcccgggatcaagcaattgtcatgcctcagcctcccgggtagctgggattatgggcacacagcaccacgcctggctaatttttgtatttttagtagagacatggttttagcatgttggccaggctggtcttgaactcctgacctcaagtgatccacccacctcagccttccaatctgctgggattacaggcatgagccactgcacccagccagagtaccactatttgggcattctttaatgaaaaagaatgaactatccaaaaattaaaactcctcatttatgagcttttagagaattttacagagtagatggaaactctctgcatcctttccccacttctagtttcacctgacacatttcttccctgtccttactcctgggccggcagcagtggtcatgattccaatcccagcttggccaccatctgcctcagtggcctaggaaaactcctttctccagagctttagttttctcttctacggaatgaagaaagttaaaacaaatagacatttattgtttcatttggataaatatctattaagcatctattacttgtggtatggttagctgggtatatagtggtgaagcagctgggcatgagtactgctttcgtagagcttacagttcagtgaggccagcagatgtgaaacatatcatcacacaaataaaaatataactatcaactgtgatgaggattatgaaggaaaaaatccggcaaactatggtactggtgttagatactagcaggtgtgggtagggatttcatttagattgacaggttgtcacattaaagctgagagccctgaagttcaagcaatggttagccaggcaaagatcagaggcttagagatagggaaatccattccaggcagagagactgggggtgcctgtcccctaggtcagggaacagaagaaagccagtggcactggtggagtgaataagactggcgggggatgagttggtagtagacatgaccagatcatttagggccaattctcctggggaaggagaatttaatttaatatttatttatttatttatttatttatttatttatttatttatttttcaagacggagtctagttctgtcgcccaggctggagtgcagtggagcaatctcggctcactgcaacttttgcctcctggtttcaagcgattctcctgcctcagcctcctagtagctgggattacagacgcccaccaccatgcccagctaatttttgtatttttatagagatgcggtttcaccatattggccaggctggtctgaaactcctgaccttgtgatcctcctacctcggcttcccaaagtgctgggattacaggcgtgacccacagtgccccctgagaatttaattttattttatgtgcaagaggattccctgaggtagtcaggccacattgtctggtgactcttgggatagagggaacttgaatgacaaaggcccaagaaagcaattgtaatcattacatatacatggaccattttatgctgttttcttctttcatttaacattatttagtgtgcgtgttcacatatttctaaatcatcttctgatttagaataatgatttctgatgtgtaggctgtgttttatagttttgaaagtaatactttgatatccattactttcttgattctcacagcaattctgaggtgtatgcgttgcaatttctgtttcacagatgaagagagtattgttaataagttaatggccgggcatggtggctcacacctataattccagcactttgggagaccaaggtgggcggatcacttgaggccaggaatttgagaccagcctggtcaatgtggtgacacccatctctactaaaaatacaaaaattagccaggcgtggtagcacttgcctgtaatcccagctatttgggagggtgaggcaggagaatttgcttgaacctggcaggtggaagttgcagtgagccaagattgcaccactgtactcctgcctgggtgacagagcgagactctgtctcaaaaaataaaaagttgctaagaggagggctgggatcttttggctccaaatctactgtgggatgatgcctttgacattcctgatagctgtgcagtaatccattaacacagtttttataagttcaaaccctgttgccaacatttagattgttccatgtgtgctgttacaaataaattactataaagattctatacatttaatcttttattatttttgtattatttctgtaggccaaaatctgaggaacaggattactaggttgaagggaaatggcccttgaagtgtctgatcagatgtctttccagaggatccaaccaatttaaatagccaccatcaatgcatgagactttgtagttcagggaaggcaggcctggttttaaaaatcatttcccctctctagcatttttctgatgtgatccttaagatttcactttagttttcccaggtctcattggcatgtatgctgttagggatgggtctaaaattaatttttcttcacattcatatcatgtcatcccagtgattatttaataaataatcacttgattaaatagtgattccttttctagttatttttgggacatttattaaaacctggatatggtggctcatgcctgtattcccagcactttgggaggctgaggtggggggattgcttgagactaggagttcaacaccagcctgggcagcatagcaagactccatctctataaaaataaggaaattagtcaggcatggtggtacttgcctggagtcccagctacttggaaggctgaggtaggagaattgcttgagtccaggtggtcaaggctgcagtgagctatgaccatactactgtactccagcctgggcaacagagtgaaactctgtctgaaaaaaaaaaaaaaaaaaaaaaaaaaaaaaaaaaaaaagatgtgtagggagcaattttggagttattcatttggtcatttgatatgtagttttagttttggtgctgatagagcccagaatgtaccctgaatttgatgaacattctgatatatgggggagctcattgtcccccacttacctttttgcctctcagaatatcttttgatatttttatctgttttttccccattgaatgttattaccttatcaagctcaaaaaagtaccctatcgctattttaagttcagttgtgttaaatctataaattagcttgggaaatttggatattaaatgaactcatgaagaagcagagtttagctctccttaattctcatcttcctttatttatcctactacagttctgtggttttcttttatgtaagaagcacatgtttggctaagttaatgcctaggtttttttgtttatgtgtccattctcactgtggatagtattctcttttccccacattatattaatttaactggttttcagagactaatagcaatgctattatttaggagaatttaccttggttctgattaacttacccatacttgcaaatcatttgcagctttttagttaactttgtgagttctcttagatttacgaccatgccagaaacagaaaggatattttcatctcttcctttctgatgtttattcttcttgtttcctttttttatcccccattatattctcaagaatctctcaatactaagaaatagcgacttcatttttcagcgcggagtgcattattttggctaccatgattcagaagcctcttgcctaaggcccaattttattctgctagttttctctgttctttgtacatggcccttgcgctgccctaaccttgaattaacgtggctaaatctcaagaatttaagagcaccgtgactgtgtcctcaggctagggagggaaatgggttcacagagtgactggattgtggtctatgaacttcggcagccagcagcaaaagtcaggcatgaataatcaagtggacagtgaacatctgtagtgtgggagatgttggcataactatgaatgatgattcaagagtggtttgatgcatattgaataacatgatgataagtactagactctgtgctaagccttctatgtgaaatacatttaattctcataataactctagagcagtggttctcgaccggggccggttatccccctaccccaccccaccctcacccttccaccagggacataacatctggagatatttttggttgtcacaatcctgggaatgtatgtgctgatatttagaggttgaggtcagggatgctgctgaacttcgtagaattcataggagagtctctcacaacacctatctggccccaaatgtcagtagggtcactatcaagaaaatctgctctagcagtgcctgctcatattatccccatgttgaaatagcaagatgggaagtgcaaagtggtgcttcggtactcttggagcagctttgactttggtgagaaacgccttttaaaaacaatgtttcttcccatcttcccaccccatggggaggtgtggggttgggtgggtaggcaccaaagcaagatttagaagagttttctgtaggaatttataatggtaaaggatcaacttcatttccaagctatttatgagggtttatgtttaggaaaagtgctaagcttagagaaggaggagaaatctgattttattaatgagtgtagccataatggcatatcctggcagaagtcaactttggtttctagagggaggctattatgaaaagaaatacctggaacattcccctgggtttggaaggtgagttctaggttcaatgatgggaagaattttagaggtccaagataaaagggcaaagattaaattttgtctctcatgagttctctggctcaggtggtgtgaactttgcagacagtctctttaattcactcatacatgctagtctcccagctcagcaagggctttgagagagcaggtgtctgtatgctctggtaagtgaaggcaaagtgcataaggaggttggggtccataatggcgaagagaaggagcccttcagtcagagtggctttgaatcttggctctgccatttgccaatcttggaccattgggcagtgtattaactctttgaatctcagcttcctcttctgtaaaatgtgtataacaagagtactaattggattgtttgatgattaaatgagttaatgtgtataaagcactcacaaccctggtacatagtaagacctttcattattattatcatcatcaattttttttaacctcttttcctgatctgcttacactcaccagcttcagctgctccaaatggcttgtaagattttttgtttgccctttgctgtcagttgccatggggaagatccattcatttttttcagtcaaccaacatattttgagcatctgctgccctacaggatcctagatatgggggctgcagagatatccaggaacataagccttgattaattgggtcagatcagtgctcagcagggctggcaagtgctaggtttcttttaagtggcatatcttaaaaggtatatgtcctaaacatagctttgtgatggcagcatgatgggtacaaaagcacacacttaagtgtcagtagatctgggttcaaacattggtgcagtttcttatggctcgtaacttgttcaaacctcagtttcttcacttctaaaacggtaatgatacaacctacctcacagggttattatgaattaaatactggagatgagatacacaaaacgtcttgagtacacagtagctgcccaatattggctgtaagtattataaatctacaagctgtgaattaattttacctctctggatcctgttgatatttctagaccattccacctagtggggccatttcctacctgagtcacccgtggtgtcaaatagaatgtcatgtggcctcctgagttgggtagaattggctgctcatctcaaccccgctactgactatctctgtgatttacccttcctccagccttagccttgctacatataaaatcaagacaataatgtttcctatctcacagggttgtcctgaggattaaattaagtaattaatataaaatgtgccttgtacatattgggccctaaataaacagtagctactatttatccttaaagtacaaatggtagtttcagagcttcaaggctgatggctatttatcttactcatactctttgtttagcttcatttttttcccctaatttcattagtattttcttttctttttttttttttttttttttttttttttttgaggtgaagtctcactctgttgcccaggctggagtgcaatggagcgatcttggctcaccccaacctctgtctcctgggttcaaacagttctcctgcctcagcctcccgagtagctgggattacaggctcccgccaccatgcccagctatttttttgtattttcagtagagatggggtttcacccttttgaccaggctggtcttgaactcctgacctcatgatcaacccacctcagcctcccaaagtgctgggattacaggtgtgagccaccacgcccggcctcataagtattttctaaatttatttacagtcatgccatttaaaaggaaagttgtattcctgtctttgttaatatttataagtgattttattcagctacaagcttggaatggcatataattttgtattctgcttttttcacttaatattacatggctaatgatttctgtgtttcataaacattattctgatgatggcatgatatattgttgagtacatgtaccataattgaatcatttccctattgctatgcaattaagttgtttccaatattttgcaattataatgtttcaatgaatgaataactttatgcatatagctttttgatatcttaagttcagtttcctaggatgaatttccaggaatagtaattgggcaaatgggataaacatgactcttgaatacgtattgttaacattgctttcccaaagggctcaactgatttatatttccgtgttcattatcttttaaaccagctcatttactcaccaaacatttttaaagccattatcatgtggtaggcttagtaagaagaaagtgaccctaagggagaagcttatatataaatagggtccctggtgtaccaagtgctgatacagacacaaagtacctggggaaattgagatgagggagtcctggctcagctgggagaaaagttcattttcatagagtcatggttttgttctttggcagaaagaaaattgctttcttccccacccccacccccagctttattgaggtataattgacaaataaaaattgtatatctttaagatatgcaatgtgatatatatgtatatctcaacttaaaaaataagctacagaataaaaaggtgtttgctattaaaaaaaaagaaaaggctgaatgtcattcccaagcttggaaatttgagtatgttgcctctttgggattatttacagaaatattagcaagaccagccccatctttggtcttgagtactccactgtcagcatgctttcttccagagagggatccatttgcctttatttttcattctgttgtgccgtctatgcaaactattcttgatagttttatggtaacagtgtttttttgttccatgagataatttatacatgctcattgtggaaaatttagaaaagacaggaaagtattaaaaacatcactttttttttttttttttttttttttttttttaagagacagagtcttgctctgtcgcccaggccggagtgcagtggcgtgatctcagctcacagcaacctccgcttcccaggtttaagtgattctcctgcctcagcctcccaagtagctgggagtacaggcatgcaccaccacgcccggctaattttgtatttttagtagagatggggtttcaccatgttggccaggctggtctcaaactcctgacctcaggtgatccgcctgccttggcctcgcaaagttctgggattataggcaggagccactgcgccagccacacctacgttcttatcatcctagtacatccactgtcattatcttgctgtatttccttctgcccagtctcactctgatcatgcagtggcgtgatcatgcagtgatctcggctcactgcaacctaggccttctgggttcgagtgattctcctgccttagcctcctgggttcaagtgattctcttgccttggcctcccaagtagctgggattacaggcatacacccccatgcccatctaatttttgtatttttagtagacacagcgtttcactaaaattttgtatttttagtagagatggggtttcaccatgttggccaggctggtctccaactcctgacctcaggtgatccgcctgccttggcctcacaaagtgattacaggcatgagccactgcatccatcgccaaaaagattttttaaaagagtttaatgtagaaccatatcaaaggtctttggaaataaaaaacagttttttaaaaatatcagaaataaaacaacaaataaataaataaataaaaacacccaaaacaatctgaagcacgagcacctagcagaaaggttcaattatgatctattcatagagtggaatatcaagtagacattacaggacatgttttaagattatattttatgtcatgggaaatgctctcccagtatgatgttaaatgaaaaaacagaatacaaaagtatatatgctgcatagtctcaatattgtagagaaaaaatattatttatgtatgcatgaaaaaagacaaaagatgttaacagagatccattgttacttcagtttactagggattgtctctgggaggtaggattaaggtgatttatatttacctttttaaacttttctgtatttttttattttcaaattttccataaaaatataaggacttgaagatcaagaaaaaatttctgctttggctcagtgcagtggctcacgcctgtaatcccaacactttgggagccctaggggagaggatcacttgaacccaagagtttgacgttccagtgagctatgatctccggatccgaccgcctggacgatggagcaagaccctgtctcaaaaaaaaaaatctttgctttttttttttgtttgtttttgagacggagtctctctctgttgccccagctggagtacagtggcacaatctcagctcaccgcaacctctgcctcctgggttcaagcgattctcttgcctcagcctcccaagtacctgggattccatgcacccaccactatgcccagctacttttttgtattttcagtagagacagggtttcaccatgttggccaggctggtctcgaattcctgacctcagctgatccaccggccttggcctcccaaagtgctgggattacaggcatgagccactgtgcccagcccaatcttttgctttttttaaaaaaagaagacaaaaagggattttataccagtattatcttggctgtgtgactctgaagccacagttgtaagttataattactctgaaacacaaggccctgtgactcttttgggctctttggtgtttatcttgattacaacgttggaatatagaaatgaaaggaatgggagaggtgatagacttcaggcagtgtaactagttgtctgaacactactggctcaattatattgtgtctagtgatttccatcttgtccgtctgctaatttatcgcctggtaactcactgaggcagggttttcctttggagaaacctcattgttttaaccagtgtatcatgcttgtttagaagttcaatgatctttttaactcatcggagaagatgatgaccagacctggacagatggggaaggactttgcactctctctttacagtcctgagtgcacacaggtcaatatggaactatgtgtgaattttcattgtctttgagagccctcttctctgccccatagggagcagctttgtgtgcaattagaggagcaagggttgtgtgtatttagcacagcaggttggcctggtcctctcctctcaacatagtcaccacatacctggcactatgctaaggctgggaatgcagacagatgggtgcctgctttcagagtgctcaatgtgctgaggaagccagcaacagaaacagatgatttcaggagctccaggaaaatgctacaggaggagtgtgcctgggttactggagtagcacaggaggagggcttctagctcaggctgagattttagtaaaggaaattatgccacgatgaatcctgaagaatgaatagaagtgaaccagataaagcacgataggaagcatcttcccttacctaagggaagacacagaggtatatggaatggtatgttaaaaggttgggactccaaacagttctgttaaagcttagagagtggtgggagagactggagaagttgattaattagtaaatgaagttgtctgtggatttcccagatcccagtggcattggatatccatattatttttaaatttacagtgttctatcttatttcccactcagtgtcagctgctgctggaagtggcctggcctctatttatcttcctgatcctgatctctgttcggctgagctacccaccctatgaacaacatgaatgtaagtaactgtggatgttgcctgagactcaccaatggcagggaaaatccaggcaattaacgtgggctaaattggacttttccaaagatgctgtctttgggaaacatcacacatgctttggatcagaaaacctaggcttctaatttgttgataaggcatgaactcaggagactgttttcagtcctagtgaatggtgataattgtaattataacagtagacaacatctcttttacacattttaaatcatgaaaatagaataaccgtactgataattttagaaagtggtgattaaaagcacatttaagataatgccttaacacctagtcttttccatatgcatgatgtcttaatcacacattgcaaatcatggaacacagaattttaagcagcatttgtgtagaacttctcagttttactaatattattttattttattctcataacaaccttgaatagaactcagatcatctgtcaatcatgtattttgataacagcctttacagtgagcatagaaaatacagtagtggctaacaacacaggctccagatgtcaggttatctgggtatgaattctggtgtcagcattcactaagcatatgaccttggacaagtgatttaagtttcttttaaacagagaatagtaatacctacctcatattattattgtcagtgtatcatcttacaatcacagtctttctcttagggctgggctcagtgggtggattgacactgcagaaatggccagatctaaaggatcaacatttacgtagctgggaaatgtagctgggacttcagtttcactgccctagtgatttttcctaccactaagcagctcagtccatacccctacgagacccacaagcttatgagatactgttcttccaggaaagcagtggggccagggccaccttttaattgtgtttcttggcctggtcccatctttctcacaatatatagcaacagttatttacttgctgattttctaatgcacatcacacatagtcatattaaacacacacacacacacacacacacacacacacccctcaagaaacattttctgagacgtgatttcctgatttcatcaaaaaagaaaagagcgggccaggcacagtgggaagtcaaggtgggtggatcacttgaggtcaggagtttgaaaccagcctggccaacacggtggaacctcgtctctactaaaaatacaaaaattagccaggcgtggtggcgcacacctgtaatcccagctactggggaggctgaggcaggagaattgcttcaacctgcgaggctgaggttgcagtgagccgagattgcgccattgcactccagcctgggcaacagagtgagactctgtctcaaaaaaaaaaaaaaaaaaaaaagcataaactgaaatttatatgcaatttatatgcctgtgagataattctgttttctcttttggaaccccaaagagatttttttgattgatgagcaaatacattttagattttatttaagcattatgccaagcaccactgaagtataagtttcaagggcaaactcagttttttcatctactagacgaatgattttctggaatgattacaagcaggcaagatggtgtagtggaaatagcaaatgtcttcggcatcagacaagttggggtttgtttgtatcctgcctctgcccttcaccgaggttgtgatcttgggcagattgttgagttttaacctagattcctctgactccagatcataaattttcagaaaagttctgaaattcttgtatatactgatggtaaatgagacttttccttacatctatgcacttctttgtttgtttgttttgagatggtcttgctctgttgcccagactggagtgcagtagtgcaatctccgctcactacaatgtctgcctcccaggttccagtgagcctcctgcctcagcctcccaaatagctgagactacaggcatgtgccaccacgtccggctaatttttgtatttttagtagagacagggttttgccatgttgaccacactggtctcgaactcctggcctcaggtgattcgcccgcctcagcctcccaaagtgctgggattacaggcatgagccaccatgcccggccatatccatgcacttcttgcaaccttaccttcttttctcatcaccctccagggacctagttggaagagcagagttaaaagttaaggtgaaacttggagaggtgtcttgtccctaggaacaaaggactggtttgaaattctctgtaaatcttccccagttcaaaccagagttatcaaggtcttaaaaacttccctgggtcctgagagcccattatattatttacttgtcttcctgtacacccactgcctagtcctgatcctacttttgtttgcaaataggatggggcacaacgtacaaggaagggcctttgccacccctgctaagggataacctgaaataccttcaccatcactgccctgtgctgcttttcacctatgccagtctgtctacagtgccagtgtcttctggcattgaaaggggagaatcttttggtcctttgagtatttggttgggttacataaatctccctgaatgaagagcagctgacttaggcaaggggccttgtttggttttccttgaactattaacaggaagatagggagattaactgtgtaaatgttcaataggccagagtccctgcagagggtggccacagtgatcagatcttatcacatccttgctttgggtgttgcctctctggttggagtatggatagaaaagaaagaaagaccctatattgaaatgcaaagtgcagcaagtcctgactttggattaacttctcagcccatttgcatgaaaataaaaagatgaataaaacaaggttcccactttggagggaggtggtagctgtgagatggaaggagtgttcctgctgggcaacagcagagtaagtgctggggtagattcactcccacagtgcctggaaaatcctcataggctcatttgttgagtctttgtcctacaccaggcactctgcaaaaacgctttgcctgcaaggtctcatgcgatgctcaccacagctctgtgaagttaattgtacttttatcaccattttacagatgagaaaactgagggtatggggtcaatgacttggctaaagtcactgcttagcaagctgcagggactggatgtgaattccaattggtttgactccaaagcctgtgaagctacttgttcttcaccacctagagctgtggttcttgataactgtgaactcttttggggtcacaaatagccctgagaatatgatagaagcaggagctctggcctttctgtccatacctgaacaggtccttgggttaagagcccctcgtccagggcctattaatcttgatcctcataagcagcatccatgtattacggccgcaaaccaaactgtgccagaccgaatcctaggaccaagcccaaatatgtcccatcatccttttggtaagaagctcattgtaagaaagaaagaggagagcaagaggatgacctagtgcatggggcctcattgttttaattagtgacaaaacaacaataataacaacaaaacccccgaagcttcacagatgacatcagaccccaagcctgtgtgtttttcaggtgcccttgaggagctttgtagctggcagaggaggtgaaactgacaaatgtttggcagatggaggagagtaccagaggggtttgagatgagctaaattccaatctaaccgcaggtgtgaggaagaggcttggattgggaccatggagatgggggttctactcccagtcacgccagctgactttgcgagtgttctttgtcagtcactttatcttattttatttatttttatttttttgaaatggagtttcgctcttgtcgcccaggctggagtgaaatggcgcgatcttggctcactgcaacctccccctcctgagttcaagcgattctcctgcctcagcctccagagtacctgggattacaggcgcctgccaccaagcccatcgaatttttgtatgcttagtagagacagggtttcgccatgttggccagggtggtcttgaactcctgacctcaggtgatccgcccaccttggcctcccaaagtgctgggattacaggcgcgagccactgtgcccagcccacttcatcttaccgtagttacctccttagagtatgaaaaaataggcttagggcatccccaagtcccctctatgtctgagagctgaggctggctgtcaaagaggaactaaggatgccagggactttctgcttaggacccctctcatcacttctccaacgctggtatcatgaaccccattctacagatgatgtccactagattaagaatggcatgtgaggccaagtttccacctgagagtcagttttattcagaagagacaggtctctgggatgtggggaatgggacggacagacttggcatgaagcattgtataaatggagcctcaaaatcgcttcagggaattaatgtttctccctgtgtttttctactcctcgatttcaacaggccattttccaaataaagccatgccctctgcaggaacacttccttgggttcaggggattatctgtaatgccaacaacccctgtttccgttacccgactcctggggaggctcccggagttgttggaaactttaacaaatccatgtaagtatcagatcaggttttctttccaaacttgtcagttaatccttttccttcctttcttgtcctctggagaattttgaatggctggatttaagtgaagttgtttttgtaaatgcttgtgtgatagagtctgcagaatgagggaagggagaattttggagaatttggggtatttggggtatccatcacctcgagtatttatcatttctgtatgttgtgaacatttcaagtcctgtctgctagctattttggaatatactatatgttgttaatgatatcatgcagcagacgtgcatctgaatgggctggctctaggagctagagggtaggggctggcacaaagatgcatgctggaagggtccttgcccataagaagctgacagccaaggctaggggagttctgtcttctctgcatcaggtcacctctctcacctctgtcactgccccatcagactacaatgtctgcaggtctttctcccctgagtgtgagctccctgagcaaagcaggatgctgccccttccctttgtattcctggctcctggcttcagtgcctggacataagtatgggcataataagtgtcccccaaatgagacattgaggattcttcaaatgcacaggaccgtgatgtgagttaggacggagtaaggacgatgggatgtggctcaggacaatcctgaggaagctgcagctgcggcacgcagggccacactgtcatgttcatggaccctagactggctttgtagcctccatgggccccttccatacacaaatattaaaaattatatttcatgactgcattggtataaagatgaatataatccagaccagattcatgattattcatacatttttagtgtattaacttttaattctgcttttaaaataaattaaaacattctaatatgcccttaagagtatcccaggcccaggccactgagcctactgtggttcatggataagttggccctgggggcatgtgtgtgcatgcatgtgtgtgcacatgcatgatgagccgggccttgaagggtggtaagatttgggtgtgtagaccaatggagaaaggcatttggggcagtgatgatgggtgggggagggaacatggtgatgaatggagctgggtgtggggagccatgggagtgggttagggccagcctgtggaggacctgggagccaggctgagttctatgcacttggcagtcacttctgtaaagcagcagaggcagttggcctagctaaagcctttcgccttttcttgcaccctttacagtgtggctcgcctgttctcagatgctcggaggcttcttttatacagccagaaagacaccagcatgaaggacatgcgcaaagttctgagaacattacagcagatcaagaaatccagctcaagtaagtaaaaaccttctctgcatccgtttataattggaaattgacctgcaccagggaaagagagtagcccaggtgtctggggcttgttcccattagatcttccccaaggggtttttctccttggtggctggcctgtggggcccctctccaggaggcattggtgaagaaactaggggagctggttgccacagacagtgatgtactaatcttctctgggaagacagaagaaaagtccccagggaagaatactacagacttggccttagggacagctaggggtgcagattgctgccaactgcattttttctgaagttggccatatggttgcagtgaatggatttatagacagagtatttctgtgcatataagagcaattacagttgtaagttgatatggataagtgaaagttaagcacttctttctaaaaagagaatgcaattcattttcccctaatcatttcaattagtctgatgggcatttgaacttgttgtctttaaaaagtgaaatctttacctctgatctggtaagtatccaggcaatttcttgtgtgccacccaggaggtatctggggagtgggcattttctgactgaggcattggctgccatagcatcagagcagccttccaggcagtggcctggcaaggggacagaggctggtgggagcagctggctgagtgcagccagtaatggcatgtgcatggtctgtagagaatgtagaagcaataatgaagccgataaaagctggtctgcattttattattatcatgcgccggtggttctaaacaatgtcagtgataaattactcctccccatcatggaccaatggctgccactgctccagggaagtgctttttattccgtttggtgtttagggagggatggagttggctggcctttgctgaaaggcctaccagtttgttttctatttggcaaaagaagaaatgataaagttctagagtttaaaccagactcagatttgagtttttttttttttttttttttttttttttttttttaaggctacagaactgtgctttccttgggcagtaaaagaggcaatgggcaatgtgggacctgatgacaaagggaagcaaagctgtcttaggggtggcatggaggaggtgctgcttcacagcagagagaggtatggctgtgcttggagtgtccacttagacaactcctggctgtgcagccaggccatcgagatgctgtttccttgacctgcaggtcctggtcttgcacatggatgtttcttctggtgcaggagacagaaaggtagcaacaacccctgatcaaagcctcagtccttccttatttactggagagcccctgctgattgaccagaggcacagctggggatatttcctttacctctgtagcaagagacagcgtggtgcagaggaaagtgctagcatacattaccctgtggctgcatgactttgtgaataggttagttagcaccctttcagccacttcttcttacctgttaatgagaaaaaacatgtaattgcttaaaaacagtatttggcacataggaagcacttaagtgaatatgaattatgatttttttttggagtgggggacaatctaaaccaaagcccatttaaccccctcaagccctaacttttccttcaacctattaaaaataggccagcttaactttggaaatgggaaaacctaattaaaaccccaaatggtaggaattcctgggcaccaataagtaaaattccccatnnnnnnnnnnnnnnnnnnnntagcagctaacttgaaatgtaaactataaaacctaatgtagtatctggcacatagtagattcccaataaatgagagccagtattctttctaagacagtgatgcatttctgagcacctggccttgttcttctgccttgcaatttatgcagcagttgaaatagactggctgatgggggtaagttgtcaagcagactttctgatcttagtggaggagactgccttaaaacaacactaatttcctttttcttttcttttcttttcttttaagacagagcctcgctctgtcaccaggctggagtgcagtggcgcagtcttggctcactgcagcctctgcctcctgggttcaagcgattctcctgcctcagcctcctgagtagctgggactataggcatgctccaccatgcccaactaatttttgtatttttagtagagatgagatttcaccatgttggccaggatggtctcgatctcctaacctcgtgatctgcccgcctaggccttccaaagtgctgggattacaggcatgagccaccatgcctggccttctttgagaagctggagacatgagttaagtggtgaagaagccaaatctgtatctaaaaaccctacagtagtgtgcagagctctgaggagagaaggtcccttagattttgagtgtattattatgtcagtgcttgttttacatctctctgttcacgcagtatgtccccttttctgccttgcagctgtttcttaaattctttctttctttgcttgtcttgcagcacaaaacaggcttcagtatagggggaaatgcacagaaacactgccttttcctacaggaaatcagtaactttttactgattttgtttttatttacttattttatttgtttaaatttatttttagttttttttttttttagagacagggtctctttctgttacccaagctagagtgcagtggtgcccttagagctcactgagctcactgcagcctcgaattcctgggctcaagtgatcctcctgccttagcctcccgaagggctgggatgacaggcatgagccactgcacctggccaactttttgctgattgcgaatagcactcttgtcaatttcggagagaagctgagactggcatatgtcagtatggatccccacttagagacctgtgtttatctgcactgacaccccatcacagcatgatgagcttggccctcctgtgctgtctctcccagggctgggaggatccttgaagctgatctggtttggagctttgtcctcattcacctcctttaccacacacccaccttcccagggcggggatctaccactcactaagtagcccattctgggtgttgacagctctaattgttagaaaatattcaccaccctgttatgctttctagagaacaagtctaattctgttttccttgaaatagtcgaagacagctctcatgtttttctttccctgttttcccaaagtccatgattttttaggcaaaatggcctcctttcctcttatggaatgtttttcctccccatttctgcctctcctctggttgtgtttcagtatgtctgtgtgcttcttgaagtttactggaaattatgaaagtattctggcacagaggaggaagggatttttgcctcccttgttctgagtgctacatttccgttaatgcagtctgagattgtattaggcattttggcattcacgtcaccttgttgactcatattccatgtgcactcaaacaaaattgtgattattttaaataggcagaattgcaagttacgtgttctccatttctttgttgtattgttggctttttgaactaaagggaaaaatgtcttttttctgttttacatgtttagattccctatgctatcctatcctcccaaaaccattttagattctgattttgccatgtattatatctgatactcctttctcgtcatctagagatgtgataaacaactctctttggcctcattccagtcatcgataactgtgggacaaagacttgaagcttggatcagtccagtggagactaaccacccctgtagacccttttttcctcaactataaaatagcagctaacttgaaatgtaaactataaaacctaatgtagtatctggcacatagtagattcccaataaatgagagccagtattcttctaagacagtgatgcatttctgagcacctggccttgttcttctgccttgcaatttatgcagcagttgaaatagactggctgatgggggtaagttgtcaagcagactttctgatcttagtggaggagactgccttaaaacaccactaatttcctttttcttttcttttctttcttttttttttttaagacagagcctcgctctgtcaccaggctggagtgcagtggcgcaatcttggctcactgcagcctctgcctcctgggttcaagtgattcttgattctgtagacactaccactcaggcctatattgtaatcagtgctgggccactgggctcctgcttctgtgatccagttgggaagtttatcttgttcttcccttcagcttgcatctgctaaattcgctggactatacacaggtgatttgtagatatggggatctctactcaaatactctcatgatttccttggctagagcatcattttatttccacttattggaagagaccttagagaccagttagttcatttatagataaattagttgattctgtcattcaacccttatatattgagcgtctcctatatgcgaatcactgttctaagtgccgagacacagaggtgtccaaaacaaatatggcccctctccatatggaatttctattctagagaagaatctgacccagaagggggaagtgactgtcccaagtctacacaaccacagaagggatattctgggaataaatcacggctaaacccccctgctgctccaggcagttctccttctacagtgctctattgtgctgttttaataatctttcaactgggaagaactcccatttcaggaattaagccgtggacaaatcttttaattatccttgaaatcatcctaataagaaatccaaggaggaagtcttacagggtgcctcacccacttttctcatcactggaactttttagacattttattattttcttcctaaaccagagtacaggcacacaagttgagtggtgtggtggctaaattaattaatgtttgcaaggcagtgtgagaagcattcattcatcttaaatacctatggtgactgcaactcagatgtaaaaattggataaatcctcagaaaccctagggaaagtgacatgtctgtattttgtctctgtgagatacagactggcagagataagtgtttctctgggtgagttttgtgtggtatctgggatgattttaggcagtacgtggatgagaacttttaattttaacccacatccaattgcaatttcatggaaattattgcttaggaggatgttcaacaggaaaaatataattaaagttaattcaaaagaaacattttctgtgaatatggtaaaacttgtgagagtagtttgtaaatgattgaagattggaaaacattggtataagagtgagtgtggggttttgtattaagattcattttgggaagaaatccatgctgcatccctcatgaagtgtgaactttgggcatgtgttgattctttctggcccagagtttacctgaagattagctgccctgagggtcactgagcattaaattagatgatgtctgtggatgactgatagtgaagctcatagcccacagttgacacataataaattcgagttgctttgcttccccttctgttcctggctgactgtttggcctttgccacttgttcggcctctctgggccttaagtttctttgccttgaaattggaactttctttggtgaaacaaccagaaaatgcttcagcccagaaacttggtcagtacttggatgggggatcacctgggactacccaaggatgtgggctgtctgctagactatagccccttgagggcaaggtgggcgccttgctcatggttccatcctaagccccagcacagtagtgggtgcatggtgagccattagtgaatctttgtggaatgaaggtgggagaaaataaaatacctgtacttcacagggtattgtgagggtcaagtaaaagtgctttaaaaaattgtattatatagtttattcccttgtgttagcccaggtcaacagagcctacgaataataatgatgacagaagttcttcaaaaagtcttggccttctttctttcacaaaattgccccccagagctttctggaagggcagccatgaacccagaggcctaaagtagatttactgggaagctaaaaatatttactttatttttcatagctcctttcaaggtcctctctgggggtcttagcaatatgtttacacagtggtatgtttttgtaaggtttgcaaaagtaagattttttaaaaatactatcttgttttaaaaagagagccccctaccaacttgtgtcagcctcaggcccccacctgcatctgctcctgccagggcatggtggggcaagaagcactgctccccttccaaagcttccttccttgccctggagtcatcctcactccccactccaagccacctgccatcgctgtgccccctctctggtgaatctggcattcttaggtgggctgagaagcagactggcccaagctaaggcctttctgatggggttgttgctgctgagaatcatgactgggtgggagaaggaggtgaccctttgctgtcttatttttactgtgtatttccttttcagctacttaaaatgtattgcttagtgatacctaatgggttcattagcctgcttcctactgaacatttccgctcaggcatccacttggtcccaaggcctgctcctctcccatattctgaaatctggactacagactctcattcaactccaggttgcactgtggacacagtcccctcttgagcaggtacctccttgcagtggttgggacgtcctacttggctcatagttgggaagtgcatatgctggagctgaagcctcttgccttcccgggatagggcgtcctcacatcccctctgagaagttccccagcttccctctgttccccgtttccacacttagcgaggctcttgtccactgctacatcccccatagccagtccctcagccttgccattgcttatgctggtctggaaacaattcctagacttgtggggcatctggggaagttctccatctttttttagctggcatgacccaagtggtgtgggcagggctgtggattctatggtgtggctggaagccaggtagcctctctctactgtacatggaactcagcaacttctgagtcaagcaagatcttagctctgcaggtgtcttgccctgtccaaagttatggccacaccagtaccttttaactctagaagcccagtaagtgttttgtgggaccgcaaagatcattttctagacctgctgaatatgcctagaacgggtagggatggctttcacgctgttcctagggctgacaagtcacacgtttctgggggtacatacacaccgcggtccctgtgaatggcactctccatgagaactgtgatgatttgagttgaatagtgcacagcctacatggttctctgccatggcctggagttccttatcttgccttctccagtgaggactagggctgcaactggcctactttggctcctgacttgggggattctgaaataccttttttttttaaggttgtggagctctctgaagcttataaggattttgccaggaaaagataagaaatatctttgggcattttgtcactgtgctggagatgaaccctttggaggacatatcaccttgttgaggtcaaggggcggaaagggacaggactggcagagagatccggggcagcagcctgccatcccgactgagtatggagtttctctctcccttcagctgcacttttgtgtggagtcagtggctcagctgccacttcccttatgttcatggcatgaatctggcttgttaggcctttcttttttttttttttttttgagatggagtctcactctgttgcccaggatggagtgcatggagtgtagtggtgtgatctcggctcactgcgaccaccgcctcctggattcaagcgattctcctgcctcagcctcctgagaagctgggattacaggcgcatgccacaacaccctgctaattttttaatttttatttatttattttttttcaaggcagaagaatttttcttagtacagaacaaaatggaatctcctatgtctacttctttctacacagacacagcaacaatctgatttctctatcttttccccacatttcccccttttctattcgacaaaactgccattgtcatcatggcccattctcaatgagctgctgggtacacctcccagatggggcggcggccgggtagaggggctcctcacttcccagaaggggcggccgggcagaggcgccccccacctcccggacggggcggctggccgggcgggggctgccccccacctccctcccggacggggtggctggccgggcgggggctggcccccacctccctcccggacggggcggctggccgggcgggggctgccccccacctccctcccggacggggcggctggctgccctgctaatttttgtattttcagtagagatggggttttaccatgttggtcaggctggtctcgaactcctgacctgttgatccacctgcctcagcctcccaaagtgttgagattacaggcatgagccactgcgcccggctctgtttttttgtttgtttgtttgtttttgtttttgttttgagacggagtcttactctgttgcccaggctggagtgagtggagcggcacgatcttggttcactgcaacctctgcctcccgggttcaaacaattcttcctgcctcagcctcccgaatagctgggattacaggcacttaccaccaggcctggctaatttttgtattttttagtagagacggggttttgccatgttggccatttgaactcctgaccatctttgaactcctgaccatgtttgccatgttgaactcttgacttcaggtgcgttggcctcccaaagtgctgggattacaggtgtgagccaccatgcccagcctgtttggcctttctgatatggctctgactaatctttttggaaattagtccccagggttatactggattttacttagggaaaagggtcatgcctctctggctgtcagatttactgatagtactaaggactcagtggggtggacctttgattctggtttgatttttgaaaatcaaaaagacgtgagctccagggagcagggtggctttggtgacatggcaagatagttggctgtggcagggagttgagggaagtgggtagaaaattaacatcttgtaaatattccctgggaaatataccttcgtgttaagagaacagacttggcagccagatggcctaggttcaaatcttggcttgatgcttatcagctgtgtaaccttggataattccatacatctctgtgcctcagtttcctcaaatggaataacaatagtacctccctcaggactattgtggcaaattaatggacgaataaggggaagcacttagtacagtgcctggcccagcataggtaccaggcttgttcttaagctcactgcatttttacaatcatcataaaatgcaggggatacacacatgaaggagccgaagttcagagaggccaagtaacttgcctaagaaagcacagctggcaaggggcagtaataggaccagaattccagtttctcgtgctctgttgttgttatatcctaaagagagcagctctgagtagccagaagcttccctaaagtcacaggacatggggcatgggctggctgggatgagaaaggagacaagagggcttctgaaagaaatgccagattcactccacttcctggcttcaggcaccgatggaatgtttcccaaggcccatctagaaagaacatcctgtgactcacagccacttctcattttctgtctgaaccccctcacccattcaggcagctgctaaagttgaggttacagcctcagactatattttctgtccttgtggaaccccagtgtgtcatcttgttgggagatctggtgatacatgtgtcaacattatgtcatcaaaatggaaattctttgaaatctttaggtgattgcaattcacgttctgtatgtatgcacttgtcaaaagttttgatttgaggccttagaattttatatttggaaacctttccactaccatgagttttcccagacctgtcaaagccaggctgcatctcagaaaccaggtctttgatttccatccagggcaagggcctgggcccagctgggctgtaagcaggtgggggtggggagcaacgctgcactgcaatgttgaaatattacttgaactaaatcaaatcaaagatcagctttactcagacaagaatagaaaacacaattgcattcgattacagaatagtgtgtatccccacaaatatcagactgcctttaaaaagttttgaattgttaacatcaagaacagtgttgcgtgtctcctgcttttccagcataaggtttatttattctgtgggtggcaaagagcaatttgggagtccagtttgtttctcattgaaagctttcccatttctggtcctcttgtcactgttgcattgaggcaccaaaaggcaatctcagtgcgacactattcaacagactaagttgcaccggataatgataccattttacatttttcatatattattacattgaaggcttcaaacagcactagcaggggcaaattggtattattatctccatttcattgatgaggaaaccgaggctcgaaagggtaatgtctgttgtccaagattaaagagtaaagttgtacgttgaatcggggtctgactcctaggcttagcattttctccccacactatgctgccatgttgcttattccaacattaggaagcataggtgccatccccagcttttgaggccaatatcacgatgaagcatttttaaaacatctcattaaattgctgatatagtggaaagaaccaaagctttgcagtcaaagctgtttgggttcaaatttaccacttgtttgttctatgaccctgagcaagatattctccagatctgtttcctcatttgaaaaatgggaataataatacgtttctttataggctgttcttaaagattctggaaaataatgctaatagtgtgcctaatgcttggtaaatatgagtcacttttctgtgcccacaaagcactactatgtcccttaataaattttgttaattttaaaagttagaaaaaaattaaactatttatacattgtgtatgttaattcttccctagaccagccttaggaagaatctcatccccaacttgtaaactcatctttttccgttctttttgtgcctggacttctcagggccctgcaggctgattctagtcccatgttgtgtggtgtttgaagtgtctggtcccttttttcagtgagagaccagctcatccttgggaactgaatgcctcaaactctcttttctttttctctcttccccttctgtttgatgtagtctttcctgtttctggactctgtttcttcatacttcctatctcttaccttcttttcactccttttgtcttccagctgtcctctctcatttttctgcctctctggtcttcaggtagagttttcatctcagctatcttcttgctttttctgatgttggttctttgtttcttcttctcattctgttcaggtccaaaattcatttgggtcaatgttatgtcttagtgttatcttccatttccttctgagcttcaaagccaggctgactgtgcccttccacgccctggccagtgtgaccaggacatcctttccctctggggctgcactggctctttgggggaattgttaccattcagggtcttcaaccctcattctagggacttccagtaacttctcccaccttccctcttctcagtaagacatgggtattgtcttattctgtttctgctgctagaagaaaattctcgagactgagtaatttatacacaatagaaatttacttctcacagttctggaggctgggaaatccaaaatcaaggtgttggcaggtttggtgtctggtgagggctgctctctgcttctaagatggtgccttgttgctgcatccttaggaggggacaaacgccatttcctcaactggcagaagggactgaagcctctccctcaagcccttttataggggtcctcattgtcaggcctctaagcccaagccaagccatcgcatcccctgtgacttgcacatatacgcccagatggcctgaagtaactgaagaatcacaaaagaagtgaaaaggccctgcctcgccttaactgatgacgttccaccattgtgatttgttcctgccccaccttaactgagtgattaaccctgtgaatttccttctcctggctcagaagctcccccactgagcaccttgtgaccccctgcccctgcccaccagagaacaaccctctttgactgtaattttccattaccttcccaaatcctataaaacggccccacccctatctccctttgctgactctcttttcggactcagcccacctgcagccaggtgaaaaaaacagctttattgctcacacaaagcctgtttggtggtctcttcacacagacgcacatgaaactcatggtatctgtgaggggccctaatgctattggtgagggcactgctcacataacttaatcaccccttaaaggccctgcctcttaatactgtcacattggtgatgaagtttcaatgtatgaactttgaggggggacacgttcaaatcatagcaggtgtgctattgccttactagcaaagtaatctgggggaagatgagtaatgtctcgttccacccctgattccagtgctgactgattctggagtggcagagagggttggaggctcaccgctctgctcacccgaccctctggccatctcctcttagaatgcaagggcagggattttgttacacagcgcctcttttgttataggctagctcctgccttcaaggagcactgagaaaaatattatccctttgaaccacaacactagtattttgggtactgtagccattcagaagtttgttgaactaatacaagtttatattatttgtaaaatactagaaggaatgtgtggttcctaaagttatggtattcccattggttgaaagagaagactctggcttcctaatgccttggaaggttcagggagcataagcctaaatatcctggtttctcttgggaattcttcacagcttgtcatctatgactttatccacatttattttgaacatgtttaattttcagcttgtattttctcaaggagtatgtgtgagtcagcattcagagtacttaacacacttagtgtcattagtgataacttaacccacacgtataggaagctagacctccatttacagaaaaatggaggctcagagagcctaactgactttcccaaggccacataactggaaaattctggaactgagttttttcaggtatgtcttggtatccctcggtgagccttctctgtagagaaggaagtgtctcctgggttggaaagcccaggccgggatgaacagcatgggtgtccttaggctgtgtgtaccacacacccctggcctactctcccctgctctaaggagtcacctgaaggagcagctgcatcaccccgcctcaccccttctcctcagcacccaacaaccaggtcttcccagagagtgctcagctattggtgaagcaggcatcgtctattcttcaagaagacagcagagcatcaggaaaacaaaacaccaaaaaaataccataaagacactggagtgtatttgttaccagcccttgtataacagagaagtatttcaaggtcttatttgtaaggctggacaagctcaggctgattaaaaccacgagttagaatttgtctcccgctcccaggccctgctcagttgacagctcctagcaggctgggaggccccaccccacccccaccccaggggtccattgaagaagaccatctgggcctgggatgctgatgtgattttccctacttctccttttttttcatttgcctcctccacccacttctaaagcagctgattgctctggttccttttcatgttgagcaaaagagaagacagatcttgaaacctgagctggggactggagggcactgaccgagagtaaccccgtctggctcagctcagctcagcaaagggctttcctcctccgccttcctgagctgctctccctcctctcctttcctccttctttcccagcctcccccaagctccttcacccctctcttccctctcctccctcctcccaccttccttgtcctctatgctcagagaactgaaggaacactgaatggcctggaaagcaggacctcgcccccaccccgcgtcatacccctccgcctgcacgtgcaaatgtgttcctcagcttggtcccagaggcctggacctgggtcccagaggtcccagctggttccccggcttggtcccagaggcctggatgtgtggcaagaagctgagggttctgcttcgtttcttccagcccacaaacacacatgtcacctgttttttgttctttttcctttcctttgccccactttacagaagctcttggctaattggtaggtcactgtttgctcctccaggcaaaaccaaggaggctgagctcagcaggtcaagtattttggtctgtattgaagagactgtggtgggagagccctcttgaccttctgctggatagtgactttctcttctgctggcagcagtagcccagctccgcatcctgtgacagaggtcataccttccagttacccgagcgaacacttggagcaagtcagctttttcccctgaaacagcacgttcacgttcttgatctttggtttgcacaacaacctgtgaatgttattagccccgttttttttgtttgtttgttttttgagacagagtgtcgctcttgttgcccaggctggattgcaatggcgtgatctcggctcactgcaacctctgcctccaagcaattctcctgcctcagcttcctgagtagctgggattacaggcatgcgccaccacacccggctaattttgtatttttagtagagacggggtttcttcatgttggtcaggctggtctcgaacttccgacctcagttgatccacccgtcttggcctcccaaagtgctgtattagccccattttatatccaaggaaactgaggcttagggagatttaaataggggggaaagtatagcttcatgattacacagtcaggaaatggcagagctgactcttgaattcagaccctgtgatgctgtatccagtgctgattttgttttgccctgtgttcctttcagtgtcaggtaagaagacctcagagatcatcttctccaacccacacattttactgattataaaatccaggtccgcattaactcattggccaaagttaagtggctaaatgactctcctgttcaggaagtattccctgtcttgtgtggaatgattggtctttcgtccaggtcatcttccacctatatccatccttgcagtgactggtggatatgatcattcctggtgattccctgtaaaatactagatttatttattctttcataaagttatgagtagacaaatcagtcagcttcaacctttcctttaccttatagatagtatcagcagaaagaactcaataattctgtcttaggaactcagccaggctaatatgtattataatacacacatacatatgcacacacatacacacatgtgcataccttagatcacaaattcaacatctcaacttagccgccaaagccacttctgtgtcttgtctattctgaatatgctttaaggttaaattagccatgaatctgttcagatcagtcattcctgaaaatgatgatgatattagccatcctttaccgggcaccttactcagtgcccggcattatactaggtctgcaggtacatttgctcatttaacacctagctcagtccaatgaggtggatgccattgtcatctccattttatcatttaatcaactcagccttcctctctcctgttccccactctgcttctagctgccactcacctgactctcctcttgatctgggctgacgtggctgagtgggtttagcagaactcttgtgtcctctttacttggtttgtttcaagttcatgtcctgcttcatcttttccctaactcactgcaaggtgaattttcttctctgcaatcggcaattccccaaatcacatcaggtcattaatttattcactcatttgtattcattcattcattagttcatccatccatctattcattcattcatccaatttactgagtgcctcctctgtgccaggcactgctggctttggaattaaaaaccctggccctcaaggaatttctattcttctgggagcaggatatttacatgggtgactgcagcttgatctgtgtggtactagtggaaaacataggatgttgggcacaaaagagtcacaaaacgccgggcgcggtggctcatgcctctaatcctagcactttgggaggccaaggcgagtggatcacctgaggtcaggagttcaagaccagcctggccaacatgatgaaaccccaactctactaaaaatacaaaaaggaataatagctgggcgtgatggcgggtgcctgtaatcccaacaactcgggaggctgaggcaggagaattgcttgaacctggggctttggaggttgcaatgagccaagagcgggccacttcactccagcctgggtgaaagggtgaaactctgtattaaaaaaaaaaaaagtcacaaaaaagggctggccacctaacccagcttgaggatgggaaggccagggcaggcttcctggaggaggtgactcatgggccatgtcatgaggatggggtaagaggagaaggtatgtttcagacatctggctttcttaatattcttggctttccacccattttcctgccagcaacataggggagaagactgagaccagcagatacaaagccactgtactctgtcctcaccccctccttttttctccccttcctactacccagatctgaggttttgagaaatctcttctctaattatctgcttgttcattcatttgttgagaatctactatgtgcatagcattatgaccacaaaatgtcctggtcgttgtcatcatgagaggtcttaccccttcctctccagccacttctagggatttttgactctgtccttttccagaacttggctccagtctggttgctcgccatgaagcacttacagataaacctcatcttgggccagtgcttccatttactgtctccttttggcttgcttatccttccttctgccttcttgaattgatttgcctctttatctcccctttcagccttgaaagttcctcgaaggcagggactgtgtccccatcttttctataaatggcattgttgtacattggtaaagttgagtgaaaaaatctttttgataatcacaaattattaccatatattgagcacctaccatgatgagtatctctgatcttcatatctttgaaatgtggatactattaccttcacttaattggtaagaaaatttgtgctcagggaggtaaagtcactttctcacagtcacacagctatttcacaggagagtgcagtatcaaatttaggtttttctggtcccaaaccctgatgtttcccccacatcattgtttctcagacttggctgcaatcacctgaaaaattttattaaattctttttttttttttttttgagacagagtctcgctctgtcacccaggctggagtgcaatggtgccatctctgctcagtgcaaccactgcctcccacgttcaagtgatcctcctgcttcagcctcccaagtagctgggattacaggcacccaccaccacactcagctaattttgatatgtttagtagagactgggtttcaccaggctgatctcaaactcctgacctcaagtgatctgcccacctcacccagccaggttttattaaattctgatgcctgggtcttaccctagcagttctcattagttgctccatggtgtggcctgggctttgggatttttgtgaagcccccagctgagtctaacgggcagtcatgtttgagaaccagtatactacaccatgttgccttcctgttttcacacaggttggtgctagtgtgtgagtctaagcctacatgggtggatatccacgtgatcaggctgcaagttctttgtagtggaggatctttggccctccctgctgcttcccaacccagcgaacctaccacaccatgcacgtgcacagccaagggttgttgactgtttaatcagtctctgggttcttatgtctcatccgggggattcactgataggaggctggagcttgatcacatccagatgttctcatcttcagagcctgttaacataacagaagtcttataaacatgctgagcacactcactggtctggagagtgttgcaggatgacctaggcccattgcaggggtggcctgggtcgccctcccacacttctgccaccctgcttgggaaggagggagctgttttgaagttccctggtgcaatatgatgtattgctctggctctgctcaggaggaagctatggcccacctagtcagtgagggttagctaatacgtgtattctgtttctgttgaggtttcacagaggccttttttgacccttcattttatagataaggcagtggaggcacaactacatgaaatgactcgacaaataaatggatttagaacccaggtttctgactcccagggtggtgctttttccatggttgtacagtgattaatgtctaccttttcacaccagtcctcaactgaagacaccagcttacaccttccttcctgtttctcccaagaacagaaagtgaccccggatgtcgctttctgttcctgggaaggcagttccagtggttagaaagtctgttcactcctggggggtggcctggggatggacctgacatccctgtggctcttccttggacctggcccaggctaaaagggaaaatcttcctaatgaggggaactcaagatactttttggaaacctttgtcaggccctaaaatccccattttactgatgggttaaagaaatcaacctaccccctttcaattggcaaggaaattcttgttgccagggcccnnnnnnnnnnnnnnnnnnnnccctgcctcccccaacattaaaagtgtaagggatgcttattcaaatgtagatttgtaggctctgcactctagacccactatttcagaatctctggggactgggcccaagaaactgcattttcgcatgctccctaaatgaagcttaggtgctctgaggtttgacaactgcagtagagagcctaatgctaacagtgtagagtcacatgtgatgggaagcatcaggtaggtagcagtttgcaggagcactgattctgagggacactaactgggcctaagaacagctactggctgtcatgaggaataactaggagctagccatagaggggtagcagtgaatcatttctctagcgatgtaaatcttgctcaatttattctgtctatataactcaatattactgaagtttgcctaaagcagaatacacctggatcatacagcatttatgagagactggctgggctgtcaggccctcctgttactttatctctgcatgtgaccctcttagctccgcggattaactcctgtcctcattaagcctcacactgtagccccattttcagatcaaacctgtttctcttctggtaaatgatttcagtttgcaaagtttgccctctagaggttgcttagtgcctggccatgtgggctcagttcatgtggtcctgatgagctggttttatctttattacaaagaagttaggctgttaggagagtgggttggaaggagaagaggtagacagccaaatgagatgagtcagggaaaactatactgtttcggagtcatagggctcctaccaagcatctggtcagaaacctctcattttggagatcaagaaattgaggttcagaaagatgacatgaggtacgcagggacgccaccagacacagcctccaactctagaaactaaaattctggattcttagtgctgctttttctgttttgttgcactggattgaagccttttctaactgtactcagagggcctattatttagggagattccgtatgaaatcctttagcaatcaaatcatttaatagggctgatggtttaaatatatgttaatgtgttttcctaaagcctggcagacctgggttttggagctttgtatcacatgttttatgtttggaatgaaaatgagaccatgtctgtgaaggcactttgatatgcgtaatgcactctgccagtgtttgtcaaaacatggtccccaggtcagcagcatcagcatcacctgtaagtgattctccagtcgcatcccagggccgctgtatcagaaactctgggggtgggggtggnnggcnnccccncnccntccccccctcntntccnttcccttccacccncctccttcttcctctctcgccttctttcttcccntctccttctccacttttctccgctctcccactcaccgttctcatctgactaatcttgactaatactccaaccttcccctagattcaactcgtcatatcctctcccaataatccgtgtcattccttccctctcctcctgctactcgnnnnnnnnnnnnnnnnnnnnggaagaagagtggagaaggagaataattgatagttaaagagaatataaagatgtgatagaaatagagtaagtgagagtgagaagtgaagtatgaagaagtatagaataatttgagtatataggagtgaagaggtgtgtaaggagaaggggaagagtaaaaaagggaggtaaaagaggaagagaaatagggaagagagaagaagggtagagaagggaagaaggaagaaagaagaagggggaaagagagaaaggaagagaggaaagagagagagagaagaaaaaggaggaggaaaagaaaaaagagaggaggaagaagagagaagaggggagggggaagaaggagaggaaagaaaagaaagggaggagggagaagagnaaaaaaaagagaaaaagaaagaaggaaagaaagaagagaggggagaaggaaagaaggaaagagagggaaagaagaaggaggaggaagaaaaggaggagaagtaaagaggaagagaagannnnnnnggntnggggtgggggccggcccagcagtctgcattttaacaagctctccaggtgattctgatgcatacttaagtttgagaaccattgcttgttttgcattaaacaggagattagtctctgcagcttgtgggaataaagctttaaatctctccaattttagctctgtgaaaaggcagtggggagacaggaatgaacggactagtgccacaaagctcaggtggggtgggtgagatcatttcaaaggtttgacttcttgcttgaaaagcaaagaaagaccgggcatggtggctcacgcctgtactgtcagcactttgggaggccaaggcaggttggatcacaaggtcaggagtttgagaccagcctgcctatcatggtgaaaccctgtctgtactaaagataaaaaaaaaaaaatttgccagtcatggtgatgcatacctgtaatcccagctactcgggaggctgaggcaggagaatctcttgaacccgggaggcgggggttgcagtgagctgagattccaccattgcactccaacctaggtgacagggtgagactccgtctcaaaataaaaaaaagaaaaggaaaggaaaggctgtgtgtgtgtgtatgtgtgtgtgtgtgtgtgtgtgtgtgtaacagcaccatcacactgtttgagttgaggagcacatgctgagtgtggctcaacatgttaccagaaagcaatattttcatgcctctcccgatatggcgatgctcccctatctcattcctgtgtgtgtttagccaggcaactgttgatcatcaatattatgataacgtttctccactgtcccattgtgcccacttttttttttttttgagttacttactaaataaaaataaaacactatttctcaatagacttgaagcttcaagatttcctggtggacaatgaaaccttctctgggttcctatatcacaacctctctctcccaaagtctactgtggacaagatgctgagggctgatgtcattctccacaaggtaagctgatgcctccagcttcctcagtagggctgatggcaattacgttgtgcagctactggaaagaaatgaataaacccttgtccttgtaatggtggtgaaggggagggaggtagtttgaatacaacttcacttaattttacttccctattcaggcaggaattgccaaaccatccaggagtggaatatgcaacctggcgtcatgggcccgctggttaaaataaaattgatttctggcttatcacttggcatttgtgatgatttcctcctacaagggatacattttaagttgagttaaacttaaaaaatattcacagttctgaggcaataaccatggttaagggttattgatctggaggagctctgtctaaaaaattgaggacaggagaatttagacaagggtgtatttggagacttttaagaattttataaaataagggctggacgcagtggcactgagttgagaactgttgcttgctttgcattaaataggagatcagtccctgcagcttgtgggaataaggctttaaatctctccaattttagctctgtgagatggcactggggaaacagaaatgaacggactagtgtcacaaagctcaggtgggatggacgagatcacttcaaaggtctataatcccacgtctataatcccagcactttgggaggccaaggcgggaaaatcacttgaggtcaggagttcgagaccagcctggccaacatggcaaagcctgtctctactaaaaatatgaaaattagctcagcgtggtggcatgctcctgtagtcccagctactcgtgaggctgagacaggagaatcgtttgaacctgggaggcggaggttgcagtgaaccaatatcgcgccactgcactccagcctggctgacagagtgagactccatctcaaaaaaaaaaaaaaaaaaaaagaattttataaaatcaggaaataatattagtgtttatgttgaattttaactttagaatcatagaaaacttcctctggcatcattattagacagctcttgtgcagtgggtagcaccagacccagcttgcatggttattgatttttcagagacactttttgagcttattctctggcagaaaggggaactgcttcctcccctatctcatgtctgcatactagcttgtctttacaagaagcagaagtagtggaaatgtttattcttgaaaataagctttttgcttcacatgatctagaatttttaaaattagaaaaatgtgcttactgcgtgcccttctgaaactaggaaaatatgccttgtgtttaccaattgtgtggttaggagatgggccaaaggcatcaggcttttgaaagtagttgcatttagcataatttccattgccccctgccaatttcatatctgtcacatctaatcagtttaaaataaggggcatcctaagcatggagatggtccttggatggtccttggagtttctgtattgtcagtattctttttcttgagcatacaagacatttattgaaaaattcttgggatcaatacttgtgtaaggaaaggaaagggaacaaagcatgattgggcagaggcagaagatgacatcaacaaaggccctccgttgtcagtattctttttttttttttttttttgagttggagtctcgctctgtcacccaggctggagtgcagtggcgtgatctcagctcactacaacctctgcctcccaggttcaagtgattctctgcttcagcctcctgagtagctgggattacaggcatgcaccaccacacctggctaattgttgtatttttagtagagacggggtttcaccatgttggttggccagactggtcttgaactcctgacctcaggtgatccgtctgcctcggcctcccaaagtgttggaattacagacatgacccactgcacccggcctgttgtcagtattcttaaacatagacactaactgtaggctgacagcctagcagcaaggaccagttaaagaaacgagtagaactgaagtgtgcttgagtatctctggcagtcagcaaaaacttaatggggatcatggtaggccaaatgttctgcagtatttcaaaagctgcatgggttttgagaggcttttggtccatcactcaccttaggttgttctacaagcacatcagcctgccccaatttaaacagggcagttagtaatggtgtaataaagagtctgcattgttcattccttcaacaaatactggctataatgtttcagcactgtggatgcaaagtgagcaggataaacaggctcttctttcaaagcttgtggtccactggaccacgtatgaagtagaatagtttaggcccagaaaggcaattaagtaaaatatgaccaagaagaggctctctagtgggtttggtataaagaaaagataagaatgatttagaattggcctatcaatgagataagaggcctggctttctggcactctgctctagggcaagtaaaatggagaattccaaattctgaaattgttagaacatagttctgtgtcttagttaaatatctacacttacagataaatagcataaatgctttctccccatatttcagcccagtcctacttaaagacaacataaattgcaaaatagtgaggatgttgttcatctaataaaagtggttccaggaattcagactctggattcctgtttgccaaatcatgtgtcccactcttaagaaaacgagttggactctggatttttctttgcaagagggacaagagtgtgggagatactgagttaatgcaacttgcaggttttaagtgtcctgtcattgtgccttgtgctttgatacattctgaggttcagtaaagagacctgatgcattggactgttgcaatggaacctgttttaagatcttcaaagctgtattgatatgaagttctccaaaagacttcaaggacccagcttccaatcttcataatcctcttgtgcttgtctctctttgcatgaaatgcttccaggtatttttgcaaggctaccagttacatttgacaagtctgtgcaatggatcaaaatcagaagagatgattcaacttggtgaccaagaagtttctgagctttgtggcctaccaaaggagaaactggctgcagcagagcgagtacttcgttccaacatggacatcctgaagccaatcctggtgagtagacttgctcactggagaaacttcaagcactaatgctttcggaatgtgaggcttttccttggacagcatgactttgttttgtagaaaagtacggctggctgggagtttgtgatataatttagttcagtggtattctaagtgttcttagtgttctttcagacttttgggccatctcccaaagggtgaatgggaagaataagctgggtgtggctgagtttaagccaaaagttttttgtgcttgtttcaatcagagaagacctgctttttcatgtttttactattataatactaagcaagagctcatttgaaaacagagttcttcatatttaaaaaaaaaaagtcttgaaaccattgatgggaagatggatatctatttatgtttaaaaacccatcataaagatgacattgtaggctgtcacagttggaaggccctggaattagatgagaccacactatttagcttatttagtaataacattgcaaagaaaaattccgacaaagttttttcagcctaggaatcaatagttcagagaagcactctatgagaatacccattcattcttaaccaaaaaatactggtgagcctgagcagtttggtcatcagagtgttttatatagttccagaacaaatatgtctctaggtgttctgagagctctggtgaaattcctctccctaccccaaacatcatcatttaatatccaggattctggttttctactcaccagatagattctcttaaaaccagggaaagattcctggaggaaggatgtatctggaaagagatgttccttattataataaaatgaaattgtaatactcttggattttgtgcagcacgaattctttatagagagttggtcctcccagagaattaagaatactcagtttctggaccctgttcccagatcataccctagaatgtgaccttagaaacacacttcaggattcatacctttgattgaccatcaaaaagtttttgtatcagcctggtgtggtggctcacgcctgtaatcccaccactttcggatgccacggcgggcagatcacgtgaggtcagcagtttgagaccagcctggccaacatggtgaaaccctgtctctacaaaaatacacaaaatagccaggcgtgatggtgggcacctgtaattccagctactcgggaggctgaggcaggagaatcgcttgagcctaggaggtggaggctgcagngagctgagatctgtctcactctgttgcccaggctggagtgcagaggcgcgatctcgactcactggaacctccgcctcccaggcttaagtgattctcatgcctcagcctccgagtacctgggactacaggcacctgccaccacgcccagctattttttgtatttttagtagacatagggtttcactatgttgcccagctggtctcgaactcctgagctcaagtgatctgcccacctcgtcctcccaaagtgttgggattaaaggcatgagtcaccgtgcctggtcccatgttataattttaaagtaaggtatatttctctacggggatctttgcaaccctaagtaactggcctaaaaagttagagaagctgacttgtgcagacatttgcagcctgttggtcttttttgtgctgtgaatcatagagggtgaaaggttattatgaatggtacaaaactttgttacaaaaccattttcttggactgttttgggctgcttcactgcatgacaaatgctcaccctttcagttggaatgattgaaattttggaaaagatgggtgtttttagaagacattgtaatttgttccggtgctgtgcccattcattccatttcacttctgtttactcattaaacacctattgtgtacacaacccggtaaaatccctccactcacacaatgcctgaattatactcatagtagaatgactgtttagccctcatcatctgataattaacagctcaggtttcaacctgacagtatctctctgggaggattagcagcgtgacagagtgcagggaaatgcaccttcagaaccgtcagctacactgtgtcccatcctgctgtgttgtggttgtgccttgtggatgcgttggtttatgaccaggtattgattaaggtggctactaccgggtgctttctgcatatctcgggtttgtggagcactcaggttctgcttctgcccctctgctgttaccaagagacctctcttcaaaatggggctcttgagttagagtagaatgagtgatcaggattgttttgtgtaaagatgatttctgaggaaggctttaggatgaaatgacttccaaacattttgaaatgtgactcttacttattgaattaagcagggccttaattggaatgctgggactgatacttgatttgcattaagcagcctttttctattgctgcttggttgaaatttcaacatttgtgatggtagatggatgtgacatgtgatgacattgcacatgggcagttaactgtgccaagaagtgcagcagtagcagcaaccggagatgcaaagcccaacatgatggggagagaaactcttctttcaatatgtgcttctgtaccaaaagtggaatttcacgagagacatattttgaaacatttctccttttgtgtgtgcgtgagtgtttccctgtttccagccaagggtattgtgagtttctcctgggcctccttcagaatctgggtgctctggaaagcagtgttttggcaacatggggaaagtatggcagtgtgggagggtcagctgggtctgggtttgaatattgcatttgaatattttaccagcattgatgtcggataaattatttagtccctgtaagcctcagttttctcttcttctacatacacataatatatttgactctttgttgtgattattggttacacatatgaagagcctggtgtggggcctggcacacaataggtgctcaataaatagaagttgataatttaattgacatgagtagtagaaattatgtccttgaaaacaattgcgtcaagatagaagttttcagccaggcacagtggctcacatctgttgtaatcccagcatattgtgggggccgaggcggatgaatcacttgaggccaggagttcaagaccagcctggccaacgtggtgaaatcccctctctactaaaaatacacatatttgccaggcaggcgtggtggcgcacacctgtaatcccagctactgaagaggctgaggcacaagaatcgcttgaacccaggaggtggaggttgcagtgagctgagatcactccactgcattccagccagcgtgacagagtgagactctgtctcagaaaaagaaaaaaaagatagaagttttcttctgtagatcagtgttagaactcataccaagcaaagtggtcctggtgagtatttcagtgaaaaactgcattcttgctcagatattgtcaagacttttcacccaaagattcttatttatgtctcagtccataccttgtgtgaaaattaatactggatgtcagaacgctgttgtgtttttaaagttccctggggttaagagcagtttccattaggtgttctctgctttttacttaaaaatcttactcatgcattgagcaatatttattcagttcttattatgtgtcaggtattttctaggagctggactcaactcaaaagatatccttttgatgagaacaaaggtgggtggatatatgaaatattatctgtgggataaatgcacttagtcatgagggagacttgttatggagtgcgctcattgtatttgtactgttgagttaacaacttctaggaggagctcagggccacctggcaggggcttcttttgtcttgctgctcagcaaggtgtattttgctgtagagtgtgctgggcaggtgaacttttcttaactttctcttgggtccttcctaaagcagcatgtacctttcccagagcgaggagagggccaccttcctgtctcacagaaacctccaatctgttttggactgcaggaaggagccatagtagtggaccagcaaattttggcccgagagattgatttgcttccgattgtacttttttttttattgctactataacaagtcaccaaatacttagcagtttataaccacatacatttattatttcataaggccagaagccaggatacagtagagctcacctaggtctacttcttagaggctcacagggctgatatcaaggtgtttgtggggctgtgtttttttgggggggctctgaagatgaatctgctttggagctcatccaggatatcagatgaattcagtcccgtgcagttgtaggactgaagtccatttccttgctggctgtcagcaggggctggtttttgctcctaaaggttgccatcattccttcttatgcttttcatgtgactcctctcccacaagtgggttgagtatctctcacactttaaacctctgacgcctcctgtcacatctgtctccagtcagagaaagttctttacttttaagggctcaggtgtttagtttgggcccattcacataatccaggataatctccttattttgaggttcataactttaattacatctacacagtgcatttgctatgaaatgtgcatattcacagactccaggaatagggtgtggacatctttgcaggggatattcagtctgctgtagctttcttgattggaaggaatagtttatcatatatttgaagtgttccctcagtgcctttggcttttgttgacccctctgcagctctctgctttttcttgcccatatttggaaagtgactctaaagcataataagcatcacctattagggtttttaatgtacaaaccaaacagaggtgactttgggaggagaacatctctgaactaggtatgagacattcatcgaaaaaaatccatcaagtgtttattgtatgtctgctttataccagcactgttctaggcactgaagttcgaccaccaacaaggcagttgtgatgcacttggagctttcattctgatgggcattgagatccaggctgaaggctgagtctgggaatttgaggaattctttgtaggtcctgggtctacagagtgagagctgtcctcgttccagtttcactgatgacctctcgaccagctccctcacagcagtctttgccaacacagacactgtgggctgtagtgggaggaatgtggggttgaatgagctaggtttgggctctgtccttgactcaccattgcctcagtgatgtgaaaatggtgtctgatccttaaggttggaagtccaggcatgcagatttatctccatctcaataacgtggggaaaaaaaagaagtggtttttgtggaaccagtggttccactgtccacgtgtcttccagtgtgcctagcacattcccaccaagtggatcttggttcatgagggaaagaagggaaagtgagggtgccccgaggctcccagaagacaagtaatgtcacagctgagctgtgtacagatcgaagaagcagatggataaggagtgaacaaagtcatccttgtcttgaggggtctttatttagcttcttcttgactcttagacaaggacccagaatacagatggggcttgttgttaccttcagcctcatggctttttagggctagatacttcagcttgttacatgcagtccttaaagcgtctgtgtgggtttttgcaggagagaacacttgctcgtgttctcctgtctggaacccggacattgttggaaagtatcagattttgtttggctttgtgtgatttgactgcccacctgtttacttgctttctcccagcaagcagccgcaatccccatgggttggtaatgggtggaatgacacactgtgtagatttactcttcagactctatgttcacctcattcttatgggaaaagaagagcactagctggtagatatagcagtgtgttaatatgactgctcaactccatttacacagacattttcaccttagttatactatttcttcattaaatattgttgccagatctaagatacaggtttaattttttcctctgaattatgtggtagtagatgtatttaactatgtttagaaacagcaaaaaatgaagcgtttgaatgcgttaaacacatctaatttgaaagttaatatttaggttgttgatttattttttaaaagattagaatattccttagaaatgtagtcttataatttcgtatttcaataaaaaatattaaaatgtttcccagaggaaatctttactgtcatagaaatcaccagaaagagatagcaattactcctgggtggtgatagtctttgatttgtggtttacttgttttcagtttgaactaaaacatactaatcccagcctgagttggattttgcatatggtcaaagtgaagtagagatttttgtctactttatgaagatatttaaaggacatttgaaatgtttcaatgaacacattgtaacatgcattcccaggaggaaaacaaaattgtgtattgtgttgaaaatactattccaatatatgtatacccacgtctcattttgtcatagaattcctgaaaaatttagatgtagatgagatttttataagttgaaaatattttcagttgcattttaattgcacagatgtgttttctacttctatttggctgtgactcctaatgcattgtaatattatcttccagtgttcatttcgtgtagtgataatggattaacaaatgcattcattcatttagtaaacatttactgagccctaatcagtgccatgctctggcccagggaggtagtcatgtgcaaggtccagccctctctgtttcattcctggttggggaatgggtgggacagaccaggaaaggagcagctgccgtatagagcaggagacgctctgctgggtgtgatacagtccctgatggggcctcctactgcagtctttccagtcaggaaagaaacatcctctaagtggggacctaaagaatggatgtcagccaggtaaagaacagggagtagaatgttccaggtagaggacatagtatatgcattggtccagagaggagagggaagagaaggtggcatttaggggaactgtacctgattgagatagttcagcatggagcagatatagctgtggggagtttgatgggagaaggaacgatgagacgtgatgcctgcagaggtgggcaaaggtcggctgaggcaggtctttcttcacgagccatgtgaggatatagggccttatcctcagagtaaagggagccattaaaggctccacaggctgagtgacttgatgaggtgaatacgaaacagagcatttctgtgaatgtgaatggcctttggagcagaactaagttcatgaggatggaaagaatataatgaagccatctcttagacccagaaagaatggggcacaacagcctttatctttctggggccaatgtcacagaatgccatgcttttaggaaacatggtatgttgtgattaacacattttgcagaagtgggtgggagcttttgaataataacagtaagcatttgtgcattcttcctgtaatgacattacagttatgatctgaaaatattgagtcatacatgaattcctgttatcttaactcagaaaatatagtccctcactaaaggttttattttccttctttttcccatttcctttacttcgtataagaaagtcacttgtctcctgggtgcaatggagacctatgtgagttcatagccaagagaatgtttttggttagaaaaataatagtaggaattccaagctgtgaattttttactgaagctctttggaaataggatttggcaagttttgtctgccttcgtcaagtaagcatgagcaggagagcacagttaatagcaggtgcagacacatgattctcagaccgtattttgtgttctagtttcaaggcatgaattctttcctggggttaattttattcaaggaagttatctgtctgttagatctgatatgtgctcaggccaacatagattctttacccttcctttcttcctgctcacctgtccttcctcttttatcttttcattgaattaaaaagaaaattatgaaatagtttcaacatgaaaaaaggtacagagaataacataaagaacactcctggctgggtgtggtggctcacgcctgcaatcccagcactttgggagtctgaggcagccagatcactggaggtcaggagttggagaccagcttggccaacatggtgaaacactgcctctactgaaaatacaagaattagccaggcatggtggcgtgcacttgtaatcccagctacgtgagagactgaggcaggagaattgcttgaacccaggagggggaggttgcagtgagctgagatcacaccactgcactctagcctgggtgacagagtgagactccgtcttcaaacaaacaaacaaacaaacaaacaaaaagaacactcctgtaccatcatccatcattttgccgtgctgactccaggttctatttaagaaataaaacattacaggtacagctgatgccacctctgtttccctagctcattcttcagagataactcttgtcttgcagttggatgttttaatcctctatatcatgtatacttacattctatgtataacaatatttggtactggcctaaatgtgttcacattgtataagtgtgcatattggcctgccacttcatttggaattatgttcttgagatttatcaatgttgatacatgtggaatctggttaatttttgccatagtattctatttttatactaaacttttaaaaatccatgcttctagtctttggcttattttttcaggttatggtatgttttggatgcacagaaaagtaaaattaagtcatgagcaaaatatctggataatccaagctttaaacttgatgtagaatttgaatcatgtgtgttttgttaaccctgtgatgtcaatccatgcctgattgtgtaactccaaccaatattcctttgaaaatggaaatttgtttatattgactacagattgccaatattattagtaaatgctgagcacttaatctcgaataaagaactagtttaaaaatgattctaacaatggcattgactgttctaccttattactcatgggtgggttcagccaatgtttctgttggagaccaaaaccaaaaacagtcaaattaaacaagcagtcaaacccaacatacagactactgataagaaggtcatatcataagatatggcattgaatttgtgtctgctaatgtaaaaatctgatgcccacagcaaacttaataaggacctatgtttacatccatgctcaattacattcctgggttaaacagtcatgctttaggccctgctgtgtgcctggagttttgctgaagtgtggggcttttaagagaaggagaataagcttgctccagagttaagaaatttaaactaaaagtcctaaagatgttggaaaaactattgcccttgaagatgtaaattcattaagttggagaagaccttttatacaaacaacagacccattcactgatttgtacccttcaggagacagatgaccggtaatggtgacaatgggtgaatgttgggtttggggtttttagaaacatctgcacttggtgactactgtatctaattggtgtgacaaacctggcaccccatgtgtttggcaccatcttgggtcctactcagggccaggtgaaccgagtggcctcttcactgcttcagagtctgaagcagattgtagtatgcggaccagacacagaatataccaccaagcacgttggcgcaaagcatactgggaagggaggctttgtgaacatggtgctggttctcaaacctcagtgctcaaaagagtctcctgaggattcctggatcacactcttaaacttctcattcagtaggtgttagctggttgagaatctgcattttttttttttttctgagaccgagtctcactctgatgcccaggctggagtgtattggcgccatcttggctcactgcaacctctgcctcccaggttcaagcaattttcctgcctcagcctctctagtagctgggattacaagcacatgccaccatgcctggctaatttttgtacttttagtagagagggggtttcgccgtgttggccaggctcgtcttgaactcctgacctcaggtgatccacccactttggcttcccaaagtgttgagattacaggtgtgagccaccatgcccagcctgaatctgcatatttaacaagcaccacaggtgattctgatacagtagctccccaaacctcacagtgttagtgaatcccagtcatttacaattctgccatgattttggtcatattcaagtgcagctggtagcatttttagttaatatattttttaaattaagtcacttcttttggataattaaatttaattacaagggaagctataccactgctgtaaaaacatcacctgctttaaagagaaggtacataatgaatatacattaagataaagatgtatatgtgtgtgtgtgtgcacatataagtatacacatacctaccatagggattgagttttccttcaggtttttcaactgaaatgtcaactttgaggccagttaatatgtgtaagatatatgtgtgtatgtatgtctatacatatagacatatacgtaaaaacatacatggatgcatatagtatatctatacacaacctattatgcatatcatgtatatttcatccacttagtattatcttttattttgccgtttggcaaatgctcagtaaaagaaaagggttagaaggggagaaaggcattttatcccaagccttcaggaatcaggatgaggatgtcttcaccttgtggtggggagtaattatacaattagagacagcacattggagtgtggctgatatgctgtgtgatgatagctctagctctctgcctagcagaggaaggacatttcaatagaagaaaaagtttaagaccttgccgagaaacagagaaaggatgtttgtctttttaagaagttgaaaaccctgtttgcagacaaaagccctccagttttggcagtaaactttcatgcaagggaagaaaaaggcaggggatgacattgttgacaattgtgaggaattaccatgtgccaggcactgtgcgaggggctttgtacatatcctctagttttagtgcttataaaaactctgtgatatgtgcacagcattttaaactttgctgcatagtcgagaaaatggaaggatggggaatttgagtcatttgcccagggttctatagctaccccaggttcccatgactggagaattggggcacagggtggcgggggagagtgagtgacaagaatcctaacaatcttatttccattgagtccttataaaagaagtggattaactaccacgtttttaagtttttcttaaatttaggttatgtggatctggcgtttcttgttttgtcctgggtttgttttgtttttgctatgctgtcttgaacatctgtcatcttgtaggcctaacggtaaacacaaaaacactttacctcctatagctttcaattaagatctctcagtttgtgtttgtaatagttttccaggcaagttctccctaggttcggcttctagtgtgttaacctttagttataaagtgaacccaaagagagaaagtagaaacaaaacacctcacctgtttttgctcatgaattactctctatggaaggaacaatcatgaacacctctgcgtatcacagaggcctatctgagtctgacgtttaagggagaccgcgtaggtccctttgaggactgtgaatgtgggagtcctgggactctggtgaagaacccgttccagaagagatgaatgagctggacaagttctttcatagaacctttaggcaggttttcttagaaatgcacattgaggattatgcttggatattgtgatgatcagaatgatactcaatcccttctgcatttggaattctctttgaaagaaaacatcccaggcagctatttctcagagatagtgagtcccagccacttctagacattttcttgtgtagtctacattataatttcacagcagtctctgatatgacaaatgtcaaaatagcccaaccttctctaaacttcagagatgtctgatatgatattgaataaaacaatgctcatagaaacatcaagaaaggtggattttccctggatacttttttcctgcttgacaaataacagtgaagaaactgatctcacgtctttttctctttggaagcctgaacactcagaacccaacttgaggctcctcagctatagcaattctgacttcacagtctgtaaattattgttcttttttttctttagcttatgctttctgccctaatttatcttttccctgttctaatgaattattgtcctatatctgctgtgcagttaggtgacatataacagcaattaaatatatgaattggtacatataaagatttgactaaaactcgatgtaaaaataagtgttctacattcaatttccagtgttagaaacagtgctgacttgaacagagtgacagaattccatctttccctatttttgacagctttaaactttatattttcttcctttcttgtgagccgtcattaacttgtttctcaaagccattcccgtattacccatcttgcagacgcagacagatttgggaatttgcggtcagagttgtattggacacatccccccagcccacatgagatccttttaatctattgcatattaactagttttaagtacaatattcctacttcatttaaaaccattaatcaaagaatgagtttgaaaatgaacaaaatgcaaacttacagttagaaataattgtagtgtctttagttttggttaggagtcggtttcttgtttgttaaactcaagattgtgaacagttttaattcacttgtttatttccaatagagatttcaggtttacatttgaattcagaaacaaagttttctttctcattacagagaacactaaactctacatctcccttcccgagcaaggagctggctgaagccacaaaaacattgctgcatagtcttgggactctggcccaggaggtaagttgtgtctttccagtaccaggaagcggatcatccactgtatcagtattttcattcctgagtctggcaagaggtccttttgagttgaatatcacatgggatgtaatatcaattttcaaagtataagtgatgtaaacaataatgttttgatttccttattttagaaatgaagaaacctaaaactcatagatgtctcagagctaattggttagtggctaacagctggatatctagtttagaaccttctccattttttctttttgcccctaggtaatcatacatttgtaaagaggagaattatctctgccactgcccatgcactgcttttgtctgaccagcaatttctccatattgcttcttcagtagcaaggccaatcattttaccaacacacatgcttgctaactaacaggaataacgtggtacccctaattcagccctttcccttgaaagcatctggcttctgaggttcaactatgggaatatggtctcttaatgaacattaagttgagtttgccttttaggtccacatgttgacaaatgtatcagagtaatctctgtcctaggatcagagggcctgtaggcacttgcaaaagcagttagctctgactcccagccagtgcacactccacctttctgactcccagccttgtctcaaattaggcttggaagcgaggaactgtctggtgtcccccagcataggaagctgagccagggggcagtgctcacaaacaatacagactttaacgtgtaggatattggaaaataataatttgtggggaaattgtctcagacttggtccacccttatttttagctgcttctctaatccgtttttctttttttggtgcttgtatctaacctacccattttttggtgcttgcatcattttttcaaatatcaaaaacgaactttatgttttctaacaatgaaagtattgcatgttcattgtggaaaatgctgaagacttggaaaatacaaaaatgctgagatcaaacactattgatacgttagtgtatttcttcctgtcctgttctactttctttctttgaattctgctcacgtgtttctgactgatgaggtctgacttttgggttccttttccagaggagaagccttctttcagcttgccatttgttaccctggttatgaaggctggtaaccttttttactaggtagagaagctggaccaactggggttcttccagggggagaatgagaaagagaaactgttttgcaagtccgtagctatttctctagggccctgttagctgacattgacatgccttgcattgctctgcagatcccctcgcagccctctgtcccttgttcatttctggccttagagaaagcaaagcagggtctgtaacaggggaggctgcctctaaactcagggtttggttacagctgttttcacttacatcactggccctggttttttttttttttctggcattaaaaaaaaaaattggaagcaggtgatgttcccattgctgatgtggtggaaactctccaagtgaacaatatacgtttttcttggcagctgtttcttgtgccctgcttgctcctggtccaggacaagcaaggaccatctgcctctttcaatagaacacctccagatccctttgatcaaaagttactcattgtctgacttgctatttctgtgagataaatgggagaagatcaataaatgcacttgtttgtccagtcagcgtgtggaaagttgataattttgaccaaagcacaacccttgaaaggaaaagaaaaagggagtgaatgtcttctgagaagctgcctaggttcagacagtgtcacccatttccctgtatgctccacatgacaaacctgagtgggtctcatcatgtccattttgcagatggcaccaaggctcagaaaggttaggcaacttttccagtcacccaatgagttaattgacaaaactgggattcaaacccagaactgttggattccaaagcctgtgttgttgcctgcttcgtgaaaaactccagtagcgactggaatagaaaggagaaccttccaagaaagaaaatacgcactagcagaacctggaaattgggaggaaatgaggacttgaggaataagatgaatgaaagctgacctgagtttcacatctgggtgatgggaagggaggacagggaggcagcatctcagatgtccacccagcaccgaccagctgcctggcattgctaggtgttgaggactcagcagtgaacacgctaacttctctgctttcttggggcacgtatagggtgagagacagaaacaaacaggtcagtgtacaatgccacaggagggatatatgcagtgaagaaaaagcagggtaaggggcatagagcatgagaaggtgctttttttaaagggggtgattaggaaagctctctctaaggtgacagttggacctgaaggagatgatagcatgtctgtggtgagggaaggaaactccgaacaggaagaatggcagatacaaagacattgatgctagagcatgcctaaggaatgtgtttaaggaccagggaaagtgagcaagtggtggggggaggagaggagctcagagcaggaggaggtgagtgccatacaggcctggcaagactttggattcctgctgggtgagatgagaatccagcggagggcttgagggaggggacatgatgtgatctagagtttagactgtttacactctggttgttgggttgagaagagactgggatgggggaaagggaggacaaaggacattgtgctggattgagaaagcagtaagtcagtttcattcattcactcaaccgatgatgttcaaataccaccatcatccgtgggctaaaggatgaagagccatccctccctgagagtcaggaagcacttcccagataaagtttggagtgtgagctgaggtgtaggagaaagagtaagagtttacccctgaaacgggtgctgggaagagtcaatagtttggaataactcaataatttatggtgcttctttagaaagatttgctggctttatgtgggaagaaatttgtttttttgattggggagtggtgggttggtggtgaggctgcctgtggaaagagaagtgagtgttttgactcactgttatttaaaaatctctagggctgttccaataagcaacaaaaggcaaaatggcctggttctctgtcccctttctgtctgtatgcctcgtacaggttatgaaaagaaaaagttgggaaaagctgtccacctcacctaattgtattcttgtggagtgtgctagatgccccctctctggagaaaaaaaatccttgtggcctctgacccacctctggagagcctagttcccttctggaggcagaaggcaaagcttaggacctagagagtgctggaccacgccactcacaggaaccagcaggctgtgaggttgaaagctaggcatatggagctttccaggctgggtgcagggcctcgtggcccttcccctcccctctgtgctctatagctcagtcttcccaggcggtgtgaacacgcagtgacatttccaggaatacagggatttattaatgatttattgtgaaatgtttggaaatacaaagtactctataaatatttcataatagcattggggctgagaactccacaaagtgccggaatacatttgcatgtaagacagaacgctgcctgggtcattgatgcctgttgagtggcagtcacagacactgcctggggtttctgactcacgctgttgggactgttctatgcagggcaccctcttgtgtggcataggatttgtgcctcaccacagactgttgtagctttgctgtcttgatgatgagtagagggcagtgtccaggccatggtataagcatctactgccccccagggttaccaaaaccaagccaagttgtgtctcagcgagctccgtgaagcatggagaagttgagtactcagagacatgacgtgacttttcaaaggctgtaagctgacgagggacatagctagggttcagacttgagtttttctttttctttttcttttttttttaagactgagtcttgcttttgtcgcccaggctggattgcagtggtgcttggctcactgcaacctctgcctcccgggttcaagcaattctcctgcctcagcctccccagtagctgggattacaggcacctgccaccatgcctggccaacatttttgtatttttttagtagagatggggtttcaccatgttggccaggctggtcttgaactcctgacctcaggtgatccacccgcctcgacctcccaaagtactgggattacaggtgtgagccactgcaccgggcccagactcgagtttttcatcttaatgctttttcattgcctgacactttactgagaccaagatagggaacttcacatacagtaccttttctcccaaggcggaagagggctgttcaatttctacactagagttcggggagttttagaaatgagccagttgtcgaggatgagagcagttcctgataggctcaaccacaatgagatgtagctgttcagagaaagcattcttatctataaactggaagataatcccggtgaaacaaagcccagccccaggggcttcactaactccaggctgtgcttctcaaactttagtgagcataggaatcacctgggcatcttgtgaagctgtagatttgaattctgcaggtcggcagaggggtctcagaatccgcatttccaacaatgtctccagtaatgctgatgctgctcgtccctggaccacagattgggtagccaggttctggcaagctcatcccaaggctttgagatgacatcagacaaaatatgttctgggacatggcttttgagaggtcaagaaaataagatgtttctttctcttctcatccccaacccttgcactgcccttttctcccttcccctaccctcctttctgtccccatccctgacgccagctgttcagcatgagaagctggagtgacatgcgacaggaggtgatgtttctgaccaatgtgaacagctccagctcctccacccaaatctaccaggctgtgtctcgtattgtctgcgggcatcccgagggagggggactgaagatcaagtctctcaactggtatgaggacaacaactacaaagccctctttggaggcaatggcactgaggaagatgctgaaaccttctatgacaactctacaagtgagtgtccatgcagaccccagccctgtccccaaccccatccctcccttagttctggccttggcctgtgtcatctcctccctctgtagcagcgttagatgtctacatgcccatttgcccaccagactgagctcttcctagaggagagaggcttctcttgaatagctacctgtccccagttctctgaatgcagcctggcacatctcaggtgcacagtagtgtttatcaatggaatgaatgattgacagccaaccttctggttttctgggggatgtggaagggtggcttccagggtgatcaagaatgagataatggcagaaggacaaatcctgcaagatctcacttatatatggaatatatgtaaggtagaaagtgtcagtttcacatgatgaataagttcctgggatcttgatgtacatcgtgatgactatagttagtaacactgtatagtatacttgaaatttgctaagagagtagatccgaagtgttcacactacacaaaaaaggcaactatgaggtgatggatttattaacagcttgattgtggtgatccttttacaaagtatacatatattaaaacatcacattgtataccttaaatatatacaatttttatttgtcagttgtaactcaaaaaagctagaaaagcatttttaaaaaggatgatgtactggtcttaatattaccattgagataagctttataataacataaaaagaaataacagtaatgataatagcaacaacaacaacaacaacaaagaactaacatttaagtagaatttcttgtgcactgtgcattctgtttaagttatctcattttaccctcatgataaccctgcagggaagattctttaaccccacatttcataggctcagagaggttaagtgccttggttagagccacatcagagttaatccacaagagccaggattcaagcccaaatctgcctggatctgtgctctctaagataactgttagtggtggcgtgtgtgttctcacactcagacatttgatctgctctttgtttcccattcttagctgcaaggcagtgttaaagaaccctgtgtctccatatccactccccacacttaagcacttttgtgggcccgtgtgccgtatgcctcgtggcagcagggatccaatgtcacagttttaggcagtggcatccttttccttgaaaacttgatgcaggggaacctttctccatttccaaccacaggtgtgtctttcagacactgagtgaggcaggttttgtactttattgtaacacaagaaccttttcttctctggagtaaagcactccagacattcgcaagttgctttacaagccttaaaaggatggtattgtaggcaactttaattaaatcccatctcctcctctcccccagcttgcaagttgacccaaggaagccttcatttccatgacagacttaattgtgagggcatcctcattaaaaaaaaaaaaattctattatctttccagcatatagaagatacttggtatctaaaaatccctgaaaaacttagaatgaatttttaaaaatcagggatcctgctggataaccaaacccatttgtctgttacaacttttgtatttgggtttttgttaagtgtacatatactagtttgtgttaattaaagagaatttttttttttttttttgagagggagtctcgctccgttgcccaggctggagtgcagtggcgccatctcggctcactgcaagctccgcctcccgggttcatgccattctcctgcctcagcctcctgagtagctggaactgcaggtgcccgccaccatgcccagctaatttttttttttttttgtattttgagtagagacggggtttcactgtgttagccaggatggtctcgatctcctgacctcgtgatccgcctgtctcggcctcccaaagtgctgggattacaggcgtgaaccactgcgccctgttgagaatttttttttttttttttgggagacggagtttcgctcttgttgcccgggctagagtgcagtgacacaatctcggctcactgcaacctctgcctcctgggttcaagcgattctcctgcctcagcctcatgcgtcaccacgcccagctaattttgtatttttagtagagacagggtttctccatgttggtcaggctggtctcgaactcccaacctcaggtggttcgcccgccttggcctcccaaagtgctgggattgcaggcatgagccactgcgcccagccccaaattttggtttttgcttgaaaactgaggtctgaattcagccttctggttgcccctcaagagtcagtttaaatgttggtcatgttagttgtcagtgaaaacaatggtgaggctggcatgagagtgtgaacctggatgggagggcttgtgcttcacgaaaacatttttccagatcagctcagtcgtgagttatccgtcattgacgttataataagctctgattatttatcaagcatcattctttatagatatctcagtttaatctgagataatcttctccacatctctccacatagatgttatgaattttacttttacagaggagccaactgaggctcagataagttacttattatatgactagtagtggtagagctggggtttcaactaagaactctctggctccaaagcccttgtaagtttctatcagtatatgaccatgcatatgagcatttgtctctcctcttcttcatagctccttactgcaatgatttgatgaagaatttggagtctagtcctctttcccgcattatctggaaagctctgaagccgctgctcgttgggaagatcctgtatacacctgacactccagccacaaggcaggtcatggctgaggtaagctgcccccagcccaagactccctccccagaatctccccagaactgggggcaaaaaactcaaggtagcttcagaggtgtgcgctaagtatactcacggctcttctggaattcccagagtgaaaacctcaagtctgatgcagaccagagctgggccagctccccagtcgtgggtatagaatcatagttacaagcaggcatttcttggggatggggaggactggcacagggctgctgtgatggggtatcttttcagggaggagccaaagcgctcattgtctgtgcttctcctttttctgcggtccctggctccccacctgactccaggtgaacaagaccttccaggaactggctgtgttccatgatctggaaggcatgtgggaggaactcagccccaagatctggaccttcatggagaacagccaagaaatggaccttgtccgggtgagtgtccctcccattattaccatgtgcctgcttgatactggagaggtgagtttctggtcactttcccaggtgtgagtgaggtgagaattctttcagtttatctagctgggggaatgtagtgagcatagctaaagtcacagggcaccacctctccagaagtacaggccatggtgcagagataacgctgtgcatatcagcatccatgccactcacggtcaaatagcagttttctgcaaaacttagtgagggctggtgtttggaagtggagttgagtaattgcagtaccctattttcctttttggctgcagcctctcagccagccacagcatctccctgtgtcttggtaggttttggaaagaagtgtgggagcaaaagcatgatgttacatgtagactggcctgagatactcattctcagggcactgtgtgaatgatgagctgctgttactgtgtggaggggaaatgcacttagtgcttcagagccacttgaaagggataagtgctctagagacaattggattcaaatgtggagcaggctgagcaagaacagaatgtctcctttgcctgagcctgagtgctgttaatcacatcttcctgccttgggctgagttagagaatcattagactatttcctgtttccatggtgagggaggcctcttccttttgtctctgctccccttaagaagcaggtgaggattttgccaggtttcttgttttgaaccttattgactttaagggcggctgggttttagagactgtacctacctagggggaacacttccgaagtttaggactattccctgatccgctgggaggcaggttactgaggaagtccctttaaaaacaaaggagtttatactgagaaaagcataaacagtgatttgtatggattcacactgactaatatagctcatgccattaaagtggggtctcttctctaaaggagggttatatgatctagccccgtagacctaagtgtggtttcagacctgttcttcctggtcctctccttggaatccatatttctactagttggactttttctgtttgtctggctctcagaggattataggaggccctgtgaagtgactcagtgaattttgatttgtgggcaagtagatggttccctagtctgaaattgactttgccttaggtgcttcaattcttcataagctcccagttcttaaaggacaagatccttgtaaacatggcaatggcattcattaggaatctagctgggaaaatccagtgtgtatgcttggaaatgagggatctggggctggagagaaaggcatgggcatgccttggagggacttgtgtgtcaagctgaggacctttactttaagctctaggggaccaggcaaggggagatgtagatacgttactctgatggggtggatgaattgaagaaggatgaggcaagaatgaaggcagagaccagggaggaggctctccaagtggccaaggcataaagcaagaaatgaggcctggtgactgcttagtggcagagcagtgaaagagagggaggcatcaaagcgagtctcgatttctagctgggtgggtggtagcgatgtccagtaggccagtggctactgaggtctgcagtggaggagggtggttgggctggagacagatgatgagggagtcatcagcctgtgggtggaagaaaagggaacctcttccaactgttttctttgcttcttccctctctttctctttttttttttttttggacagagtcttgctctgtcacctaggctgaaatgcagtggcatgatcttggctcaccacagcctccgcctcctgggttcaagcaattctcctgtctcagcctccagagtagctgggattacaggcacatatcactgtgcccggctaatttttgtattttcagtggagatgggatttcaccatgttggtcgggctggaatgaactcctgacctcaagtgatccacctgcctcagcctcccaaagtgttgggattacaggcatgagccaccgcgcccggcctttcttccctctcttaaagagtgtttatttaattccacaaacatgagcttgtcaccccctgtagcctggcatctcctacacgaggtgatggctgaggcttctgcttctgctggggtagctctgatctttctgctttctctggcactgtctacccatgttgcctcaccccacaggtcccagggcacctctctcgggcaagtcttggaaccctctgacactgatttgctctcttttctgagctgcttttagccacccatcctcaggacctgttttctctctgcctccacccctgcgggcagtcttaggtctcctgcccctcacgagcaccccagagaggccacgtgctcagtgatctcagtgggcgcatctttctagtcttgctattctttttggccatgttgttcagaaaccatactgggcagggccgacttcaccctaaaggctgcgtctcttcactctgcttttgtttgttccaaataaagtggcttcagaattgctaaccctggcctctgtgaacttgtgaggtacaattttgtgtctgttatgttaacaaaaatacatacataccttcctggtgatggtataaattgctattctctattggaaagcaatttggaatgaaaatttaaagaaccattttaaaatgtgctatcctgcgtacctccattccacccacccccagggatgtagcctactgaaataattttaaagaagtcaccatatgagagaaaatgttattgctatattgttattgtgagaaattggaaatagactaaatgttcagcactataggaataattaatgaaattacatatactctatacaatcattatgctgccattgaaataataaatacaaaggcgcaaggggggaaaagcttataatgttagtgaaactaagactgatttttttataaagcagcagttttcagacccttggagactccaattcggtagaaccagagcttcatcttctctgtcgaagctgtgacaggagttgcaaatgcctctcctttttgctgagtttgcagctgctgtttttccggcagcacatctgtgcaggcctctgcctcggcccctctggatctgctgattgagcagcggattgatctgtccttctctttcgtgttgacccatgtgaggaaccaactggcaagggaacaagaaatggaaataggcctcctttgcatcatgacctgtacatcctgcaattggaaaagattgtactttagttggtttaaccagcagcattatttttctaaactaagcagtaagaaggaattaggttttatgtgggatcaacagactgggtctcaaaagaggaaggtgatagaacacagtggggagggggaggtgcactagaaacagagggcctatgctttcattctggctttgctacttaatagctgtgtgacccaatcttagagacttaacctctctgaacttccattttctcatgtataaaatgggaaatattaaaggatactcactgggctggtggcttgtgcctgtaatcccagcacttggggaggttgaggtgggaggatcacttgagcccaggtgttcaagaccagcccaggcaacatggcaagactctgtctctatgaaaaaattaaaaattagccaggtgtggtggtgtgcacctgtagtcttagctacttggtaggctgagatgggaggatcacttgggcttgggaggtcaaggctgcggtgagctgtgattccatcactgcactccagcccgggcggcagagcgagacactgaatccaaacgacaacaacaacaaaaggcaaaaaaataaaagtgccctctttatggagttgtgtaaggtgaagcatatacactattcaacatagtaactatataaaggaagtattgttgttgttactgtagttaataccattaagtgagatgtttcgtatagtggaaagcacatggactctgaattcagactggtctgactttgagtctcagctccacatctagtaatactatgaccaagccctggttaaaatcatgtttttttttcttcagcctcagtcttctcacatataaaatagggacactgtcatttacctcagttttctgtgaggataaaacaacgacagtgtatatgcaagtattttgtaaattttgtagtgctcctcaagatttagttggtgtttactacttgtactttctcactggaatggcagatgctgttggacagcagggacaatgaccacttttgggaacagcagttggatggcttagattggacagcccaagacatcgtggcgtttttggccaagcacccagaggatgtccagtccagtaatggttctgtgtacacctggagagaagctttcaacgagactaaccaggcaatccggaccatatctcgcttcatggaggtgaatctgttgctgggatcatttagaaaagacttaacggcttctttctctgagacgttacaataaggttcaggcaggaggcaagtttagaaataatgtatagtctcatttacaaaactatccctcaagcctaacacaggatttgataacaaaaggcacttaataaatgttagttgagtggttgaatgagtaaataaactctagctttagtaaattaactctagcttattctatataggctcaagagaatatttctacccattttcttctaggttttcctatctcagtgactaatggtagcaaagcattcccttaaaaaggcattatttgtgaaacttatctaaaatcgaattcgggtccaattaaatttttgaaattttatattaaaaattatattagtagggatgggtaagaggtgttttggtctggttggttggttagttgctatgactcagaattgctaagaaaacagaaaagtaagataagatcactgttttaacctcttttcctccacaaaatcaataaataacatatccctaaattactcttagaatttctcttaaattgcagtgaaaaaccaaaatccttcattcttggttgaaggttggaaaactacgttagagaggattagagagagaggatgagcaatcgtgtagtcagcccttgcctcctagtgtaggatttgtctcagccactgcttgttgtcctggctgccaacgttctcatgaaggctgttcttctatcagtgtgtcaacctgaacaagctagaacccatagcaacagaagtctggctcatcaacaagtccatggagctgctggatgagaggaagttctgggctggtattgtgttcactggaattactccaggcagcattgagctgccccatcatgtcaagtacaagatccgaatggacattgacaatgtggagaggacaaataaaatcaaggatgggtaagtggaatcccatcacaccagcctggtcttggggaggtccagagcacctattatattaggacaagaggtactttattttaactaaaaatttggtagaaatttcaacaacaacaaaaaaactcaacttggtgtcatgattttggtgaaattggtacatgacttgctggaaggtttttcataggtcataaaataacagtatcttttgatttagcatttctactcaagggaattaattccaggaattttggtggcaggcacctgtaatcccagctactcgggaggctgaggcaggagaattgcttgaacccaggaggcagaggttgcagtgagctaagatcgcatcattgcactcccgcctgggcaataagagtgaaactccatctcaaaaaaaaaaaaagatgcaaaaatagaaaaaggggcttggtaagggtagtagggttttgggcaatttttttttttttttttttttattgtatggttctaaaggaatggttgattacctgtggtttggttttaggtactgggaccctggtcctcgagctgacccctttgaggacatgcggtacgtctgggggggcttcgcctacttgcaggatgtggtggagcaggcaatcatcagggtgctgacgggcaccgagaagaaaactggtgtctatatgcaacagatgccctatccctgttacgttgatgacatgtaagttacctgcaagccactgtttttaaccagtttatactgtgccagatgggggtgtatatatgtgtgtgcatgtgcatgcatgtgtgaatgatctggaaataagatgccagatgtaagttgtcaacagttgcagccacatgacagacatagatatatgtgcacacactagtaaacctctttccttctcatccatgggtgccactgagatcgggttgaggtgatttttggttttgagatggagtctcgctctgacgcccaggctggagtgcagtggctcgatctcggctcactacaacctttgcctcccgggttcaagctattctcctgcctcagcctccacagtagctgggactacaggctcatgctgccacgcccggctgactttttgtattttagtagagacgaggtttcaccatgttacccaggctagacttcaactcctgagctcaggcaatccaccctccttggcctcccaaagtgctgggattacaggtgtgagccactgcacccagcccaccactttaattttttacactctacccttttggtcaaaatttgctcaatctgcaagcttaaaatgtgtcatgacaaacacatgcaagcacatactcacacatagatgcagaaacagcgtctaaacttataaaagcacagtttatgtaaatgtgtgcacttcttctccctaggtggtaaaccacatttcaaaacaacccaaataaaactgaacaaagcttcttcctcttagactttttagaaaatctttcagtgctgagtcactaagctgccaagttctcattgtgggaactatgcctttggatgtaatgatttcttctaagacaatgggcggaggtgtagttattgcagacatctgaaatatgtaatgtttcttccagattctggaaattctcttattctctgtggttggtggtggtggtggcatgtgtgtgtgtgtgtgtgtgtgtgtgtgtgtgtgtagggatcaggatgcgggaggagctgggttctgcttgtattggttctctgttttgcattgaatagtgtgtttccttgtatggctatctatagcttttcaaggtcaccagaaattatcctgtttttcaccttctaaacaattagctggaatttttcaaaggaagacttttacaaagacccctaagctaaggtttactctagaaaggatgtcttaagacagggcacaggagttcagaggcattaagagctggtgcctgttgtcatgtagtgagtatgtgcctacatggtaaagctttgacgtgaacctcaagttcagggtccaaaatctgtgtgcctttttactttgcacatctgcattttctattctagcttggaatctgaaacattgacaagagctgcctgaaatgtatgtctgtggtgtgattagagttacgataagcaagtcaatagtgagatgaccttggagatgttgaacttttgtgagagaatgagttgtttttttgttttggtttttagtactttaacataatctacctttagtttaagtatcgctcacagttacctagttactgaagcaagcccccaaagaaatttggtttggcaacactttgttagcctcgtttttctctctacattgcattgctcgtgaagcattggatcatacgtacatttcagagtctagagggcctgtccttctgtggcccagatgtggtgctccctctagcatgcaggctcagaggccttggcccatcaccctggctcacgtgtgtctttctttctccccttgtccttccttggggcctccagctttctgcgggtgatgagccggtcaatgcccctcttcatgacgctggcctggatttactcagtggctgtgatcatcaagggcatcgtgtatgagaaggaggcgcggctgaaagagaccatgcggatcatgggcctggacaacagcatcctctggtttagctggttcattagtagcctcattcctcttcttgtgagcgctggcctgctagtggtcatcctgaaggtaaggcagcctcactcgctcttccctgccaggaaactccgaaatagctcancgcgggctaagggaggagaagaagaaaaanaatccaagcctctggtagagaaggggtcatacctgtcatttcctgcaatttcatccatttatagttggggaaagtgaggcccagagaggggcagtgacttgcccaaggtcaacccagccgggtagcagctaagtaggatgagagtgcagggttcatgctttccagataaccacatgctcaactgtgccatgctgtctcattggtagtggttcatggcagcatctgaaagctatttattttcttagatatattgggtggcgattcttcctaagtttctaagaacaataatcagaaggatatatattgttgcaggttagactgtctggaagcagaggctgaaatagagtttgatgtatgggtatttatgagggctcaatacctatggaagagatatggaagatgcaggattgggcagagggaggagttgaactgtgatatagggccaaccccgtggggcactctagagaatatgcagcttgttggagttgttcttcatcgagctgaaacatccagccctttgtgctcccccaaggcctccctcctgacaccacctacctcagccctctcaatcaatcactggatgtgggctgccctgggaaggtcgtgccccagggcctacatggctctctgctgctgtgacaaacccagagttgctgatgcctgaggccgtctactgacagctgggcaacaaggcttccctgaatggggactctgggcagtgcagttttgtgtctgaaccatacattaatatatttatatccgaattttctttctctgcaagcatttcatataaagacacatcaggtaaaaataaatgtttttgaagcaaaaggagtacaaagagataagaactaactaatttaatactagttaccatctgttacaaatagttcctactgattgccaaggactgtttaaacacatcacatgggcttcttcttctatcctcactaacccttttaacagacaaggaaatgaggctcaggaaggtcaaggactttattgaggttccacagtaggatacagttcttgctaaaagcaacccctccctcatgctctgttatctaactgcaaggggaaggtcagtggcagaggtagtggtcccatggttggtgcataagagctgctctgagacaactgcatgctggtgggtcctgcagacatgtacccatcagccggagataggctcaaaatatccacaagagtttggatgattgtgggaatgcagaatccatggtgatcaagagggaaagtcaagttgcctggccattttccttggcttttagacagaaaagttacgtgggatattatctcccacagctcttctgtggtgccaccagtcatagtccttatataaggagaaaccagttgaaattacctattgaagaaacaaagagcaaactcgcccactgaaatgcgtagaaagccctggactctgttgtattcataactctgccattatttttctgcgtagttttgggtaagtcacttatcttctttaggatggtaatgatcagttgcctcatcagaaagatgaacagcattacgcctctgcattgtctctaacatgagtaggaataaaccctgtcttttttctgtagatcatacaagtgagtgcttgggattgttgaggcagcacatttgatgtgtctcttccttcccagttaggaaacctgctgccctacagtgatcccagcgtggtgtttgtcttcctgtccgtgtttgctgtggtgacaatcctgcagtgcttcctgattagcacactcttctccagagccaacctggcagcagcctgtgggggcatcatctacttcacgctgtacctgccctacgtcctgtgtgtggcatggcaggactacgtgggcttcacactcaagatcttcgctgtgagtacctctggcctttcttcagtggctgtaggcatttgaccttcctttggagtccctgaataaaagcagcaagttgagaacagaagatgattgtcttttccaatgggacatgaaccttagctctagattctaagctctttaagggtaagggcaagcattgtgttttattaaattgttaccctttagtcttctcagtgaatcctggttgaattgaattgaatggaatttttccgagagccagactgcatcttgaactgggctggggataaatggcattgaggaatggcttcaggcaacagatgccatctctgccctttatctcccagctctgttggctatgttaagctcatgacaaagccaaggccacaaatagaactgaaaactcttgatgtcagagatgacctctcttgtcttccttgtgtccagtatggtgttttgcttgagtaatgttttctgaactaagcacaactgaggagcaggtgcctcatcccacaaattcctgacttggacacttccttccctcgtacagagcagggggatatcttggagagtgtgtgagcccctacaagtgcaagttgtcagatgtccccaggtcacttatcaggaaagctaagagtgactcataggatgctcctgttgcctcagtctgggcttcataggcatcagcagccccaaacaggcacctctgatcctgagccatccttggctgagcagggagcctcagaagactgtgggtatgcgcatgtgtgtgggggaacaggattgctgagccttggggcatctttggaaacataaagttttaaaagttttatgcttcactgtatatgcatttctgaaatgtttgtatataatgagtggttacaaatggaatcattttatatgttgcttggtagcccaccactcccctaaagggactctataggtaaatactacttctgcaccttatgattggtccattttgcaaattcaaatttctccaggtataatttacactagaagagatagagtaatgagactgaccagggaatggataggtggctttgcctgtttctcacagagcctgctgtctcctgtggcttttgggtttggctgtgagtgctttgccctttttgaggagcagggcattggagtgcagtgggacaacctgtttgagagtcctgtggaggaagatggcttcaatctcaccacttcggtctccatgatgctgtttaacaccttcctctatggggtgatgacctggtacattgaggctgtctttccaggtacactgctttgggcatctgtttggaaaatatgacttctagctgatgtcctttctttgtgctagaatctctgcagtgcatgggcttccctgggaagtggtttgggctatagatctatagtaaacagatagtccaaggacaggcagctgatgctgaaagtacaattgtcactacttgtacagcacttgtttcttgaaaactgtgtgccaggcagcatgcaaaatgttttatacacattgcttcatttaattctcacaaggctactctgaagtagttactataataaccagcaattttcaaatgagagaactgtgactcaaagacgttaagtaaccagctttggtcacacaactgttaaatgttggtacgtggaggtgaatccacttcggttacactgggtcaataagcccaggcgaatcctcccaatgctcacccaattctgtatttctgtgtcctcagagggggtacaactaggagaggttctgtttcctgagtacaggttgttaataattaaatatactagctctaaggcctgcctgtgatttaattagcattcaataaaaattcatgttgaatttttctttagtacttctttcttaatataatacatcttcttgaccaagtccaagaggaacctgcgttggacagttttcatatgagatcaaattctgagagagcaagatttaaccctttttggttcaccttctgatcctcccctaaggaggtatacatgaaatatttattactcctgcctgaacttctttcattgaatatgcaattttgcagcatgcagattctggatttaaattctgagtcttaacttactggctgagggaccttggataggctccttatccctcagtttcctcatctctaaaatggggatggcacctgccccgtgggttgttggaaggacttacagaggtgcagaatgtacgttgtacatagcaggtttcagcaaatgttagctccctctttccccacatccattcaaatctgttccttctccaaaggatgtgtcaaggaggaaatggacctggctgggaaaccctcagaatactgggatgatgctgagcttggctcatacctgtgctttgctttcaggccagtacggaattcccaggccctggtattttccttgcaccaagtcctactggtttggcgaggaaagtgatgagaagagccaccctggttccaaccagaagagaatatcagaaagtaagtgctgttgacctcctgctctttctttaacctagtgctgctgcctctgctaactgttgggggcaagcgatgtctcctgcctttctaaaagactgtgaaaccactccaggggcagagaaatcacatgcagtgtccctttccaaatcctcccatgccatttatgtccaatgctgttgacctattgggagttcacggtctcgatccctgagggacattttctttgttgtcttggcttctagaagagtatcttttacttgccccctcccaaacacacatttcatggtctcctaacaagctagaagaaagaggtaaagacaagcgtgattgtggaaccatagcctcgctgcctgcctgtgacatggtgacctgtgtatcagcctgtgtgggctgagaccaagtggctaccacagagctcagcctatgcttcataatgtaatcattacccagatccctaatcctctcttggctcttaactgcagacagagatgtccacagctcatcaaaggctctgccttctgggttctttgtgcttagagtggcttcctaaatatttaataggtcccttttctgccagtctcttctgtgcccatcccctgattgcccttggtaaaagtatgatgccccttagtgtagcacgcttgcctgctgttcctaatcatcttctcctacctcctctttacacctagctcctgtttcagtcacctagaaatgctcacagtcgctggaatatgtcatgttcttccacacctccatgcctttgtaggtactgtttgctctcacaggagaactttctctctaacttgcctatcttctcaactcctcctttctctccaagatctagttccggatcccctcccctgagcatccctccttggttctcaggtagtcagtcactctctgccctgaacttccatggcacgtgaaagaaaatctttttattttaaaacaattacagactcacaagaagtaatacaaattacatgagggggttcccttaaacctttcatccagtttccccaatggtagcagcatgtgtaactgtagaatagtatcaaaaccatgaaattgacataggtacaattcacaaaccttcttcagatttcactagctttatgtgcgctcatttgtgtgtgtgtgtgcgtatttagttctatgcaattttatcatgtgtgaattcatgtaattactagctcagtcaagctgcagaaatatctcattgtcacaaagctccttcatgctaccccttaatggccacagccacctcccttcttcctcagttcctgacacctgtcaaccactaatgcgttcctcgtttttacagttttattatttctagaatgttacataaatggaaccatacagtaggtatccttttgatactggctttttttttttttcactcagcagtattcccttagatctatccaagttgtgtgtgtcaacagttcattcctcttcactgctgagtagtgttccctgggaggggtgtatcacagttccatggcatttttagatgtattttttaaacagctttcagcatcctctattttaattgttcatcaagtcctttttcccaatagactctgaatgctcctttatcatcgtattcccatcaccaacatcagtacccaaataggccctaaataaacatttatagcctcctgcctgcctgagaaaccagggtggacatggagagaaggcacttctgaaagttcaagcgcagtgccctgtgtccttacactccactcctcagtgctttctgtgggttcatttctgtcttctctcctgtcacagtctgcatggaggaggaacccacccacttgaagctgggcgtgtccattcagaacctggtaaaagtctaccgagatgggatgaaggtggctgtcgatggcctggcactgaatttttatgagggccagatcacctccttcctgggccacaatggagcggggaagacgaccaccatgtaagaagagggtgtggttcccgcagaatcagccacaggagggttctgcagtagagttagaaatttataccttaggaaaccatgctgatccctgggccaagggaaggagcacatgaggagttgccgaatgtgaacatgttatctaatcatgagtgtctttccacgtgctagtttgctagatgttatttcttcagcctaaaacaagctggggcctcagatgacctttcccatgtagttcacagaattctgcagtggtcttggaacctgcagccacgaaaagatagattacatatgttggagggagttggtaattcccaggaactctgtctctaagcagatgtgagaagcacctgtgagacgcaatcaagctgggcagctggcttgattgccttccctgcgacctcaaggaccttacagtgggtagtatcaggaggggtcaggggctgtaaagcaccagcgttagcctcagtggcttccagcacgattcctcaaccattctaaccattccaaagggtatatctttggggggtgacattcttttcctgttttctttttaatctttttttaaaacatagaattaatatattatgagcttttcagaagatttttaaaaggcagtcagaaatcctactacctaacacaaaaattgtttttatctttgaataatatgttcttgtttgtccattttccatgcatgcgatgttaggcatacaaaatacattttttaaagaatactttcattgcaaattggaaacttcgtttaaaaaatgctcatactaaaattggcatttctaacccataggcccacttgtagttatttaccgaagcaaaaggacagctttgctttgtgtgggtctggtagggttcattagaaaggaatgggggcggtgggagggttggtgttctgttctctctgcagactgaatggagcatctagagttaagggtaggtcaaccctgacttctgtacttctaaatttttgtcctcaggtcaatcctgaccgggttgttccccccgacctcgggcaccgcctacatcctgggaaaagacattcgctctgagatgagcaccatccggcagaacctgggggtctgtccccagcataacgtgctgtttgacatgtgagtaccagcagcacgttaagaataggccttttctggatgtgtgtgtgtcatgccatcatgggaggagtgggacttaagcattttactttgctgtgtttttgttttttctttttttcttttttatttttttgagatggagtctcgctctgtagccaggctggactgtagtggcgcgatctcggctcactgcaaccttggcctcccaggttcaagcgattctcctgcctcagcctcccgagtagctgggactctaggcacacaccaccatgcccagctaatttttgtgtttttagtagagacggggtttcaccatgttggccaggatggtctcaatgtcttgacctcgtgatccgcccacctcggtctcccaaagtgctgggaacacaggcatgagccactgtgtctggccacattttactttctttgaatatggcaggctcacctccgtgaacaccttgagacctagttgttctttgattttaggagaagtgggaggtgaatggttgagctgtagaggtgacatcagcccagccagtggatgggggcttgggaaacattgcttcccattattgtcatgctggagggccctttagcccatcctctcccccgccaccctccttattgaggcctggagcagacttcccagacctggtagtgcttcagggccctggtatgatggacctatatttgctgcttaagacatttgctcccactcaggttgtcccatcagccataaggcccccagggagcccgtgtgatggagcagagagagacctgagctctgcaatcttgggcaaggcttttcccttatgtttcttcttatctaaagtgaacagctggggctcatgtgctccctcctcatctaaagtgaacacatggggctcatgtgcagggtcctccccgctttcagagcctgaggtcccctgaggctcaggaaggctgctccaggtgagtgccgagctgacttcttggtggacgtgctgtggggacagcccattaaagaccacatcttggggccctgaaattgaaagttgtaactgcctggtgcatggtggccaggcctgctggaaacaggttggaagcgatctgtcacctttcactttgatttcctgagcagctcatgtggttgctcactgttgttctaccttgaatcttgaagattatttttcagaaattgataaagttattttaaaaagcacggggagagaaaaatatgcccattctcatctgttctgggccaggggactctgtattctggggtatccagtagggcccagagctgacctgcctccctgtccccaggctgactgtcgaagaacacatctggttctatgcccgcttgaaagggctctctaagaagcacgtgaaggcggagatggagcagatggccctggatgttggtttgccatcaagcaagctgaaaagcaaaacaagccagctgtcaggtgcggcccagagctaccttccctatccctctcccctcctcctccggctacacacatgcggaggaaaatcagcactgccccagggtcccaggctgggtgcggttggtaacagaaacttgtccctggctgtgcccctaggtcctctgccttcactcactgtctggggctggtcctggagtttgtcttgctctgtttttttgtaggtggaatgcagagaaagctatctgtggccttggcctttgtcgggggatctaaggttgtcattctggatgaacccacagctggtgtggacccttactcccgcaggggaatatgggagctgctgctgaaataccgacaaggtgcctgatgtgtatttattctgagtaaatggactgagagagagcggggggcttttgagaagtgtggctgtatctcatggctaggcttctgtgaagccatgggatactcttctgttagcacagaagagataaagggcattgagactgagattcctgagaggagatgctgtgtctttattcatctttttgtccccaacatggtgcactaaatttatggttagttgaaagggtggatgcttaaatgaatggaagcggagaggggcaggaagacgattgggctctctggttagagatctgatgtggtacagtatgaggagcacaggcaggcttggagccaactctggctggccctgagacattgggaaagtcacaacttgcctcaccttctttgccgataataatagtggtgcttacctcatagaggattaaattaaatgagaatgcacacaaaccacctagcacaatgcctggcatatagcaagttcccaaataaaatgctactgttcttacctctgtgaggatgtggtacctatatatacaaagctttgccattctaggggtcatagccatacagggtgaaaggtggcttccaggtctcttccagtgcttacccctgctaatatctctctagtccctgtcactgtgacaaatcagaactgagaggcctcacctgtcccacatccttgtgtttgtgcctggcaggccgcaccattattctctctacacaccacatggatgaagcggacgtcctgggggacaggattgccatcatctcccatgggaagctgtgctgtgtgggctcctccctgtttctgaagaaccagctgggaacaggctactacctgaccttggtcaagaaagatgtggaatcctccctcagttcctgcagaaacagtagtagcactgtgtcatacctgaaaaaggtgagctgcagtcttggtgctgggctggtgttgggtctgggcagccaggacttgctggctgtgaatgatttctccatctccaccccttttgccatgttgaaaccaccatctccctgctctgttgcccctttgaaatcatatcatacttaaggcatggaaagctaaggggccctctgctcccattgtgctagttctgttgaatcccgttttccttttcctatgaggcacagagagtgatggagaaggtccttagagggcattattatgtcaaagaaaagagacttgtcaataggtaagagccttggctacaaatgacctggtgttcgtgctcattacttatcaatctcattgaccttaacttttgagctataaagcagccaatatttattaggctctgatttcatgccagagacactctgttcatgaaagaaagtaatgataatagttaattttatatagcgttgataccatttacaacctttttttttttttaacctctatcatctcaattaaagggcagagagaccctgggaagaaggtaactatatttattatcccagatgagggaagtgaggcttgtagggaattggtagctgattcaaggtcacccagcaggtaaataacagtggtgggaccagacccaattaccaggtatgttttcctctgtaccgcagtacatgcctgagatttatttgtgtgttgaagccagtggtacctaatgtatttacatcccaacctgaaactcctatccacttatttaccttttaatgagcctcttaactcaagtgcagtctgaggaccagcagcatcaggatcacttgggaacttgttagaaattcagcaacctgggcccagctcagacctaccgaatcagaatctgtgcattttaacaaggttcttgagtggttgaacacacattaaagcatgagaagcattgaactagacatgtagccaggtaaaggccttgcctgagatggttggcaaaggcctcattgcagcattcattggcaggccacagttcttttggcagctctgcttcctgacctttcaccctcaggaagcgaggctgttcacacggcacacacatgccagacagggtcctctgaagccacggctgccagtgcatgtgtcccagggaaagctttttcctttagttctcacacaacagagcttcttggaagccctccccggcgaaggtgctggtggctctgccttgctccgtccctgacccgttctcacctccttctttgccatcaggaggacagtgtttctcagagcagttctgatgctggcctgggcagcgaccatgagagtgacacgctgaccatcggtaaggactctggggtttcttattcaggtggtgcctgagcttcccccagctgggcagagtggaggcagaggaggagaggtgcagaggctggtggcgctgactcaaggtttgctgctgggctggggctgggtggctgcgggtgtgggagcagcttggtggcgggttggcctaatgcttgctggggtgcctggggctcggtttgggagctagcagggcagtgtcccagagagctgagatgattggggtttggggaatcccttaggggagtggacactgaataccagggatgaggagctgagggccaagccaggagggtgggatttgagcttagtacataagaagagtgagagcccaggagatgaggagcagccttccagatttttcttgggtagcgtgtgtaggaggccagtgtcaccagtagcatatgtggaaacagaagtcttggcccttgctatctctgcctagtcctaatggctgacttttcccaggaaggcttctgcttccatggactgttagattaaccctttatttaggtaaatgagggaacctactttataagcataggaaagggtgaagaatcttnnnnnnnnnnnnnnnnnnngagctcggcacccgcagatcccctcgcagccctctgtcccttgttcatttctggccttagagaaagcaaagcagggtctgtaacaggggaggctgcctctaaactcagggtttggttacagctgttttcacttacatcactggccctggttttttttttttttctggcattaaaaaaaaaaattggaagcaggtgatgttcccattgctgatgtggtggaaactctccaagtgaacaatatacgtttttcttggcagctgtttcttgtgccctgcttgctcctggtccaggacaagcaaggaccatctgcctctttcaatagaacacctccagatcccggtgatacaaaggtgaataagacatagtcctttcctttgcccccaaccctcagaccagagatgaacatgtggaatgacctaaacacctggaacaggtgtggtgtatgagcggcaggcctctgatgagagggtgggggatggccagccctcactccgaagcccctctgagttgattgagccatctttgcattctggtccctgcagatgtctctgctatctccaacctcatcaggaagcatgtgtctgaagcccggctggtggaagacatagggcatgagctgacctatgtgctgccatatgaagctgctaaggagggagcctttgtggaactctttcatgagattgatgaccggctctcagacctgggcatttctagttatggcatctcagagacgaccctggaagaagtaagttaagtggctgactgtcggaatatatagcaaggccaaatgtcctaaggccagaccagtagcctgcattgggagcaggattatcatggagttagtcattgagtttttaggtcatcgacatctgattaatgttggccccagtgagccatttaagatggtagtgggagatagcaggaaagaagtgttttcctctgtaccacagtacatgcctgagatttgtgtgttgaaaccagtggtacctaacacatttacatcccaaccttaaactcctatgcacttatttaccctttaatgagcctctttacttaagtacagtgtgaggaacagcggcatcaggatcacttgggaacttgttagaaattcagcaacttgggcccagctcagacctactgaatcagaatcaggagcaattctctggtgtgactgtgtcacagccaggtatcaactggattctcatacataggaaatgacaaacgtttatggatggatagtctacttgtgccaggtgctgagatttgttttttgttttttgatttttttttaatcactgtgacctcatttaattctcaaaaaaagatgaaaaaatgaacactcaggaatgctgacatgagattcagaatcaggggtttggggcttcaaagtccatcctctctttatccatgtaatgcctccccttagagatacaacatcacagaccttgaaggctgaaggggatataaaagctgtctggccaagtggtctccaagcttgacagtgcagcagaatcacctggggatattattaaaaataaacatactaaggtttggcttcagggcctgtgaatcagaatttctggaggtgaggccttgaagtctgtatttctattgcatactttggacacagtggtctatagactagagtttggaaatgattgcgctcattcagattctcttctgatgtttgaattgctgccatcatatttctagtgctctatttcctcctgctcattctgtcttggataacttatcatagtactagcctactcaaagatttagagccacagtcctgaaagaagccacttgactcattccctgtaggttcagaataaatttcttctgcgcagtgtctgtcatagctttttttaaatttttttttatttttgatgagactggagttttgctcttattgcccaagctggagtgcagtggtgcgattttggctcactgcaacctccacctcccaggttcaagcgattctcctgcctcagcctcccaagtagctgagattacaagcatgtgctaccacgcccagctaattttgtatttttagtagagatgggttttatccatgttggtcaggctggtctcgagctccagacctcaggtgatctgcccgcctcggcctcccaaagtgctgggattataggcctgagccacagcgctcagccataactttaatttgaaaatgattgtctagcttgatagctctcaccactgaggaaatgttctctggcaaaaacggcttctctcccaggtaactctgagaaagtgttattaagaaatgtggcttctactttctctgtcttacggggctaacatgccactcagtaatataataatcgtggcagtggtgactactctcgtaatgttggtgcttataatgttctcatctctctcattttccagatattcctcaaggtggccgaagagagtggggtggatgctgagacctcaggtaactgccttgagggagaatggcacacttaagatagtgccttctgctggctttctcagtgcacgagtattgttcctttccctttgaattgttctattgcattctcatttgtagagtgtaggtttgttgcagatggggaaggtttgttttgttgtaaataaaataaagtatgggattctttccttgtgccttcagatggtaccttgccagcaagacgaaacaggcgggccttcggggacaagcagagctgtcttcgcccgttcactgaagatgatgctgctgatccaaatgattctgacatagacccaggtctgttagggcaagatcaaacagtgtcctactgtttgaatgtgaaattctctctcatgctctcacctgttttctttggatggcctttagccaaggtgatagatccctacagagtccaaagagaagtgaggaaatggtaaaagccacttgttctttgcagcatcgtgcatgtgatcaaacctgaaagagcctatccatatcacttcctttaaagacataaagatggtgcctcaatcctctgaacccatgtatttattatcttttctgcggggtcctagtttcttgtatacattaggtgtttaattgttgaacaaatattcattcgagtagatgagtgattttgaaagagtcagaaaggggaatttgctgttagagttaattgtaccctaagacttagatatttgaggctgggcatggtggctcatgccagtaatcccagcgctttgagaggctgaggtgggtagatcacctgaggtcaggagtttgagaccagtctgaccaacaaggtgaaaccccgtctctactaaatacaaaaaattagccgagtgtggtggcacatgcctgtcatcccagctacttgggaggctgaggcaggagaatcgcttgaacccaggaggcagaggttgcagtcagccacggttgcgccattgcactccagactgggcaacaagagtgaaaactccatctcaaaaaagaaaaaaaaagaattagatattttggatgagtgtgtctttgtgtgtttaactgagatggagaggagagctaagacatcaaacaaatattgttaagatgtaaaagcacatcagttaggtatcattagtttaggacaaggatttctagaaaatttttaggaacagaaaactttccagttctctcacccctgctcaaagagtgtatggctcttacattatatataactgcctgacttcatacagtatcagtacttagatcatttgaaatgtgtccacgttttaccaaaatataatagggtgagaagctgagatgctaattgccattgtgtattctcaaatatgtcaagctacgtacatggcctgtttcatagagtagtctataagaaattgatgacttgattcatccgaatggctggctgtaacacctggttacgcatgaacacctcttttcagttgtctcaagacacctttcttttctgtacttatcagacaaggactgaaaggcagagactgctactgttagacattttgagtcaagcttttccttggacatagctttgtcatgaaagccctttacttctgagaaacttctagcttcagacacatgccttcaagatagttgttgaagacaccagaagaaggagcatggcaatgccgaaaacacctaagataataggtgaccttcagtgttggcttcttgcagaatccagagagacagacttgctcagtgggatggatggcaaagggtcctaccaggtgaaaggctggaaacttacacagcaacagtttgtggcccttttgtggaagagactgctaattgccagacggagtcggaaaggattttttgctcaggtgagacgtgctgttttcgccagagactctggcttcatgggtgggctgcaggctctgtgaccagtgaaggcaggatagcatcctggtcaagatatggatgccggagccagatttatctgtatttcaatcccagttctattccttgccagttgtgtatccgctggcaagttacttctctatgcctcaatctcctcatctgtaaaatggggataataatattacctgcaatacagggttgttacgaaaataaaaatgaataggtgcttagaatggggcctgacattagtaagtgcttagttttgtgtgtgtatatgttatttttattttggaggagaacataaaaaggacaaagtgtagaaaaactggttgggtgtattcagctgtcataacatgagagttgttatgcccagatgcacttgacatgtgaatttattagaaacatgatttttctctgagttgatgtttaactcaaactgatagaaaagataggtcagaatatagttggccaacagagaagacttgttagactattgtctgcatgtcagtgtttgcatgctaacttgcttagttagaaaggttaaattttttcactctataaaatcaagaaatatagagaaaaggtctgcagagagtctttcatttgatgatgtggatattgttaagagcgggagtttggagcatacagagctcaagttgaatcctgactttgctacttattggctatatgaccttgggcaagctgcttagtctctctgatcctcagttacctttgtttgttgatgatgaccattgataacacaaccataaataatgacaacatagagatagttctcattatagtagttgttatacagaattattcactcaatgttaattttctgcattgaaatcccagaacattagaattgggggcattatttgaatctttaaggttataaggaatacatttctcagcaataaatggaaggagttttgggttaacttataaagtatacccaagtcatttttttttcagagaagatatggtagaaagtcttaggaggttgaagaaggaattggatatttattctttctgagactatcatgggagataatgactatggttgtccatgattggagccgttgctgtagagttggttttattatagtgtaggatttgaatgggccatgtgttctcagacctcagattaaaatgagaaaactgaggccagtggggagcgtgacttcacatgggtacacttgtgctagagacagaaccaggattcaggacttctggctcctggtcctgggttcatggcccaatgtagtctttctcagtcttcaggaggaggaagggcaggacccagtgttctgagtcaccctgaatgtgagcactatttacttcgtgaacttcttggcttagtgcctctgccaggtggccataacctctggccttgtgttgccagagaaaaggtttagttttcaggctccattgcttcccagctgccaagaatgccttggtgcagcacagtcataggccctgcattcctcattgccgtgctggttggtcggggaggtgggctggactcgtagggatttgccccttggccttgtttctaacacttgccgtttcctgctgtccccctgccccctccactgcctgggtaaagattgtcttgccagctgtgtttgtctgcattgcccttgtgttcagcctgatcgtgccaccctttggcaagtaccccagcctggaacttcagccctggatgtacaacgaacagtacacatttgtcaggtatgtttgtcttctacatcccaggagggggtaagattcgagcagaccaaagatgtttacgagggccaagggaatggacttcagaattacacggtggaatgaattttactgctgcggctcaggtccctgtataagctaatactgcatgcatagaacagcagcgaactaaccctgaataataggccagtcttctgttgagcctttcagcctctctcctcttcatcctactgttgtcaggaacagccacatgtgttttaggtgaaataatccacccttgcaaaaatccatgattaagttataaaatatttggatttgtggagctgtgttttaattctgtaactgagtcacagggcacactgtcaaagcatagaacctccagagacttgttttctgcaaagtataattcatgtaattattatctattctgttatatttgggatgttaggtagtgtttgttctttagataaaaatatcccccactctgtaacaatacattaaatcaaagaaaaggacaaaggatttttctgggtcttgttagcaggagctttcttcagtcctgaaagatttgtagacctgtagatgggggaactgtgtcagtgatacaaaagggaagcatttaaaaaaaaaaaagtatatatatatatatatatatatatatgtaatgtgaattggcctctttttctctaagcccacattttcttcttacatagttcaggtttactttattttttcctttccggctgctgaccctgtattgcccgtagttgtggaacatagcatgtgtttgtgacctgtgcctgttatttttgtgctttctagttgtgcatgcaaagagtacaaagttttcttgccctttcttggaaaatcctgcttgtctgtgccaaagggataattgtgaaagcacttttgaaatacttaatgagttgattttcttcaaattaaaaaaaatatataaatgtatatgtgtatgtacatgtgtgtacacatacacacctttatacatacagcccatttaaaacaagctccactttggagtgctctacgtcaccctgatgccgaatacagggccagagtctgagatccttctgggtggtttctgtgttttgttcatttctgttttaagagcctgtcacagagaaatgcttcctaaaatgtttaatttataaaaacatttttatctctcgattactggttttaatgaattactaagctggctgcctctcatgtacccacagcaatgatgctcctgaggacacgggaaccctggaactcttaaacgccctcaccaaagaccctggcttcgggacccgctgtatggaaggaaacccaatcccgtgagtgccactttagccataagcaggcttcttgtgcttgttgcctggtttgatttctaatatgctgcatttatcaactgcatgccacattgtgaccgccagcatttgccctttgaattattattatgttttatttacaaaaagcgaaggtagtaaccgaactaaattatctaggaacaaacgtttggagagtcttctaacaccgtgcaaagcacgtcattacagacatttgtttactgatttagaaccttaatatttaatttaaatagcactttacacttactgatgaaatgcttttcctttctttctctcccagcccctgtacttaagtgcttcaataggctctcattatatatgatttttaggttttgtttatcagcttcttcgcttttataatctgaaaagatggcatatgaatttttataaaaagggacactttcttcttctcaaattgtatatttttattgtactttccttcaaaacccccttttaaaaagtaagcagtagataaataaattcagtgaagcatccatatgactcttaagtgagtgtaggggaagggaggtcaccagatcactgtgagtgaagatggtggagaggtgaggatcttatgaggccgtgctcaaggctggtagaggtgggttagtgtttccaggtttaggcagaatctcagctgaggtcatgaaacaacagtgatctctgaaaaattatggcaaggtgggaaggtgctggagaattggagagggggcaaacttgactttcaagtttcaatgggaagataggtgactctgcacaccacagaacagtgagcatgataacctgtttatacaaggttctagagcagatttctaaatggatagctactgtgtgcttgtttgttcttaattagtattggatagttactaaatacttgttagtacttagtacataatgggtggtaaatcctagcagctaatattggttcccaaataaccagatgacaaggatagagaaggacacagacacggcctatctggatttcatggtgcctttgattttccacatgaaggttgtgtagggaagatagaagcatgagatgagatgataatatagttatctggattcatcactggccagctgaaccatatgaactcatggattgatgctagcttaggaaggctctgtaggagccagaactgggctgagagccagcccatagagacaaaagaggcccggccctgacatcagagggttcaaacatgatgtctgagccccacctacagtctgccggaggtggttggaaggaagagcctttatccttacaattcttactgaaattcaaatttttaggttttgcaaaaaaatggtggacctgaaggaaatttgacaggagcatgtctcagctgtatttaaatttgtctcagccaatccccttttgaatgttcagagtgtaagcttcaggagggcagcgcgtcttagtgtgacttttctggtcagttcaggtgctttaaggagacaattagagatcaatctggaaaacttcatttgaatttttaatacataagaaaacaataagaaatagttaaaaatatatatttatataatatatatgtgtgtgtgtgtgtgtgtgtgtatatatatatatatattttatttatttatttttttttgagatggagtctcgctctgttgcccaggctggagtgcagtggctcaatcttggctcactgccacctctgcctcccaggttcaagtgattctcctacctcagcctcctgagtagctgggattacaagcatgtgccaccacactggctaatttttctaattttagtagagatggagtttcaccatgttggacaggatggtcttgaactcctgacttagtgatccacccgccttcgcctcccaaagttctgggattacaggcatgagccatcgtgcctggcaattatatttaatatttaataataaggaaataattgctgtaactttactttaaattgtggaattctgaaactggaagggaactggaaatgacttgttgaatcaaatcattttaaacttttattttgccagtggaaaaaataagcccccaaaagagcaggggacctgctgatgtcccacagtaattcagagctggagatgaggttgaaggctttgtgtcttatctccagggaaaatttgtagacagcgtagctctttatgtgacgagcattctcaccccagtcatcccccaattctctactcatttgagaacataaattggatcttgccagtctctactcatttttcagcacatcgagcataagatccagactctttcccaggcctctctcatctggctcctctcctcctcctttatcattactcttcttcgtagcttatcctactccagccatgctgtcttcctattattcctaaaaagtagaaatgcatttcttcctagggcctttgtacctgcacttgccatcgcttttgctcagaatgttctttttgccaagcttttgcccagcttgttctccatcattgttatgttttggctgaaatgtcttctcttagtaggttcattctccccagtcactgtctttttattttgctttattttgggccatctaaggttatcttattagtgtatttgttgttcgtctcctccatgggcatacacctccatgaaggcaggtattttcaccttaggccctcgaatatactggacagcatctggcacgtagtagatgctcaacgaatgtttgttgtgtgagcaaatggttggttgattggattgaactgagttcagtatgtaaatatttagggcctctttgcattctattttacttatgtataaaatgatacataatgatgatataaatgatgtcacagtgtacaaggctgttgtgggatcaagcaatcaaatgagatcatgcttgtcttttccaaatggtgagggaatagatgcatgtttgtggttgttacggaatgatcctgtgctcctgaggcaacagaaaggccaggccatctctggtaatcctactcttgctgtcttccctttgcagagacacgccctgccaggcaggggaggaagagtggaccactgccccagttccccagaccatcatggacctcttccagaatgggaactggacaatgcagaacccttcacctgcatgccagtgtagcagcgacaaaatcaagaagatgctgcctgtgtgtcccccaggggcaggggggctgcctcctccacaagtgagtcactttcagggggtgattgggcagaaggggtgcaggatgggctggtagcttccgcttggaagcaggaatgagtgagatatcatgttgggagggtctgtttcagtcttttttgttttttgtttttttttctgaggcggagtcttgctctgtcgcccaggctggagtgctgtggcatgatcttgcctcactgcaacctccacctcccaggttcaagcgattctcctgcctcagcctcctgagtagctgggattacaggcacgcaccaccatgtctggctaatttttgtgtttttagtagagatagggtttcgccgtgttggctaggctggtctggaattcctgacctcaggtgatccacccgcctcggcctcccaaagtgctgggattacaggcgtgagccactacgcccagccctgtttcagtctttaactcgcttcttgtcataagaaaaagcatgtgagttttgaggggagaaggtttggaccacactgtgcccatgcctgtcccacagcagtaaagtcacaggacagactgtggcaggcctggcttccaatcttggctctgcaacaaatgagctggtagcctttgacaggcctgggcctgtttcttcacctctgaattagggaggctggaccagaaaactcctgtggatcttgtcaactctggtattcttagagactctgtttgggaaggagtcctgagccattttttttttcttgagaatttcaggaagaggagtgcttatgatagctctctgctgcttttatcagcaaccaaattgcaggatgaggacaagcaattctaaatgagtacaggaactaaaagaaggcttggttaccactcttgaaaataatagctagtccaggtgcggggtggctcacacctgtaatctcagtattttgggatgccgaggtggactgatcacctaaggtcaggagttcgaaaccagcttggccaatgtggcgaaaccctgtctctactaaaaattcaaaaattagccaggcatggtggcacatgcctgtaatcccagttacttgggaggctgaagcaggagaattgcttgaacctgggaggtggaggtcgcagggagccaaaattgcgccactgtactccagcctgagcaacacagcaaaactccatatcaaaaaataaaatgaataaaataacagctaatctagtcatcagtataactccagtgaacagaagatttattaggcatagtgaatgatggtgcttcctaaaaatctcttgactacaaagaatctcatttcaatgtttattgtttagatgttcagaataaattcttgggaaagaccttggcttggtgtaagtgaattaccagtgccgagggcagggtgaaccaagtctcagtgctggttgactgagggcagtgtctgggacctgtagtcaggtttccggtcacactgtggacatggtcactgttgtccttgatttgttttctgtttcaattcttgtctataaagacccgtatgcttggttttcatgtgatgacagagaaaacaaaacactgcagatatccttcaggacctgacaggaagaaacatttcggattatctggtgaagacgtatgtgcagatcatagccaaaaggtgactttttactaaacttggcccctgccttattattactaattagaggaattaaagacctacaaataacagactgaaacagtgggggaaatgccagattatggcctgattctgtctattggaagtttaggatattatcccaaactagaaaagatgacgagagggactgtgaacattcagttgtcagcttcaaggctgaggcagcctggtctagaatgaaaatagaaatggattcaacgtcaaattttgccacttagtagcaacttgaccaggtaactggttatccttttaaagccttagtttatctaaattgtgatattaatgttgctcttataagtttgtcatgaggactaaattaaatggtgtacatagagtgccttgggtactctctgatgggggactccatgataatttgtggtctcatggagggagctctgggaaggtttaggagcctgccttggctctgcagccttgggagagccttctagcttcccaggacatggcagcctagtgttgaatgcttggctcagcaaatgtttgttctcgtttccttcccatcaacttggtcagttggggtctttcagttaggagtatctcagtgactttaaatggcatgggcatgctggagtgatagtgaccatgagtttctaagaaagaagcataatttctccatatgtcatccacaattgaaatattattgttaattgaaaaagcttctaggccaggcacggtggctcatgcctgtaatcccagcactttaggaggccaaggcgggtggatcacttgaggtcaggagtttgagaccagcctggccaacatggggaaaccctgtctctactaaaaatacaaaataagctgggcgtggtggtgcgtgcctgtaatcccagctacttgggaggctgaggcaggagaattgcttgaatctgggaggcggaggttgcagtgagctgagttcatgccattgcattccagcctgggcaacaagagcgaaaccatctcccaaaagaaaaaaaaaagaaagaaaaagcttctagtttggttacatcttggtctataaggtggtttgtaaattggtttaacccaaggcctggttctcatataagtaatagggtatttatgatggagagaaggctggaagaggcctgaacacaggcttcttttctctagcacaaccctacaaggccagctgattctagggttatttctgtccgttccttatatcctcaggtggatatttactccttttgcatcattaggaataggctcagtgctttctttgaactgattttttgtttctttgtctctgcagcttaaagaacaagatctgggtgaatgagtttaggtaagttgctgtctttctggcacgtttagctcagggggaggatggtgttgtaggtgtcttggattgaagaaagccttggggattgtttgtcactcacacacttgtgggtgccatctcactgtgaggaggacagaagccctgtgaacatgtggagcacacaggggcacagacagatttagattaggcctgctttatagagtttctgcctagagcatcatggctcagtgcccagcagcccctccagaggcctctgaaatatttgatatactgatttccttgaggagaatcagaaatctcctgcaggtgtctagggatttcaagtaagtagtgttgtgaggggaatacctacttgtactttccccccaaaccagattcccgaggcttcttaaggactcaaggacaatttctaggcatttagcacgggactaaaaaggtcttagaggaaataagaagcgccaaaaccatctctttgcactgtatttcaacccatttgtccttctgggttttgaaggaacaggtgggactggggacagaagagttcttgaagccagtttgtccatcatggaaaatgagataggtgatgtggctacgtcagggggcccgaaggctccttgttactgatttccgtcttttctctctgccttttccccaagggccaggacccctggatctctgggcagagcagacgcaggcccctataatagccctcatgctagaagggagccggagcctgtgtataaggccagcgcagcctactctggacagtgcagggttcccactctcccaactccccatctgcttgcctccagacccacattcacacccgagccactgggttggaggagcatctgtgagatgaaacaccattctttcctcaatgtctcagctatctaactgtgtgtgtaatcaggccaggtcctccctgctgggcagaaaccatgggagttaagagattgccaacatttattagaggaagctgacgtgtaacttctgaggcaaaatttagccctcctttgaacaggaatttgactcagtgaaccttgtacacactcgcactgagtctgctgctgatgatactgtgcaccccactgtctgggttttaatgtcaggctgttcttttaggtatggcggcttttccctgggtgtcagtaatactcaagcacttcctccgagtcaagaagttaatgatgccatcaaacaaatgaagaaacacctaaagctggccaaggtaaaatatctatcgtaagatgtatcagaaaaatgggcatgtagctgctgggatataggagtagttggcaggttaaacggatcacctggcagctcattgttctgaatatgttggcatacagagccgtctttggcatttagcgatttgagccagacaaaactgaattacttagttgtacgtttaaaagtgtaggtcaaaaacaaatccagaggccaggagctgtggctcatgcctgtaatcctagcactttgggaggctgaagcgggtggatcacttgaggtcaggagttcgagaccagcctggcctacatgacaaaaccccgtatctactaaaaatacaaaaaaattagctgggcttggtggcacacacctgtaatcccagctacttgggaggctgaggcaggagaattgcttgaaccctgtaggaagaggttgtagtgagccaagatcgcaccgttgcactccagcctgggcaacaagagcaaaactccatctcaaaaaacaaattaaatccagagatttaaaagctctcagaggctgggcgcggtggcttacacctgttatcccagcattttgggatgccgaggcgggcaaagcacaaggtcaggagtttgagaccagcctggccaacatagtgaaaccctgtctttgctaaaaacatagaaaaattagccgggcatggtggcgtgcgcctgtaatcccagctactcgggaggctgaggtgagagaattgcttgaacccgggaggcggaggttgcagtgagcccagattgcaccactgcactccagcctgggcgacagagcaagactccatctcaaaaaaagctctcagaacaaccaggtttacaaatttggtcagttggtaaataaactgggtttcaaacatactttgctgaaataatcactgactaaataggaaatgaatctttttttttttttttttaagctggcaagctggtctgtaggacctgataagtactcacttcatttctctgtgtctcaggtttcccatttttaggtgagaattaaggggctctgataaaacagaccctaggattgtggacagcagtggtagtcctagagtccacaagtctgcttttgagtgatgggcccatgtatctggcacatctgcaggcagagcgtggttctggctcttcagatgatgccggtggagcactttgaggagtcctcaccccaccgtgataaccagacattaaaatcttggggctttgcatcccaggatttctctgtgattccttctagacttgtggcatcatggcagcatcactgctgtagatttctagtcacttggttctcaggagccgtttatttaatggcttcacatttaatttcagtgaacaaggtagtggcattgctcttcacagggccgtcctgttgtccacaggttccagattgactgttgccccttatctatgtgaacagtcacaactgaggcaggtttctgttgtttacaggacagttctgcagatcgatttctcaacagcttgggaagatttatgacaggactggacaccagaaataatgtcaaggtaaaccgctgtctttgttctagtagctttttgatgaacaataatccttatgtttcctggagtactttcaactcatggtaaagttggcaggggcattcacaacagaaaagagcaaactattaactttaccagtgaggcagtacggtgtagtgtagtgattcagagaatttgctttgccaccagacataccaggtaaccttgactaagttacttaacctatctaaacctcagtttcctcatctgtgaaatggagacagtaatcatagctatttccaaactgttgtgagaattcaatgagttaaaggtataaggtcctcaccacagcgcctgcccacatagtcagtgatcactatgtcctgaacactgtaattacttcgccatattctctgatcatagtgttttgccttggtatgtgactagaatttctttctgaggtttatgggcatggttggtgggtatgcacctgcctgcaggagcccggtttgggggcattaccttgtacctggtatgttttctttcaggtgtggttcaataacaagggctggcatgcaatcagctctttcctgaatgtcatcaacaatgccattctccgggccaacctgcaaaagggagagaaccctagccattatggaattactgctttcaatcatcccctgaatctcaccaagcagcagctctcagaggtggctctgtaagtgtggctgtgtctgtatagatggagtggggcaagggagagggttatggagaaggggagaaaaatgtgaatctcattgtaggggaacagctgcagagaccgttatattatgataaatctggattgatccaggctctgggcagaagtgataagtttacgaattggctggttgggcttcttgaactgcagaagagaaaatgacactgatatgtaaaaatcgtaacatttagtgaattcatataaagtgagttcaaaaattgttaattaaattataatttaattataagtgtttaatcagtttgatttgtttaaaaaccactgttttaaatttggtggaatatgtttttattagcttgtatctttaattcctaaattaagctgtgtgtgtgtgtgtgtgtgtgtgtgtgtgtgtgtgtgtgtgtgtgtgtgtgaagtttaaagccaggatgagctagtttaaagtatgcagcctttggagtcatacagatctgggtttgaatctggtctctaaactttatagatgtatgatattaaatgaggcagttcatgtaaattgccaagcccagcactcagcacagagttgatatttcacacacattagatacctttcctgtatgtggagcatggcagttcctgtttctgctttactcctacaggatactaatataggacactaggatctttataccaagaccccatgtaatgggcttatgagaccattcttcttataaaaatctgacagaatttttgtatgtgttagatcaataggctgcatactgttattttcaagttgatttacagccagaaatattaatttatttgagtagttacagagtaatatttctgctctcatttagttttcaagccccactagtcctttgtgtgtgaaaatttacaacttactgctcttacaaggtcatgaacagtggaccaaagtgaatgccattaaccactctgacttccttcattagttttattgtgacagtggactcttttgacctcagtaataccagtttggcatttacattgtcatatttttagacttaaaaatgatcatcttaaccctgaataaaatgtgtctggtgaacagatgtttttccttgggctgtgcctcagatatctctgtgtgtgtgtacgtgtgtgtttgtctgtgtgtccatgtcctcactgattgagccctaactgcatcaaagacccctcagattttcacacgctttttctctccaggatgaccacatcagtggatgtccttgtgtccatctgtgtcatctttgcaatgtccttcgtcccagccagctttgtcgtattcctgatccaggagcgggtcagcaaagcaaaacacctgcagttcatcagtggagtgaagcctgtcatctactggctctctaattttgtctgggatatggtaaggacacaggcctgctgtatctttctgatgtctgtcagggccatggattgatatggataagaaagaaagagctctggctatcatcaggaaatgttccagctactctaaagatgtatgaaaaagaaatagccagaggcaggtgatcactttcatgacaccaaacacagcattgggtaccagagttcatgtcacaccagagggaaaattctgtacacaatgatgaaaattaataccactaccacttaagttcctatgtgacaactttcccaagaatcagagagatacaagtcaaaactccaagtcaatgcctctaacttctctgatgggttttaacctccagagtcagaatgttctttgccttactaggaaagccatctgtcatttgaaaactctgtacattttatcagcagcttatccatccattgcaaatatgtttttgtgccagccacaatatattgcttctatttggaccaatatgggggatttgaaggaattctgaagttctaattatatttcaactctactttacaatatctccctgaaatatatctccctgtaacttctattaattataagctacacagagcaaatctaattcttctcccaccgaacaagtccctggatatttaaaaataactctcatactctcatttaacctgagtattacccagataagatgatatatgagaatacaccttgtaacctccgaagcactgtacaaatgtgagcaatgatggtggagatgatgatgagatctttgctgtttataccaagccccttagactgtgtcactcttctgatccggttgtccttgtatggccatgctgtatattgtgaatgtcccgttttcaaaagcaaagccaagaattaaccttgtgttcaggctgtggtctgaatggttatgggtccagagggagttgatctttagctcacacttctattactgcagcacaaagattttgcattttggaaggagcaccgtcttactggcaacttagtggtaaaccaaaacctccatttcacacaaatgattgtgaaattcgggtctccttcattctatacaaattcatttgatttttttgaaactaaactttatatttatccatattaaattacatgggttttatttttgttttatcttgattcagtaattactcctttcagtaaacacagactgagtgctgtgtgtctgacttatgccaggcataggtgattcagagatgaaaggtcaagtccctgaacccatctcttgtcttcctgggtattatctgtccctccctgctttagagctcctgaaatttgctagaagcatgtcttcatctaagttgttgataaacacatcaagtaggattggactgaggcagagccctgtagtctgaagctgcagttcttctagcggctgacaagccccactatcacttccctgctggtgctttgctctgccagctgtgaattctcataattgtcctatcgtcaagtctttatttctgcattttactgcttgatacactgtcaggacagactttaaaattattctcagtgcgatgaaacaattctgacattcatgttatgagcagttacctcataaatagattacatgtgagattgaacttgggcagactataatatagcattaatgatgaaacagacacagtcatcttcgggaagaagaatagaggcttatttgctgcctgtgaaattaaaattactctgactgggaatccatcgttcagtaagtttactgagtgtgacaccttggcttgactgttggaaagacagaaagggcatgtagtttataaaatcagccaaggggaaaatgcttgtcaaaatgtattgtcgggtattttgattaatagtttatgtggcttcattaattcagagttactctccaatatgtttatctgccctttcttgtctgataatggtgaaaacttgtgtgatgcattgtatatttgatttaggggtgaactggatgtctttgttttcacttttagtgcaattacgttgtccctgccacactggtcattatcatcttcatctgcttccagcagaagtcctatgtgtcctccaccaatctgcctgtgctagcccttctacttttgctgtatgggtaagtcacctctgagtgagggagctgcacagtggataaggcatttggtgcccagtgtcagaaggagggcagggactctcagtagacacttatctttttgtgtctcaacaggtggtcaatcacacctctcatgtacccagcctcctttgtgttcaagatccccagcacagcctatgtggtgctcaccagcgtgaacctcttcattggcattaatggcagcgtggccacctttgtgctggagctgttcaccgacaatgtgagtcatgcagagagaacactcctgctgggatgagcatctctgggagccagaggacagtgtttaattgtgatcttattccacttgtcagtggtattgacactgctgactgccttgtcctgtcttcagagtctgtcttccctgagaaggcaaagcacctttctttcttgctgtgccttacattttgctggtcaagcctttcagtttcttttgacagttttttttacttctttcttttttcaatgttgctcttaccaagagtagctcctctgccttccactttacacatgagagctgggcgacgccattcagtcctaaggcttttaccatcacctctcttggtgtttttattgtcatctctaagatcaatgcctttagccttgatcataaccttgaactctaatctcaaattctcacttgcctagtggattgctccatttagatagtatatagataccccaacctggacatgtcctagttttctttccccttggaacttaatgcttttcttgccatccctgtcacactcagtggcactaccatccactcggttgcccaagctggctcttagagttatcctagatgcttgctttgctgttgcagatttcccacattcaactggttatgttgtcagttcttccaggtatggacctctaaaataaggcttcctctccattccggttgtcattgcctttgtccaaacacagcacacaaggccttttacagttgcacaactcttcctgtccatacccaccacaccctttcccagctgtaagcttcagatgagttgcctccaaccaccatgctcctgtaggcctggcttgaaatgcccttcttctgtcacagggtctggtagtatatcccttgcccttcaagatttagctaaaatgtgaagctttccttacctgctgggaggtgttctctcttttctctgtgctctcagagtccttagtccatgcctccagtacaacgtacatccacttacatggtaatttcctgtttacatacttttcctactcggagtggagtctgtttcttaataattttgcctctcccatgccctagcacagtgcatccagcgtatagccccttattcagttggtagatatttggccactgttgccttgtgggatcataagttctgatgtatttgagaagaatttctaaaattctgacaaaatcctgaaactcaaatattgacccagacatgagcaatttgcttttcaaatgctaagggatttttaatggatttgctttaattaaatctagcctgtttctaagctttattcattatttctccatactcagagcatttctccagattttctaaagaatagaattttattgctacatatcatcagctatgcctgctgctatttaattggtatctgaattaaaaggtctggtttgtccctagagaatcaaattttttcttcactcccatatttcagaacttgatacatttttaggataaaccatgaatgacacccgtttcttctccctcaccctcccttccctcccatttttttttttttttttttttagaagctgaataatatcaatgatatcctgaagtccgtgttcttgatcttcccacatttttgcctgggacgagggctcatcgacatggtgaaaaaccaggcaatggctgatgccctggaaaggtttggtgagtgaagcagtggctgtaggatgctttaatggagatggcactctgcataggccttggtaccctgaactttgttttggaaagaagcaggtgactaagcacaggatgttcccccacccccatgcccagtgacagggctcatgccaacacagctggttgtggcatgggttttgtgacacaaccatttgtctgtgtctctgatagcattgagaaaagtgaaagggcagttttgaaggtaaggaaaatagtgttatttgcttggatccactggctcatgccactgtctgggttggttagaagcactggaaaagtcaaaccataactttgagaattaggtgatcagggaatcagaaggaaagatgcaaactttggctcttttaggcgaatcatgtgcctgcagatgaggtcatttattatcttttacacagtctataaaattataatgtattacatctttttctacctttagaatggttaaaaatatttctccggtagccatatgattattattcatccattagataatatagtcaaatgggccatgttatttactgttcatagaagaggggctttttgcaacttgggctacaaaggagatatgtaaggaatttaaggaatggttacatggaactagatttaattgaatctagtggtttaattgattcactaggatatatgctactgaaaggggaatctgcttaaagtgctttctgatatttattattactaaaacttagaatttattaaaaatactgactgtgaaaattacttgggtcgtttgcctttttaaaaggatttttggcatgtctcattaaaaaaagaaatactagatatcttcagtgaagttacaaatcgaatacacattggctctgaaattctgattgatactgggtcataaaaagttttcccaaatcagacttggaaagtgatcactctcttgttactcttttttccttgtcatgggtgatagccatttgtgtttattggaagatcggtgaattttaaggaacataggcccaaatttgaggaagggccatggtttttgatccctccattctgaccggatctctgcattgtgtctactaggggagaatcgctttgtgtcaccattatcttgggacttggtgggacgaaacctcttcgccatggccgtggaaggggtggtgttcttcctcattactgttctgatccagtacagattcttcatcaggcccaggtgagctttttcttagaacccgtggagcacctggttgagggtcacagaggaggcgcacagggaaacactcaccaatgggggttgcattgaactgaactcaaaatatgtgataaaactgattttcctgatgtgggcatcccgcagccccctccctgcccatcctggagactgtggcaagtaggttttataatactacgttagagactgaatctttgtcctgaaaaatagtttgaaaggttcatttttcttgttttttcccccaagacctgtaaatgcaaagctatctcctctgaatgatgaagatgaagatgtgaggcgggaaagacagagaattcttgatggtggaggccagaatgacatcttagaaatcaaggagttgacgaaggtgagagagtacaggttacaatagctcatcttcagtttttttcagctttatgtgctgtaacccagcagtttgctgacttgcttaataaaagggcatgtgttcccaaaatgtacatctataccaaggttctgtcaattttattttaaaaacaccatggagacttcttaaagaattcttactgagaattcttttgtgatatgaattcccattctcgaatacattggttttatatgcttacatttatgtgttagttattaaaacatactaatattgtatatctagtcaaaactgaggtagagagaataaatggttgattttgagtttgagtttcatagtccaaaaagctgatatattgcctgtgttcaagagggtctatatcagccctctagatgccagcatctccaaattttacttttttggaatctgtacagtatttgcaatatttttattacaaatttctactctgtggaatttaatttttaaaatacctgcaatacatatatatgttgaatagatgaaaaattatgtagatgataatgaatgatacggttctaaaaagacaggttaaaaagtaagttcacttttattttgagcttcagaatcattcagaagccagtcgccacaaacgcagaccaaggctcttggcacatcaaatatgcctatggcttagggttattgacaagtcttatgttgcagtgtatgtggtttatagtcctgccttccacagttgcttgggagagctgtgagtcactgaggcttatgaatgtttacattttgtttgttgcagatatatagaaggaagcggaagcctgctgttgacaggatttgcgtgggcattcctcctggtgaggtaaagacactttgtctatattgcgtttgtccctattagttcagactatctctacccaatcaagcaacgatgctcgttaagaggtaaaagtggattttaaaggcttctgtatttatgccaggatggagcaattagtcatcgagaagagagggaccctgtatgtcaagagaatgatttcagagaatccaatacaatttaagaaaaagcatggggctgggcgcagtgattcactcctgtaatcccagcactttgggaggccgaggtgggcggatcacgaggtcaggagattgagaccatcctggccaacatggtgaaaccccatctctactataaatacaaaaattagctgggcatagtagtgcattcctgtagtcccagctactcgggaggctgaggcaggagaattgcttgaacctaggagggggaggttgcccagattgcgctgctgcactccagcctggtgacagagtgagactcatgtcaacaacaaaaacagaaaaagcacgcacatctaaaacatgcttttgtgatccatttgggatggtgatgacattcaaatagttttttaaaaatagattttctcctttctggtttccgtttgtgttcttttatgcccttttgccagagtaggtggtgcaatttggctagctggctttcattactgtttttcacacattaactttggcctcaacttgacaactcaaataatatttataaatacagccacacttaaaatggtcccattatgaaatacatatttaaatatctatacgatgtgttaaaaccaagaaaatatttgattcttctctgatatttaagaattgaaggtttgaggtagttacgtgttaggggcatttatattcatgtttttagagtttgcttatacaacttaatctttccttttcagtgctttgggctcctgggagttaatggggctggaaaatcatcaactttcaagatgttaacaggagataccactgttaccagaggagatgctttccttaacaaaaataggtgagaaaagaagtggcttgtattttgctgcaaagactttgtttttaatttatttaaagaaataggttgttatttttgattacagtggtatttttagagttcataaaaatgttgaaatatagtaaagggtaaagaagcacataaaatcatccatgatttcaatatctagagataatcacaatttacatttcctttcagtctcattctcttcttttaacagctttattcaggtataatttacatacaatataatttgcttgttttttaagagtataatttagtgatttttggtaaattgagagttttgcaaccatcaccacaatccagttttagaacttttccatcaccccacatctgtcttatatacacatataaatgtgccatacaattgagatcatactgtatgtagaatttaaaattagtttttattgttaatgagtgtattatgaatatttcccagtgggttacatttcctaagatgtggaattttacattgctacataaaatccccctatgtacatgtacctataatttatttaataaattccttataaatgttggacacattagtttccatttttcactatgtaaatatgtccctgtatacatcttttattatttcctcaggaacaattcctacaaagtaaattgccctctctaaagagcatacaaattgactgagccaccgttaggccattttctgagactgcacaggtcacaaagcaatctgatctttgggaatacagctacattttataggcttcttagataatgttactctaagtactttaaatatgtggggcttctctgggcttttttttttttgagacggagtttcactcttactgcccaggctggagagcaatggcgcgaccttggctcactgcaacctccgcctcccaggttcaagcgattctcctgcctcagcctcctgagtagctgagattacaggtgcccgccacaatgcctgcctaatttttttgtattttcagtagagatggggtttcaccatgttggccagactggtctcgagctcctgacctcaggtgatccacctgcctcagcctcccaaagttctgggattacaggcatgagccactgcgcccggcttctctggacttattatgtggagagatagtacaaggcagtggctttcagagttttttgaccatgaccgttgtgggaaatacattttatatctcaacctagtatgtacacacagacatgtagacacatgtataacctaaagtttcataaagcagtacctactgttactaattgtagtgcactctgctatttcttattctaccttatactgcgtcattaaaaaagtgctggtcatgacccactaaatttatttcccaaaccactaatgaacaatgactcacaatttgaacacactggacagggggatagccaataaaattgaaaagagcaaggaaattaatgtattcatgatctcctctcctgtctcttacatttttgcagtagcaatgtaaaggaatcctaagagaacagacattctgggaatagcaggcctagcgctgcacaactgctttcctaggcttgctcctagtaccaagctcctgacgcatatagcagtggcagtaataaccagcccatagtaaggtttgtcacagggactggttgtaagaactgatttggttggtatagctgtgagggcctggcacggtgtccacgtgtgcctcaatcctaattctgaaaaaggctgaccctgggggtgctaattagatacacagagaggaatgaatgctgccagaaggccaagttcatggcaatgccgctgtggctgaggtgcagtcatcagtctggaacgtgaacactgaacttctctcacatgtgattcttcacttgactggcttcatagaaccccaaagccaccccaccaccacataaattgtgtctctaggttctgtgttgctcacactcaaaatttctgggccttctcatttggtgcatgtgaatggtgcatatgagtgaagtctaggatggggccttagcattaaagccctggggtagtgtgactgagattgttggtaaagaatgtgcagtggttggcatgacctcagaaattctgaaatgggactgcacctgcagactgaagtgttcagagagccagggaggtgcaaggactggggagggtagaggcaggaaccctgcctgccaggaagagctagcatcctgggggcagaaaggctgtgctttcaagtagcagcagatgtattggtatctttgtaatggagaagcatactttacaggaacattaggccagattgtctaaccagagtatctctacctgcttaaaatctaagtagttttcttgtcctttgcagtatcttatcaaacatccatgaagtacatcagaacatgggctactgccctcagtttgatgccatcacagagctgttgactgggagagaacacgtggagttctttgcccttttgagaggagtcccagagaaagaagttggcaaggtactgtgggcacctgaaagccagcctgtctcctttggcatcctgacaatatataccttatggcttttccacacgcattgacttcaggctgtttttcctcatgaatgcagcagcacaaaatgctggttctttgtatctgctttcagggtggaaacctgtaacggtggtggggcagggctgggtgggcagagagggagtgctgctcccaccacacgagtcccttctccctgctttggctcctcaccagttgtcaggttatgattatagaatctagtcctactcagtgaaagaactttcatacatgtatgtgtaggacagcatgataaaattcccaagccagaccaaagtcaaggtgctttttatcactgtaggttggtgagtgggcgattcggaaactgggcctcgtgaagtatggagaaaaatatgctggtaactatagtggaggcaacaaacgcaagctctctacagccatggctttgatcggcgggcctcctgtggtgtttctggtgagtataactgtggatggaaaactgttgttctggcctgagtggaaaacatgactgttcaaaagtcctatatgtccagggctgttgtatgattggcttgtcttcccccagggacagcagagcaaccttggaaaagcagagggaagcttctcccttggcacacactggggtggctgtaccatgcctgcagatgctcccaaatagaggcactccaagcactttgtttcttagcgtgattgaggctggatatgtgatttgatctttctctggaacattctttctaatcatctttgtgttcattccctgaaaatgaagagtgtggacacagctttaaaatccccaaggtagcaactaggtcatagttccttacacacggatagatgaaaaacagatcagactgggaagtggcccttgaccttttttcttctgtagataagagcattgatgttattacgggaagaagcctttgaggcttttatgtattccacctcggtctggaatttgtttctgtaaggctaacagttgcaatatactagggtaatctgagtgagctggaattaaaaaaaaaaaggaatttcaccccaatcttatactgacttcaatagaggtttcagacaaaaagttgttttgtatatacttatcagtcatgaaaagataattacaactaaatggcctttttccttccctatttatttggagaaatttaattacataaaaaagtactcagaatatttgagtttcctgcatcaataagacatttataataatgaccttgtttacaaatgaatttgaaagttactctaattctttgattcatcaagaaataactagaatggcaagttaaaatttaagctgtttcaaagatgcttctgcatttaaaaacaaatttatctttgattttttttccccccagcaaataagacttattttattctaattacaggatgaacccaccacaggcatggatcccaaagcccggcggttcttgtggaattgtgccctaagtgttgtcaaggaggggagatcagtagtgcttacatctcataggtccgtagtaaagtcttgggttcctcactgtgggatgttttaactttccaagtagaatatgcgatcattttgtaaaaattagaaaatacagaaaagcaaagagtaaaacaattattacctgaaattatatatgcatattcttacaaaaatgcaagcccagtataaatactgctctttttcacttaatatattgtaaacattattccaagtcagtgcatttaggtgtcatttcttatagctggatagtattccattaggatatactcttatttaactattcccccttttgtagacatttggattatttccaacttgttcacaattgtaaacaccactacactgaacagcatcatccctatatccacatgtacttgtaacagaatacaattccctaggaagctggaatgctggaagtcatggtgatgttctcatggttacagagaatctctctaaaactaaaacctctttctgttttaccgcagtatggaagaatgtgaagctctttgcactaggatggcaatcatggtcaatggaaggttcaggtgccttggcagtgtccagcatctaaaaaataggtaataaagataatttctttgggatagtgcctagtgagaaggcttgatatttattcttttgtgagtatataaatggtgcctctaaaataaagggaaataaaactgagcaaaacagtatagtggaaagaatgagggctttgaagtccgaactgcattcaaattctgtctttaccatttactggttctgtgactcttgggcaagttacttaactactgtaagagttagtttccctggaagatctacctcctagctttgtgctatagatgaaatgaaaaaaatttacatgtgccagtactggtgagagcgcaagctttggagtcaaacacaaatgggtttgcatcctggccctaccaattatgagctctgagccatgggcaagtgactaactccctgggcctcagtttctctgtaacatctgtcagacttcatgggtccaggtgaggattaaaggagatcatgtatttacagcacatggcatggtgcttcacataaaataagtatttagtaaatgataactggttccttctctcagaaacttatttctgggcctgccaggggccgccctttttcatggcacaagttgggttcccagggttcagtattcttttaaatagttttctggagatcctccatttgggtattttttcctgctttcaggtttggagatggttatacaatagttgtacgaatagcagggtccaacccggacctgaagcctgtccaggatttctttggacttgcatttcctggaagtgttctaaaagagaaacaccggaacatgctacaataccagcttccatcttcattatcttctctggccaggatattcagcatcctctcccagagcaaaaagcgactccacatagaagactactctgtttctcagacaacacttgaccaagtaagctttgagtgtcaaaacagatttacttctcagggtgtggattcctgccccgacactcccgcccataggtccaagagcagtttgtatcttgaattggtgcttgaattcctgatctactattcctagctatgctttttactaaacctctctgaacctgaaaagggagatgatgcctatgtactctataggattattgtgagaatttactgtaataataaccataaaaactaccatttagtgagcacctaccatgggccaggcattttacttggtgcctaatcctatttaaattagataaaaaagtaccaaataggtcctgacacttaagaagtactcagtaaatattttcttccctcttccctttaatcaagaccgtatgtgccaaagtaaatggatgactgagcagttggtgatgtaggggtggggggcgatatagaaagtcagtttttggccgggcgtggtggctcatgcctgtaatcccagcactttgggaggctgaggagcaggcagatcatgaggtcaggagatccagataatcctggccaacagggtgaaaccccgtctctactaaaaatacaaaaattagctgggcatggtggtgcgcacttgtagtcccagctacttgcgaggctgaggcaggagaattgcttgaacccaggaggtggaggttacagtgagccaaggtctcgccactgcactccagcctggggacagagcaagaccccatttcaaggggggaaaaaaagtctatttttaagttgttattgcttttctcaagtattcttccctccttcacacacagttttctagttaatccatttatgtaattctgtatgctcctacttgacctaatttcaacatctggaaaaatagaactagaataaagaatgagcaagttgagtggtatttataaaggtccatcttaatcttttaacaggtatttgtgaactttgccaaggaccaaagtgatgatgaccacttaaaagacctctcattacacaaaaaccagacagtagtggacgttgcagttctcacatcttttctacaggatgagaaagtgaaagaaagctatgtatgaagaatcctgttcatacggggtggctgaaagtaaagaggaactagactttcctttgcaccatgtgaagtgttgtggagaaaagagccagaagttgatgtgggaagaagtaaactggatactgtactgatactattcaatgcaatgcaattcaatgcaatgaaaacaaaattccattacaggggcagtgcctttgtagcctatgtcttgtatggctctcaagtgaaagacttgaatttagttttttacctatacctatgtgaaactctattatggaacccaatggacatatgggtttgaactcacacttttttttttttttttgttcctgtgtattctcattggggttgcaacaataattcatcaagtaatcatggccagcgattattgatcaaaatcaaaaggtaatgcacatcctcattcactaagccatgccatgcccaggagactggtttcccggtgacacatccattgctggcaatgagtgtgccagagttattagtgccaagtttttcagaaagtttgaagcaccatggtgtgtcatgctcacttttgtgaaagctgctctgctcagagtctatcaacattgaatatcagttgacagaatggtgccatgcgtggctaacatcctgctttgattccctctgataagctgttctggtggcagtaacatgcaacaaaaatgtgggtgtctccaggcacgggaaacttggttccattgttatattgtcctatgcttcgagccatgggtctacagggtcatccttatgagactcttaaatatacttagatcctggtaagaggcaaagaatcaacagccaaactgctggggctgcaagctgctgaagccagggcatgggattaaagagattgtgcgttcaaacctagggaagcctgtgcccatttgtcctgactgtctgctaacatggtacactgcatctcaagatgtttatctgacacaagtgtattatttctggctttttgaattaatctagaaaatgaaaagatggagttgtattttgacaaaaatgtttgtactttttaatgttatttggaattttaagttctatcagtgacttctgaatccttagaatggcctctttgtagaaccctgtggtatagaggagtatggccactgccccactatttttattttcttatgtaagtttgcatatcagtcatgactagtgcctagaaagcaatgtgatggtcaggatctcatgacattatatttgagtttctttcagatcatttaggatactcttaatctcacttcatcaatcaaatattttttgagtgtatgctgtagctgaaagagtatgtacgtacgtataagactagagagatattaagtctcagtacacttcctgtgccatgttattcagctcactggtttacaaatataggttgtcttgtggttgtaggagcccactgtaacaatactgggcagccttttttttttttttttttaattgcaacaatgcaaaagccaagaaagtataagggtcacaagtctaaacaatgaattcttcaacagggaaaacagctagcttgaaaacttgctgaaaaacacaacttgtgtttatggcatttagtaccttcaaataattggctttgcagatattggataccccattaaatctgacagtctcaaatttttcatctcttcaatcactagtcaagaaaaatataaaaacaacaaatacttccatatggagcatttttcagagttttctaacccagtcttatttttctagtcagtaaacatttgtaaaaatactgtttcactaatacttactgttaactgtcttgagagaaaagaaaaatatgagagaactattgtttggggaagttcaagtgatctttcaatatcattactaacttcttccactttttccaaaatttgaatattaacgctaaaggtgtaagacttcagatttcaaattaatctttctatattttttaaatttacagaatattatataacccactgctgaaaaagaaaaaaatgattgttttagaagttaaagtcaatattgattttaaatataagtaatgaaggcatatttccaataactagtgatatggcatcgttgcattttacagtatcttcaaaaatacagaatttatagaataatttctcctcatttaatatttttcaaaatcaaagttatggtttcctcattttactaaaatcgtattctaattcttcattatagtaaatctatgagcaactccttacttcggttcctctgatttcaaggccatattttaaaaaatcaaaaggcactgtgaactattttgaagaaaacacaacattttaatacagattgaaaggacctcttctgaagctagaaacaatctatagttatacatcttcattaatactgtgttaccttttaaaatagtaattttttacattttcctgtgtaaacctaattgtggtagaaatttttaccaactctatactcaatcaagcaaaatttctgtatattccctgtggaatgtacctatgtgagtttcagaaattctcaaaatacgtgttcaaaaatttctgcttttgcatctttgggacacctcagaaaacttattaacaactgtgaatatgagaaatacagaagaaaataataagccctctatacataaatgcccagcacaattcattgttaaaaaacaaccaaacctcacactactgtatttcattatctgtactgaaagcaaatgctttgtgactattaaatgttgcacatcattcattcactgtatagtaatcattgactaaagccatttgtctgtgttttcttcttgtggttgtatatatcaggtaaaatattttccaaagagccatgtgtcatgtaatactgaaccactttgatattgagacattaatttgtacccttgttattatctactagtaataatgtaatactgtagaaatattgctctaattcttttcaaaattgttgcatcccccttagaatgtttctatttccataaggatttaggtatgctattatcccttcttataccctaagatgaagctgtttttgtgctctttgttcatcattggccctcattccaagcactttacgctgtctgtaatgggatctatttttgcactggaatatctgagaattgcaaaactagacaaaagtttcacaacagatttctaagttaaatcattttcattaaaaggaaaaaagaaaaaaaattttgtatgtcaataactttatatgaagtattaaaatgcatatttctatgttgtaatataatgagtcacaaaataaagctgtgacagttctgttggtctacagaaatttacttttgtgcatttgtggcaccacctactgttgaagggttataaagccattagaaaagtagaggggaagtgatttggatcaaaaggaaaaactttagaaaagattcagatgttcccttaatcataaaagagaactgaggggactacttgaaaataaaaggttgttttgtattttcatgttggttaagatactgagtaactggtattaagtgttagaggtttttagataaatattctgcttaatgattatgaagctgcactgagatttctgaaaatgctctgtagctgagcttatttaataaatgttcacttggtataggggaagctacaaaggcagccttcagtgtccttttgtttattcaaccaaaaatataaggacacaatgtagcagttatactgggaaggtgctgggggtggtggcaatggtgagcaggaaggcgaagtagatatggaaacagaaatgatactaatatcggtgattccttccttttttcctgtaataagtgctgtgcagacaacatatgagcagtgctgataaatgtaaatgtatttttcatagctcattaagaatcagtttcagaaagagatgtctgcttattttgctacttgaagaatccctgtcaaacagtccttttgaggaagtacaagaggctgtctctatttgtgacctcaggaatggctgtgacagtgtcgtgagcagtccttttcctgtggcacagatctgaactttgtgtgcagaaaaatcttggcttcaagtgagccaagatgccccctgagcatcagcatcacaacttcatcctcctatcttgaagttcatgttatagtgactttaatgaaatcatagaacactgtttcttcgtgaacaatgacgagggagaggaaaaaactttattgaaaaataaaaaggcaggtaatttagatgaaaatatgttacccatgaggttttgtttttgctttttgtttttgtttttgagaaacagaatctcgctctgtcgtccaggctggagtgcagcggcatgatcttggctcactgcaacctccgcctcccgggttcaagcgattctcctcagcttcccaagtagctggtactacaggcatgcgccaccacaaccagctaatttttgtatttttagtagagatggggtttcactatacgttggccaggctggtctcaaactcctgacctaaggtgatccttctgccttgggctcccaaagtgctgggattacaggcatgagccaccttgcctggccctacccatgagccttgactaaaacattcttctatctgtagaaaagcccaaaagaacttttccagattcaaaaaacttggcactttgtaatggtaatgtttacattaagtaaaaaaaaaaaaaaaaacccacttagcttcagttttcaagtgtttactgtgttgtcatgcacttcatttaattctcaacacctgccctatgaggtaaaaagtaccattttacatatgagtaaattacagctcagtggataagaaactcgtccaaaggtacaggttcagtcaagtggcagagggttctttttgttgaagttaggtatcagttaaaattgaccttgtaaaatcacatcagcatcaatatacattaatttaacaaatatttattgaactttactgtatgccagatacttctctaggtactagggggtacaatgtagaagaaaatagaattcctgctctaatgaatttatatttcagtggtgaaagatgatgtgtggacaaacacatctaatgtattttgacagcaatgggtgctaagaagaaaataagacatggtaattggataacaatggagagaagtcagagatggccttttctgaggagtgacatgctcagaatcgaataaaaagagcaggagcagcctttcaaggtgggtgcgaaggatattcccggaagaaagaataagtgttgcaaaagccccagtgggaaaaagcttggcaagctgaggtggtaaaagagctatctgtactaatgtctcttgtactgagttagcaaggacaagagtggcagggggtggaactggagagatagcagggaccacatctcacaggatctcgccagcctttttaaggtatttggattttattgttagtgcaacaaggagccactggagagttttaaacagtagtggtgtgacctactgtttcagaaagaacactggctactatgggaagaaaggacagtaggaagactaatagataatggtggattgaactaagttcacactcaagatcttcgctgtgagtacctctggcctttcttcagtggctgtaggcatttgaccttccttggagnnnnnnnnnnnnnnnnnnnncttggatgcctacgaattctagctcgctacccattaatttaacaaatatttattgaactttactgtatgccagatacttctctaggtactagggggtacaatgtagaagaaaatagaattcctgctctaatgaatttatatttcagtggtgaaagatgatgtgtggacaaacacatctaatgtattttgacagcaatgggtgctaagaagaaaataagacatggtaattggataacaatggagagaagtcagagatggccttttctgaggagtgacatgctcagaatcgaataaaaagagcaggagcagcctttcaaggtgggtgcgaaggatattcccggaagaaagaataagtgttgcaaaagccccagtgggaaaaagcttggcaagctgaggtggtaaaagagctatctgtactaatgtctcttgtactgagttagcaaggacaagagtggcagggggtggaactggagagatagcagggaccacatctcacaggatctcgccagcctttttaaggtatttggattttattgttagtgcaacaaggagccactggagagttttaaacagtagtggtgtgacctactgtttcagaaagaacactggctactatgggaagaaaggacagtaggaagactaatagataatggtggattgaactaagatggtagcaacagatagggagctatggtaatgttcagtatccactttggagatagatccagcaggacttgctgacagactgcatgtaagggctgagggaaagagagctagcaaggtgacttctagtttgtgacctgaactaggtagatggttgtgttaaaaatgcagtgggtatttcagtctgaagctcaggggcaatgatggaaaataagataaatgtgtgcaagttggctgggcgtggtggtgcacgcctataatcacagcactttgggaggccgagacgggtggatcacttgaggtcaggcgtttgcgaccagcctaacatggtgaaaccccatctctaataaatacaaaaaaattagctgggcatggtggtgcatgcctgtaatccaagctacttgggaggctgagacaagagaatcgcttgcacctgggaggcggaggtttcagtgagctgagatcgcaccattgcactccagcctgggcaacaagagcgaaactccatctaaaaaaaaaagtgtgcaagttattggtacgtatatatttaagcctcgggactgaatgagattacctagagagaatgaagatagggaacattcttgagcctgagatcctataacatttagaagagaagctagccagggaaattgagagggactggccagtgagagagagtaaaatctgaagagtataatgccatatgttgaagctcagagaattattgtttcaggaaggcagaagttgtcaattatatccaacattgctgagaagatgagtaaggaatgtaaatgagtaaaggcaggaatggctattgaatttgttaagacagaggtccttggtgaccttcataagagtcatttcagcatgacaaggatgcagacctaactggaatagattttcagggaagactgagaggcaaggaaggggagactgcaaatatatgcaaatctatatttttgctttgaagggaaacagaaaacaggacaacagctggtttacagaacttttatttggattctttccttgtctgttaataatataggctgcacctgggcatcatcgtgcccttcctttttgattctgctgttttgcttttaatcctacaggcatttcttctggcaggagccttgtacacactctgggtggttcatgaccaccacggacttgccctttcaaggcagaagcctgtgattcaaaaacttccattccttccaatcgactattataaaactcattttgtctagtgcccatactcctttaccttaggatcctgggccaactgtcactaaagaaaacaaaccatttcctcctcctgggggaatgtgcttctttcaagaaggtgcttagagaatagacattctaggtgacagcagttatgaaagaggtgtctctaatgaacctaacacttcttccaacatactccaggttcaccctcctttgaagacagaaagtactacaacttcagttgccaccctagtcaggttcataggatttactcagtaggttaagagatggtgctgagaatgaagtccagagtttgagtctacaagtggcatttgcttctcctttgggacttctgtggcagggtgtggaaccaaatcagattggttgcatatctgtttctcttcctgaaaatacaattcaaataccttcatagtctgtgacagcaacttataaccaacaggcaatggtattatttttatttattgatggcactcccccatagccagaacttctactgagtcattcatcgtgtattccaggaatactttccaaatggagtagtgaggcacttccaataacagttatgtaatctgttaacagtggctcaaaatgacatgtgaaggaatgatgtacttcttttttcagactcacagatctcatatgttaattcagtcaacaagtacttagggcttatcacatgccaggcacaggtaatatgacaataatgaaaacaaaaacccttgctgtcatagaattcggtttctagtgggaagagacatacattaacaaatcatatataagtaaaacattaattatggtgataacagaaaaagaaagcaggggagagggatagtgtcttagttcaggttgctgtaacaagagtaccatagacagggtggcttaaacaacaaacatttctttctcacagatctagtggctgggaagtctaagaccagggtgccagcatgaagaagttctggtgaaggcttacattctggtttcctcacagtgagggctcttcacgcccttataaatgcactaattctattacccacatgacctcatctaaaactaactcacaaaggccaaacctcctatgttgagattaaggcttcaacataggaattttgggggggacaaaaacattcagtctctagcagataggggccactgtgggaggggattacaatcttaaatagggttgtcagggaaggcttcatgagggcaaagacctgaggaggcatggaaatgatccacgcagatgcatgtctggggaagagcattccaggcagaggcagtgggaatggaccctcaggtaagagcatgtttagcaagttcagagaaaagcctcttaggtcaggtctggagcgagagtggaaaatgtaacaggacagatcatgtaaagatttgtagaccacagttagaggcttggacaataactctgaggatgacatgaaggtattgggagggggtgttgagcagaggagtgatatgatctggtttatattttagattattctgactgctatgttgaaaatagggttgagagcagaggggaagggcagcacaccagttaagaccacttcccaaaaatccagatgatgatgggcttgaaccaggagagttgctatagggatgtgaagcaatcaaattctagatatttgggacctgctgacaggtacataatggtgtatgagagaaaaggcagtgtgagaatgactctgaagtctgtggcctgagcaaaacagaaacctggagttgccaatagctgagataaagtttctggttaaagatcaagagctcagttttggacaagaggggtgtgagatttctaatagacattcaggtggaggtgtggggaacacacctggatgtgatgagcctggaattcaaattcacatgtgtgaatttgaaaaaagattcagaaaagaggtgtggactggaggagctatccacacacagatagcatttgaagccacaagactgggggtgatgacgcagggagtaagtataaatagaaaagagaagtggtccaaggactcagtccttacatcagaggtcaaagagacaagatggagactaggagatatgaaggcttgtgcagtgagtgtttcggagaaacgaagaaactttccagaagaaaggagaggtcaactgctaacaagtcaagtgaaatgagaactgggaaatgagttgacaagagcaatttggctggcgtgatcagagaatgtttaagagataatgtgagggaagaaaatggaggcaggaagtatgaactactcttttgagtcatattgtaaaggaaaaaaatggggtgattttactcttttttttttttaaagataggaaaaaaaagtatatttatatgctgaggagaagaatccagttgaaggggaatactgtggcttcaggagacaggaaaactgcctaagccacatccttcagcaagtgagtgttcaagtggagggtttgtctttgcttggggcacgggcggttcatccacagtgaaaggagagaaggcagggcatgtggggttggctgtagaaagcgggcagacggggtgggaacttatgaagactcttctgattgttattttctctgttaagtaaaaggaaaggtcattggctaagaatgaagatggacgcgcaggtgctgggagtcatcgaagagaatgaaagaatgaataaaatagagaaaaatacaatgctattatataaacctatacatttaaattactttcctcttcaaattagaccccctggaaggcaaatctctgtcatgttaagttttaggaaaagtcataatctacttggagctaagtatgaagaataaggtatatgatttaaaccacataattctatttttgcttaaaccggggaagcctttaaggtaacgtagagtgtacccattaaaaaagacaaaaatgtcagcttccccttccctttaaatatagtaaggctcaaaggtaattgatgttcataaccctaaggtactataacagtctgaagcaaaatattaaatgtcttctgtagtattttagttaacttttaattttattggtaatttatgtgtagttaaccacatacttgtgcctcaactatttcacataaatgtgagatgtcttaggcctctttgaactctgcatggaaaagaatgctgaggaggtatgtctgtttaagctgccactgcctgcctctcataaataatatctcacattgcataatagcccagataaactgcagatcgcttagagcctgataaatgagaggaaactgtacagtttgttttccaaattgcccttggacagctaattcacaatttactattttatagctgtaagattttaaaaatataaaataacatagctgtaaatacagattatcagaagatagtctgtaaaaatgtaaatataatatagctgtaaatatacactatcggaagtaccaaatctagttttagtaggtagaggcatcaagtaaaatggaaatgaaagatgtttcaaggaaaactccaggacatctgtggcagtactaaagaaaccttccttctcaggttcccagcatgctattttattgatgtaacaacattttcaataaagttggtaaattatcactatattactgtcttatagcaacatagcaagagctttagagatcatataagtataaaatgtgaatttaaaaaaacaatgaatatgcaggatttttattagggcaagcgtttccataaccataaatatttctttaaaacaaataaatgtcccaagatctctgttagtgatccaaactaagtagaaattagtaaaattaattataaatgaacaatttcagcatataaaccaacaagtcttttctagatttttaacactgtgacccaattgcattattttccaagttagaatgactaataatcaatgaatgtaaaagcaataattaatacagatgacattctacttttccacagtaaagaaataaacaatctaatatttttataaatcccattttatatcacaaaataacctttactaagcaaatttttttaaaatctcaggaactatagacatgatgaaaagatagatattttatataaataattcaaaaatactgtcaggcaaggaaatgtaaaatccttatttgagtaaaagaaaatgctataaagcaatgagttatcaaaatacagaagaggtattctaaaacaaatgaaaaaccaagatgatgaaatagtgacaactacttctaatgtgtaacagatactgaaatgccaaggtgaaagtgaactgaattatttcttaaagcagtggagaatatgtaactttcaaaaatgcaagaagcacagcaaattaactaattaacttaccacctccttcaaataaaagcgagaacctcttgggagaatttaagcaccattagcagacacatcttagagcagttaatgaaatgttttgtatttcagtagaaaactatttcaatggtgaaaatgatgcaggaatcagaagcatattctgctgagaaactaggtagttgacactttcccgaactggaaaaacatttcataagaaggcatacagttattggttgaatcacatttgttctaaaaataattcgtgcttagtgaaacagcttaccagccgccacaactctgggatcctcatgggacttatgtctcccagctgcacgactatctgcactctcattccaccaaagaacatgaactgcagaaataaaccacaagtagtttctgaaatatatggcaatagcaaataagaaatattgaaaaagtgaatcagaaatgttgtcttattctttaaatcaaaatcaaaaggtaaaactaaatatgttagttataagatttcagagggatcagaaatttggaagataaatttataagttaaactggaaacataaggccgaagagagaatgcaaagaaacacagcttaaggcacaattaagactagacccgagtttaatgacttcctactatgttttattttttaaaaaaagcagattataaaaaattgtttactgtggaaaatttaggtgatacaaagaaaaaataaaagttagtataatcttaactgcctagataaacctttatcaacatatggtgtgtttcctttaaaaaaaattagtaaaccaaattagggtcttagtgtatattatacttagtaacagattttttaaaatgctgcaacaatgtgagaattttctatgtcaattttgaatgacaaagacaccaaaaacaatcatgataaaaacaaaaattgacaaatggtatctaattacacttaagagcttctgcacagcaaaaaaaaaaacaaaaaaaaaactgtcaacagagtaaacagacaacctccagaatgggagaaaatttttgcaaactacgcatctgacaaaggcctaatatccagcctctataaggaacttaaacaagtttataagagaaaaaaagaatcccattaaaaagtaggtaaagggcatgaatagtcacttttctaaagaagacatatatgagaccaacaaacttatgagaaaatgctcaatatcactgatcattagagaatgcaaatataaaccacaattagataccatctcacaccagtcagaatgcctgttactaaaaagtcaaaaaataacagatgctggtgaggttgtgaaaaaaagggaacacttacaccctgttggtgggagtgtaaattagttcaaccattatggaaagcagtatggtgattcctcaaagagctaaaagcagaactgccattcgacccaacaatcccattactggatatatacccagagaaatataaatcattttaccataaagacatgtgcacgtgaatgttcactgcagcactattcacaatagcaaaaacttggaatcttttcatgaaaacctatatttccaccaacaacagattggataaagaaaatgtggtacatacacaccatggaataccatgcagccataaaaaagaaccagattataacttttgtgggaacatggatgtagctagaggctattatcctcagcaaaccaacagaggaaaagaaaaccagataccacatgttctcacttataaatgggagctaaatgatgagaatttatgaacacaaagaaggaaacaacagacactggggtctacttgagaatggaagatgggaggagggagaggattagaaaagataacaattgggtactgggcttaatacctgagtgattaaataatctgtacaacaaacccccatgacatgggtttacctaagtaacaaatcttcacatgtaccccgtgaacctaaaataaaagttaaaaaacaaacaccagttcagcatttgaaaaaggctccataaagtattaacattctaaaaaaataagatgtaaaataagatgcttatagattttttcaatcctataaacaacaaactctaaaaatttggagataaaaattaaaacaggtaccaaaatgaaaaagagagacgaactgatctaatacacatggcaacttcatagaacaaatggacaactgtacctctgttgagttctccatattctgtgtggaaaacaccaactacttttgtgtagcctaaattgacatgggcattaattgctctttcaaatgcatcaccccacagagctggcccaccaggtttcatctgaaaaacagctagttcatagactcctagaatagggagaaaaataattatttcacagaagacattcaaacaatttctaaccaggttttcctgatttcattagaaggctaaccaatgaagttagaggataatccatgtatacatacatatgcagtcacatttattgattctctgcattatttttctttgcttttatgtttagaaagtctttgtccatgtttaagggtcagttgttaaaattaatcataaagaaaataaagaaaaaggactggaagctatatataaactacactctgaaatatttttaatctataaaatttgtcaggaaaacagatactgagaatgtataatgaagcagaattttcaagctgcctgtctacactttttaaaaaagaaatgcataagagaagtactttctgatatcctacatttccttctccttttcaattttgagaggaaataactttttcctttgtataattttctccggtaggattctatttctagttgacccgaagtcatgtctgagcctttaaggaaaaaaagaaaaccctcaaggagatggttttattcttcctaaatatccaggtaaatgcttaaaaaccattctaccttctggccagaagtataagatgggtggagagaaagaaactagaggacaaggtagattggacaagaaaaaggaaagaaatacaaagttactaaagaattatgaacaacatagaggaagcgaactattaataagacttgacactgagaagccaactgttttacttagtgctgaaagttaaggggagttttaagtacattagaatccaaacaagacttttcaaatctcttataatctaaaataaaatacaaagttgagtttatgggagacataaaatgaaatttaaattagtttatgcttttcgaatctgacctctgtttaaaattagatagaggtaattatttcctttagtgagcaagaagtgaaatcaggaagaagacaaatcttttcaaactgagaaacaagaaagaggaagacacaaaagttaaactacaataatgtagcttagcagtgtaagttaattcattcccccaaaacagtcagtttacaagcaaagatgtacttaatgatttaagattagctgactttgtggaaaaaatacttttatatttaaaagtttatacattttaaaactgtgacaaaatttcataaactacgactcatctacctacacctgttttcctagctcccaagccccactttttcacctgtattgaccatgtcaacttttgttaggcatccgttagatttcaatatggaaaaatacttcattttttgttttaaggataagcaatgtttaaggataagctcaatgttttaaggataagcaaagagctctagaactctaattctcttttttttttttttttttttttgagacggagtctcgctctgtcgcccaggctggagtgcagtggcgagatctcggctcactggaagctccgccttctgagttcacgccattcccctgcctcagcctccctagtagctgggactacaggcatgcaccaccacacccagctaatttttgtatttttggtagagatggggcttcactacgttgaccaggcggatcttgaattcttgacctcaagtgattcgcccgcctcggccttccaaagtgctgagattataggcgtgagccaccgcgcccagtctctaattcatttttatctccagactcatcatatattattatataaaacaaagaattatatatttttttcctatagaactttactctttatagctttaggtctttagtattttactcattaaaactcatagtctaagagggaagaactcaccttcttttggaggcttttctaatttggaccatggtatcaggtaagtaatttccgtctcttgtttatcaatgcgagccaaatttggaatgatagattgttcttgccattccttacagttggctaaggctttccgaacttcagctcgatgagcaaaattatctatgggaggaaaatagttaagaaaatgtttttttatttaaaatcgcccatatttttacttgaattttactcagttcagcaaacgtgcaaggccatatgggaaccccatgttattatgtcgctggagatgccaacataaatatatgtgacaactgctctcaagttactcatggtctaaaaggggagttgaaatgtaaaaaactaacttaattgacatagaatgggctttataggctctaagactttcttaggaagttgtgtgaattaggttcgttattcaatctttctgtgcctcagtttcttattctgtgaagaaaatagtataacatctacctccagtgttgttgtgaggattaaatgaattagtacatgaaaagagcttagaatggtgtttggcaccttagttagtactcagtatatgttaacgattcttatcaatggaagcatttgatttatagagaaagactatttttccttggtggtgggtgattaggtcaaggtacactttgaatcaaagttaacataaatgaaattaagatgcactttttaagcctcttttttgaacaacagctcccaatgaaatagtgctgattcttttatttcttgtcagtaattctttttctctacaacttatttctcttctttctaagttacccaaacaggtatatacatttaccaagatatgggcctagtatagtcagccctccctctccacaggttctgcatctgtggattcaaccaactgcagattaaaaatattttttaaaaatacaagtgaaataatatagtataacaactacttacatagtatctatattgtattagggattaaaaataatctagagatgctttaaagtatatggaaggatgtgtgtgggtttgatggaaacagtatgctgtttcatataatggacttgagctgaatctggtatctacaggggttcctggtaccaacctcctgcaacctcctgcaaatacagagggacaactatagtatatttacttttagggcctcctaagactaatagtaaatgaattatatgatttatgctgaggataaggaataacacctatcttacaagtgaattgtaaagactttacgagcagtttaatgggacacaattaaacttgtggctcacctaacgcacataagtggattatatatgtggtttatctaaagcatataaatgaattataaacactttattagcagttttttcaatgggacatgtttcaacttgtggtttatctaaagcataaattatgttttaatagggtctgttttattataacagggaaaaactaaagagttacgtcaagcatagaatgaacacttttcatattaaattactttatgactattaactttggacactgatcactaaacagtaaatgaaattattaaaagttctttaggtatcctcaagtcctgatgtggactgttaagaacagacatggaagtaacaaacattctggggattcttgttacttgttctctttcctctactaaaccaggggtaggtcagcttcaatatgggaaggactgtctctcattccttttccttacctccctagggtagtatgaaagaattccttgaaactctggggtacagaaatgaaaaaagaagtggtctctaaacataacagaattattaaatctcagagttgggtgacgcttaaaagttaactatcatcctttaaaaacctccatttttataaagctcccaaatggatgaattatttctgcaaaaatgctgatatccagccctagctgtaacaataataagaaaaaaaaaaattatcttatcctaatgacactcctttacccaagaactgcaattaggagtctcataaatttacaaagctttctcccttatttagccagtattccatcttcgtcaataccatatacattagttacacatttaaaacatttttattaaatatacatgtcttttggcaggcccaacggtgatcttaacccacttgaacatttacaattactgctttaaatttttcatgagctatctttatagcaaacgattctaacatttttctgaggattaaagtctaattcacaattttatggtttgatatatgagactgcatgttttctcatttatgataacataagagttcaagcaaggggtggttagaggtgtaccactgggaagaagatctgctaaatttatttttttggtattgcttttaaaaagtcttacttaacctgtatgtatctatggtaatatagatccaagaactaagtcttatgttacatttaacagaatgaaaatctatactgaatactaaaactggatgactctttaccatacttccaaatatgaaacactttattcgttctgcctccaaattctacactccagaatccaaccaattcagagtaagaggtccgaagatgaatgtttttcttaagattttccatgaacgcattcatatttgaaggtttaaggtaataagtacgaaattcatagaacgttccatcgtattgtctagggcccgtagcaaaagatgaacacacctgaaggaggtaagacaaatgtaaatatcttgggaaggtacaattacagatttggttacaaccaaatctgagtctggtacaaggaacacacatagactcattatccattgtttacttttgttgtcaattctccatatacacttgtttacatagagatgtcaataaagataactactcttaattctgatgaatatatagcaactgtttcctagcaggggtctacctctagccattttttcacgagaatttgctcacaagaaggctgtgggatcataatgatactcctttaccgaagaactacatttaagacttagtctctttaatttacaaagggttttcccctgtttagccaatattccatcttactcaataccatatgtattagttccacacattgaaaaaaatttattaagtacacatgccttttggcaggcccaaaaatacgtttactaacaaaaaactcttgtttttaaaaggttcctaaaaaaacaggaagggctattcaggtcaaagtatttcctgaatctactgatgaagactaccggtcaaaaacaggactggaatgtaactaatataaaaggaagctataacttatccaattgcattgtactatgggtgtatactgcataaaggctgaaaaggaaaaaaactcaacaaatgagaattgtctccatcattgtttctaattatagatgcaatatcaagaagtatgtacatttagtgcactcaattataccaagtttatggaactatcctttaagaaccaccctttgtaatagtcatatgcccaatgggtaaattttctgtcctaatctggccctctgagcctgagtgagcttaatgttcagtagcaaatgccctgtcagaaattatccagtctgtctgtatgtacgtacatgcaaatatttatgtaaacacacgtgtatacacagaccactcccgtggcattctagtttacaaatccattcatttaggcatggttagcatgtgacaatttcctgaggctcactacccagaataatctatcgcaacagtttcagtaggcatctttcactgacatatttttggttacaacatgcaaatgtctatgtagtttgtgtgcataacgtcttaattataattgtctatcttgagttcattcatctccagtatgagttatgcccttattgcccaagtgtcttagttttcttagaaaacccttcttcataccaaaaaatacctgcaactatcctttcttttgatggccattctttttgggtcagtttaatcaaattctgaaaataaaaaactgcttagtatctacagtttaaaaatattattatctcggaaaatgggccaatgaggtatttctaataactgcttttaaagttgattttcggagatttgtatctggagatgttatcctaaaaaaacgcaacagctggcgccacgggggtgtcccgggagttgtggcatttaggctagaaacagctggcatcaggctgggcacagtggctcatgcctgcaatccagcactttgggaggccaaggtgggcggatcacgaggtcaggagttcgagaccagcctgaccaacatggtgaaacccccgactctactaaatagtaaacacaaaaaaaattagccgggcgtggtggctggcgcctgtaattccacctactccggaggatgaggcaggagaatcgcttgaacccgggaggcggaggttgcactgagccgagactacgccactgcactccagcctgggcgacagagcgagactccgtctcaaaaacaaaaacaaaaatcacaaaaacactggcatccagttagaaaacccctctgacagcgactgccagcgagacgaccccggcctgtatcctcctccttgcgcgccagacggttccagagaccgcgttagaacttcggcggcggcgcggggccccaggtctgggagcgcctgagcgtggctcgcacgcttcagaaataccccccgcccctcccctcccctccggccagggctcgggcgcgcccccgcggccagtacctgaggcgcgagcgtccgtgaggcaagcgccttggtcaggccgcttctgagaacgagcatggcgcggcttcggcactgagaaaagcagccagccgagtcctttgtgagacttctctgaagtcttcccgagtggaaaaaagcggctcctggaccactggcgaactcaggcaggggcgggactcggcggggtcagctccaccccggcgcgggaggcgcgacaggtcccgcagttggcgtctttctcttcggcgctgagcctcggtcccccttggtttcctgaaacgttcttgccccagacgttagaggtgacagaattagctgaaggctgggatcgttcctgccccacctttctgggccctgacctcattcgctccgatgcgcagttgtgtagattcgtaaatgtgcggcggttgtgcttgtgttgcccctggagaaggaaggggaggtgttcagcgtgtgcatgtgcagtgctttgcatttaaagtcgagatgttgacagggttaacttgtttctttgtttgagacgtagtcttgctctgtcgcccaggctggagtgcactggcgcgatgtcgcctcactgcaagctccgcctcccgggttcacgccattctcctgcttcagcctccccagtagctgggactacaggcgcccgccaccacgccccgctaatttttgtattttttagtagagacggaggacagggttaacttttacaggttgtgatagacgtgtatttgtagaccagtgagccttcgcttttctgcattatctgtccccattgccaccccactgtgatcttggaaggctcctaataaagatttaattttccatgagctcagtggaatagcagcaccgagcctgataggaaaaagtcgaagttaaacatagatagtttgaaactagatcgttctgtaagccttaagagcaaaacagccgacctctggtctagtcctcccagtcccagagtactggtccccagactaaccaccttcaacattttaagctgttcttctaatacctgtttccgtatgttttttatttttttgagacagagtcttgctctgtcgctcaggctggggtgcagtggcatgatcttggctcactgcaacctccgcctcccggtttcaagagattctcctgcctcagcctcctgagtagctggaattacaggcgcacgccacgacacctggctaatttttctatttttagtagagacggcgtttcaccatgttgggcaggctggtcttgaactcctgacctcaggtgatcctctcggctcagcctccctaagtgctgggattacaggcacgagccactgcgcctggcccgtatttttaaataatagtcattttctgctatttcttgcattttcagttatggagagtatgtgttgacttccttctgtggcagatgaggatttaggtctcacagaagccactcccccgggggcttatcatttgtgttgagaacattcaatatcctcctagcaatttgaaactatatattattaactatagttatcctgaagtggtatagagcactagaacttattcctcctatctagctataattttgtttaacaaatctctcccatccttgtcttcctcctaatctttcccatcctctagaatcctgttatactttttatttctgaaatcaacttttttta

SEQ ID NO: 23495 - DNA, 2051 bp, Homo Sapiens
agatcagctgatgccggagggtttgaagccgcgccgcgagggagcgaggtcgcagtgacagcggcgggcgatcggacccaggctgccccgccgtacccgcctgcgtcccgcgctcccgccccagcatgacagccccggcgggtccgcgcggctcagagaccgagcggcttctgacccccaaccccgggtatgggacccaggcggggccttcaccggcccctccgacacccccagaagaggaagaccttcgccgtcgtctcaaatactttttcatgagtccctgcgacaagtttcgagccaagggccgcaagccctgcaagctgatgctgcaagtggtcaagatcctggtggtcacggtgcagctcatcctgtttgggctcagtaatcagctggctgtgacattccgggaagagaacaccatcgccttccgacacctcttcctgctgggctactcggacggagcggatgacaccttcgcagcctacacgcgggagcagctgtaccaggccatcttccatgctgtggaccagtacctggcgttgcctgacgtgtcactgggccggtatgcgtatgtccgtggtgggggtgacccttggaccaatggctcagggcttgctctctgccagcggtactaccaccgaggccacgtggacccggccaacgacacatttgacattgatccgatggtggttactgactgcatccaggtggatccccccgagcggccccctccgccccccagcgacgatctcaccctcttggaaagcagctccagttacaagaacctcacgctcaaattccacaagctggtcaatgtcaccatccacttccggctgaagaccattaacctccagagcctcatcaataatgagatcccggactgctataccttcagcgtcctgatcacgtttgacaacaaagcacacagtgggcggatccccatcagcctggagacccaggcccacatccaggagtgtaagcaccccagtgtcttccagcacggagacaacagcttccggctcctgtttgacgtggtggtcatcctcacctgctccctgtccttcctcctctgcgcccgctcactccttcgaggcttcctgctgcagaacgagtttgtggggttcatgtggcggcagcggggacgggtcatcagcctgtgggagcggctggaatttgtcaatggctggtacatcctgctcgtcaccagcgatgtgctcaccatctcgggcaccatcatgaagatcggcatcgaggccaagaacttggcgagctacgacgtctgcagcatcctcctgggcacctcgacgctgctggtgtgggtgggcgtgatccgctacctgaccttcttccacaactacaatatcctcatcgccacactgcgggtggccctgcccagcgtcatgcgcttctgctgctgcgtggctgtcatctacctgggctactgcttctgtggctggatcgtgctggggccctatcatgtgaagttccgctcactctccatggtgtctgagtgcctgttctcgctcatcaatggggacgacatgtttgtgacgttcgccgccatgcaggcgcagcagggccgcagcagcctggtgtggctcttctcccagctctacctttactccttcatcagcctcttcatctacatggtgctcagcctcttcatcgcgctcatcaccggcgcctacgacaccatcaagcatcccggcggcgcaggcgcagaggagagcgagctgcaggcctacatcgcacagtgccaggacagccccacctccggcaagttccgccgcgggagcggctcggcctgcagccttctctgctgctgcggaagggacccctcggaggagcattcgctgctggtgaattgattcgacctgactgccgttggaccgtaggccctggactgcagagacccccgcccccgaccccgcttatttatttgtagggtttgcttttaaggatcggctccctgtcgcgcccgaggagggcctggacctttcgtgtcggacccttgggggcggggagactgggtggggagggtgttgaataaa

SEQ ID NO: 23496 - DNA, 1449 bp, Homo Sapiens
atgtcctcccgcagcccccggcccccgccccgccgtagccgccgccgcctgccgcgcccctcctgctgctgctgctgctgccgccgttcgcacctcaacgaggacaccggccgcttcgtgctgctggcggcgctcatcggcctctacctggtggcgggtgccacagtcttctcggcgctcgagagccccggcgaggcggaggcgcgggcgcgctggggcgccacgctgcgcaacttcagcgctgcgcacggcgtggccgagccagagctgcgcgccttcctccggcactacgaggccgcgctggccgccggcgtccgcgccgacgcgctgcgcccgcgctgggacttccccggcgccttctacttcgtgggcaccgtggtgtcaaccataggtttcggcatgaccacccccgcgacggtgggcgggaaggccttcctcatcgcctacgggctgttcggctgcgctgggaccatcctgttcttcaacctcttcctggagcgcatcatctcgctgctggccttcatcatgcgcgcctgccgggagcgccagctgcgccgcagcggcctgctgcccgccaccttccgccgcggctccgcgctctcggaggccgacagcctggcgggctggaagccctcggtgtaccacgtgctgctcatcctgggcctgttcgccgtgctgctgtcctgctgcgcctcggccatgtacaccagcgtggagggctgggactacgtggactcgctctacttctgcttcgtcaccttcagcaccatcggcttcggggacctggtgagcagccagcacgccgcctaccggaaccaggggctctaccgcctgggcaacttcctcttcatcctgctcggcgtgtgctgcatttactcgctcttcaacgtcatctccatcctcatcaagcaggtgctcaactggatgctgcgcaagctgagctgccgctgctgcgcgcgctgctgcccggctcctggcgcgcccctggcccggcgcaatgccatcaccccaggctcccggctgcgccgccgcctggccgcgctcggtgccgaccccgcggcccgcgacagcgacgccgagggccgccgcctctcgggcgagctcatctccatgcgcgacctcacggcctccaacaaggtgtcgctggcgctgctgcagaagcagctgtcggagacggccaacggctacccgcgcagcgtgtgcgtcaacacgcgccagaacggcttctcgggcggcgtgggcgcgctgggcatcatgaacaaccggctggccgagaccagcgcctccaggtagaccgcccgtccgcccgcgccggggaccctctccaggccgcggggccgccgggcgtggtttgcttctctcagtcactgctggcgctttcttaatctttatccaataaaatgaaacaaaaaaaatttttttaaaaaaaaaaaaaaaaaaaaaaaaaaa

SEQ ID NO: 23497 - DNA, 11740 bp, Homo Sapiens
cccggagccggtgcgaggagggcacccggtgcgtccccggagcggggaggccaggccgggcaaccctggggccggtcggggcggcgtcactgcaccctccgccaggctccgcgggatgcaccgtggtagccgagggcggaggcgacactctcaggtaaattggcaggatgaggagcagcaaatcaaaagaggtgcctttaccaaatccaaggaactctcaaagcaaggatactgttcaagcagatataaccacatcgtgggatgcactttctcaaaccaaggctgctctgagacacattgaaaataaattagaagtagcccctacaagtacagctgtgtgtgattctgtcatggataccaagaagtcttctacaagtgctactcgaaaaataagtagaaaagatggtagatacctggatgattcttgggttaatgctccaatctccaaatccactaaatcacgaaaagagaaatctcgtagtcctctcagggccaccaccctggagggtaatgtgaagaaaaataatcgtgtggaatttcgtgaacctttggtttcttatagggaaatccatggtgcaccttccaatttcagttccagccatctggaatcaaagcacgtatactgtgtagatgttaatgaagaaaagactgagagcggtaactggatgataggcagtcgagaagaacggaatatacggagctgtgattttgagagctcccaatcatctgtcatcaatgatacagttgttaggtttttaaatgatcgaccagcaattgatgcattgcaaaattctgaatgtttgattaggatgggagcttctatgagaactgaggaagaaatgcctaacagaacaaaaggaagtgagaataatttgaagctttctgtgaataacatggcccatgatactgatccaaaagcgttacgactaactgactcttctccatcctctactagtacttctaattcccaaagattagatattctaaagcggcgacaacatgatgtcaaactggaaaaacttaaggaacggattagaaaacagtgggaacactcagaagaaacaaatggccggggccagaagctgggtcatattgaccatccagtaatggttgttaatgttgataactcagtaacagcaaaagtcagaaaagtggcaacagcaccacctgctccagcatataaaggtttcaacccttcagagaccaagattcgaacacctgatgggaaagtgtggcaggaggctgagtttcaaaacatgagtagagaactgtatcgagatttagcacttcactttgcagatgatatttctataaaggagaaacctgctgaaaaaagtaaagagaagaaagtagtcaagccagtacgaaaagtccaaaaagtagcacagttatcaagtacagaatgcagaacaggtagtagtcatcttataagtacatcttcttggcgagatggacaaaaattagtaaagaagattctgggacctgctcccagaatggagccaaaagagcaaagaacagcatcaagtgacagaggtggaagaagaagaactgctaaatctgggggtcacattggaagagcagaatctgatcccaggttggacgttttacatagacatcttcaaagaaactcagaacgttcgagaagtaaatctcggtctgaaaataatataaagaaactagcttcatctcttccagataataagcaggaggaaaatactgccttaaataaggactttttacctattgaaattcgtggcattcttgatgacctacagctggattctacagctcacactgcaaagcaagatactgtagagttacagaaccagaagtcatcagcaccagtacatgctcctaggagtcacagcccagtaaaaagaaaacctgacaaaataacagctaatgaagatccccctgttatttccaaaaggcgccactatgacacagatgaggtacgacagtacattgttaggcagcaggaggaaaggaagagaaagcaaaatgaagagaagaaggctcaaaaggaggctacagaacagaaaaacaaacgattacaagagctctaccggaagcagaaggaagcctttactaaagtaaaaaatgtccctccttctgagccatcagcaactaggcgactacaggaaacttactccaaattgctactagaaaagaccttgcttgaagagccatctcatcaacatgttacgcaggaaacacaggccaaaccagggtatcagccatctggagaatctgacaaagaaaacaaagtacaggaacgtcccccaagtgcatcttccagtagtgacatgtctctctcagaacctccacagcctcttgcaagaaaagacttgatggaatctacatggatgcagcctgaaagattgagcccacaagttcaccattctcaaccacagccttttgctggaacagctggaagtttactctcccatctcttgagtttagagcatgtaggaattttgcataaggattttgaatctattttaccaaccaggaagaatcataatatggcttcaaggccattaacttttacacctcaaccatatgtgacctcaccagctgcttatacagatgccttgttaaaacctagtgccagccaatataagagtaaactggatcgtattgaagccttgaaagcaacagctgcttctttgtccagcagaattgaaagtgaagccaagaaattagctggggccagcattaactatgggtcagcatggaacactgagtatgatgtgcagcaggcacctcaagaagatggaccttggaccaaggctgtaactccacctgtgaaagatgataatgaagatgttttctctgccagaattcagaagatgctgggaagctgtgtatctcatgcaacttttgatgatgatcttcctggtgtaggcaatcttagtgaatttaaaaagcttcctgagatgataagaccacagagtgccatatcaagctttagagtgagatcccctggtcccaaaccacaagggctactggcacagttatgtaaaaggcagactgactcttctagctctgatatgcaagcctgttctcaagacaaagccaaaatatctcttggttccagcatagattcagtcagtgaagggcctcttcttagtgaggggagtctctctgaagaagagggagaccaggatggacagccccttttgaaagtagcagaaattttaaaagaaaaggaattttgtcctggagaaagaaatagttatgaacccatcaaagagtttcagaaagaagctgaaaaattcttgccactttttgggcacataggtggtacacaaagcaaaggaccatgggaagaattggcaaagggaagtccacatagcgtcattaatatttttacaaaatcctatcagttatatggaaaagggtttgaagacaagttggacagaggaacatcaacatcacggcctttgaatgccaccgcaactcctctaagtggtgtttcatatgaagatgattttgtctcctctccagggactgggacttcgacagaaaaaaaatcaactcttgaacctcatagcactttaagccctcaggaggaccattctaacagaaagtctgcctatgatccttcctctgtggatgttacctcccagcattcatcaggagcccagtctgctgcatcgtctcgttcatctacttcttctaaaggaaagaaaggaaaaaaggaaaagacagaatggttggattcattcactggaaatgttcagaactcacttcttgatgaggaaaaagcagaacgtggctcccatcaaggaaagaaatctgggaccagcagcaaactttctgttaaagattttgagcagactcttgatacagatagcactttggaggatctttctggacattctgtgagtgtctcatcagataagggaagatctcagaaaactccaacttctcccctgtcaccaagttcccagaaatcattgcagtttgacgttgcaggaacttcttcagaaagatctaagtcgtcagtaatgcctccaactataacaggatttaagcctaatgcacctctcactgatctgaacccggcagccagcagaacaacgacagagaacatggctccaataccaggttctaagcgcttttctcctgctggcctccatcatcgtatggcagcagaactcagttatctgaacgccattgaggagtcggtgcgccaactgtcagatgtagaaagagttagaggcatttcacttgctcagcaggagagtgtgtctctagctcagataataaaggcacaacagcaacgccatgaaagagacttggccctcttgaaactaaaggctgaacaagaggctctggagagtcagagacaattagaagaaacccgaaacaaagcagctcaggtccatgcagaatcattacagcaggtggttcaatcacaacgggaagtaactgaagtcctgcaggaagcaacgtgtaaaatagcagctcagcagtcagaaactgctcgcctcaccacagacgcagcacgtcaaatctgtgagatggcagagttgactagaactcatatctcagatgctgtcgtggcttcaggagctccccttgcaatactgtatgaccaccaacggcagcaccttccagactttgtgaaacagctgaggaccagaactgaaacagataggaaaagtccatctgtttcactctctcagagtaaagaagggacccttgactcaaagcatcagaagtattctgcttcatatgatagttattctgagtcttcaggatacaagaatcatgatagaagaagtagcagtggtagcagccgccaagaaagtccttcagttccatcttgtaaggaaaatgagaagaaacttaatggtgaaaagatagagagttccattgatgaacaggttcagactgctgcagatgattctctacgaagtgatagtgttccatctcttcctgatgaaaaagactcaacgtctattgcaacagaatattctctgaaatttgatgaatccatgacagaagatgaaatagaagaacaatcatttcgatcattactaccttcagagagtcaccgcagatttaacatggaaaagagaagaggtcatcatgatgactctgatgaagaagcttctccagaaaaaactacactgtctactgccaaggaactgaacatgccattctcaggaggacaagatagcttttctaaatttactatggagatggttcgacagtatatgaaagaggaagaaatgagggcagctcaccagtcttcactcctgcgtctccgtgaaaaggccttgaaggagaagactaaggctgaattggcctggttagagcatcaaaaaaaacatctacgagacaaaggagaggatgataaaatgcccccgctccggaagaaacagcgtggtttgcttttaaggttgcagcaagaaaaggcagaaataaaacgtcttcaagaagccaataaggcagctcggaaggaaagacagctgattcttaaacagcaggaggagatagaaaagatccgacagaccaccataaaactacaggagaaattgaagtctgcaggggagagtaaattggactctcatagtgatgatgatacaaaggataataaggcaaccagtcctggtccaactgacttggagacccgcagtccttctcccatttcaatctccagcagtgaaactagcagcattatgcagaaactgaagaaaatgagaagccgcatggatgaaaagtttctgacaaagcgggagcaaaaattaatgcaacggcgacaacatgcagaggagctcctagagtggaagcgacgtttagatgcagaagaagcagaaattcgtcaaatggaaaaacaagctttggctgcctgggacaaagaattaataaaacccaaaactcctaagaaagaactggaggaccagagaacagaacagaaagaaatagcaagtgaagaggaatctccagtacctctgtactctcatctaaacagtgaaagctccattccagaagaattaggcagccctgctgttgaatatgtaccatccgagtctataggacaggagcagccagggagtccagatcacagtatacttactgaagaaatgatttgttcacaggaactagaatcttctacctctcctagtaaacattcacttcccaaaagctgcacatctgtgtcaaagcaggagtctagcaaaggaagtcataggactggaggacaatgtcacctgcctatcaagtcccatcagcactgttatagttggtcagatgagtcattatctatgacacagtcagaaactacatctgaccagagtgatattgaaggtaggatcagagctctgaaggatgagttgcggaaaagaaaatcagttgtgaaccagctgaagaaggaacagaaaaaaaggcaaaaggaaagactgaaagcccaagaagccagtctgatcaagcagttagagtcatatgatgaatttattaagaaaactgaagccgagcttagccaagatttggaaacatcaccaacagccaagcctcagattaaaacgctctcctcagcttctgaaaaacccaagatcaaacccctcacaccactacacagatctgaaacggcaaagaattggaaatcactaacagagtcagaacgttccagaggatccctggagcctattgctgaacatgttgatgcttcactgtctggttctgagagatcagtatcagaaaggtctttatctgcatatgcaaagagagtaaatgaatgggacagtcgaacagaagattttcagaccccatctccagttctcagatcatcaaggaaaatcagagaagaatctggagattctctagaaaatgtacctgcattacatcttctcaaagaattaaatgccactagtagaattcttgatatgtcagatggcaaggttggagaatctagtaaaaaatcagaaataaaagaaatagagtatacaaaattgaagaagagtaagattgaagatgccttttctaaagaaggtaaatctgatgtcttactgaaattagtcctagaacagggagattcatctgaaattctttcaaagaaagatcttcctttagattctgaaaatgttcagaaagacctagttggattagctattgaaaatctccataaaagtgaggaaatgttgaaagagagacagtcagatcaagatatgaatcatagtccaaacatccaatcaggaaaagacattcacgaacaaaagaacacaaaggaaaaagatttgtcttggtcagaacatctttttgctcctaaagagataccatactctgaagattttgaagtgtcttctttcaagaaagaaatttcagctgaattgtacaaagatgattttgaggtgtcatctttgctgtcactcaggaaagactctcagtcttgcagagataagccacagccaatgaggagctctacaagtggagccactagctttggtagtaatgaggaaatcagtgagtgcctaagtgagaaaagcctttctatccatagcaatgttcattctgacaggctgttggaactcaagtcccctactgagctgatgaaaagtaaggagcgcagtgatgtggagcatgaacagcaagttactgaatccccttccttggcttcagttcctactgcagacgagttatttgatttccacattggtgatagggtgttgattggaaatgttcagccaggaattcttcgattcaaaggtgagactagttttgctaaaggattttgggccggagtggagttagataaacctgaaggaaataacaatggaacatatgatggtattgcatattttgagtgcaaagaaaagcatggtatttttgctcctcctcaaaaaatatctcacattccagaaaactttgatgactatgtagacattaatgaagatgaagactgttactcagatgaacgatatcagtgctataatcaagagcaaaatgatacagagggtccaaaagacagagaaaaggatgtcagtgaatatttttatgagaaatccctacctagtgtgaatgatatagaagcctcagttaatagaagtagaagccttaaaatagaaacagacaatgtacaggacatttctggggtacttgaagcccatgttcaccagcagtcttcagtggattcacagatttcttcaaaggaaaacaaagacctcatttctgatgccacagaaaaggtttccatcgctgcagaagatgacactttagacaataccttttccgaagaattggagaagcaacagcagtttacagaagaggaagacaacctatatgctgaagcttcagaaaagctttgtacaccacttctggatcttttaacaagagaaaaaaaccaactggaagcccagctgaagtcatcactaaatgaggaaaaaaagtcaaaacaacaactggaaaaaatcagcttactgacagacagtttactaaaagtctttgtaaaggacacagtcaatcaactacaacaaatcaaaaaaaccagggatgagaaaatccagcttagcaatcaggagcttcttggtgatgaccaaaagaaagtaacaccccaagacctatcccaaaatgttgaggaacagtcgccaagtatttcaggttgcttcttaagttctgaattggaagatgaaaaagaagagatttcctctccagatatgtgtcccagaccggagagcccagtatttggtgccagtgggcaggaagaacttgctaagagacttgctgaacttgaactcagccgggagttcctgagcgcgttaggagatgatcaagactggtttgatgaagactttggtttgagctcttctcacaagatccaaaaaaataaggcagaagaaaccattgtacctctaatggcagaacctaaaagagtaacccaacaaccatgtgaaacattattggcagtcccccatactgcagaagaagtagagattcttgtacataatgcagcagaagaactttggaaatggaaagaattaggccacgatcttcatagcatcagtattcctacaaaactgcttggctgtgccagtaaaggtctagatatagaaagcactagtaaaagggtctacaaacaggcggtttttgatttaacaaaagagatttttgaggaaatatttgctgaggatcccaacttaaatcaacctgtctggatgaagccatgtagaatcaactctagttatttccgacgagtgaaaaatccaaataaccttgatgaaatcaagagcttcatagcaagtgaagtactcaagttgttcagtcttaaaaaggagccaaaccacaaaacagattggcagaaaatgatgaaatttggaagaaagaaaagagaccgagtggatcatatcctggttcaggagctccatgaggaggaggcacagtgggtgaactatgatgaggatgagttgtgtgtgaaaatgcagctagccgacgggatctttgagaccctgatcaaagatactattgatgttctgaatcagatcagtgaaaagcaggggagaatgctactagtgtgacatcttgcaaataaatcgaacgctgagtgctaatgtgagtcctgggcctttctgcctcctgatgtacacccatcgccatcatagcaagagtgcttctggaccttgtacttattcttaaagactaccagtatggagttcataggacaatgtggtacacctggtattacagcctttgcctttcgagactatccactggattaatgggttattttcagtgggcagggttgcacagtgtaatcctacaccttttgctaacacccctactaggtcccagagggccagaaacacctgacttacctctgagtttagactagggtatcacttctttgagtctgaagtcaagtgagagaggtatagataaatgcatcacatcacttttgaaatgtaattctggtctataccatggaagtcataaatggacattatagtctctaaacagtattaaacccttaaccacttctaaaataggcaagctcaataatgtctgccaacttcacattctggagtttatttcatttctttttgaagaccattttcttccattattgtagttgagcagcaccaagtggactgtcaggctaacaggaataagtggtagccttgctttctgagcaccatctaaagaattttaaacctctgcattatgtttagtgttctctgtgtgggcatgaaaacaaagaaatgcccctactgaagactgggctcaaaggaccaatgcagggctggttcttttaccccttggtttactcctgcacttgtcttactcattctgaatctctaccagctgctcccagaatcacagatactcaggaccatctcaggcatccaggcatggcaaagtggaaataattcattttggcctgcaaaccttcaactcccatctttccccaagaagtcagagatgctgttacttgaatgatttaggaaatgagtgtgtgcaccaaagacaaaaagatattgtctattgtttgtgtgcttgttttgcgctatggaacattttttaatttattttaagataaattattaagttgaaaatgtgtgtccctattcagaagtgaaagattcatcttgtaatagttaaacctccatcttgaagcttctatggttcatagtctttgcacaggaacctgtggttttaacaaaccaatacacatattgaagaagtcattttaattcagtgaaacgaagatgggcttttccagatcacctgcaatagcagcagtgggataaaatgatttaaaaacactgtacaatttaactctgcctctcttgcagcattgcttctcacaactattacctgcatctgaaaaaaaatctatagactccagctgctacattagagcataagagatgctctcctgggacctcagtaccctgccttcttgactggtttccgttcatcagtcctgtccctcttcaagtaatctagaagaatgtggatactcttaggcgtgaatgtaaatgccttaatattgaaggtcctggttagaagcatgatacaagacatctactggattcatatttacaaatatcctggaatgttatagcttcaaagtatattagaaaaaccccaaagatggtataatctttaagtgtgcacgttcgtttatttctgcatcttccctccaaacttgcctttgcatcttaaatatttcactatgcacactcccattcctcttgggtttcatcttgtcgtttaagaaatgtactgaaataatcattggaatatttgcattttgcacaatgactggtatgatagctcttgacaaataaggaaagcactgaaatgttgtgattgggtctcgggaaatgctcagattgatgtcttaccagcatttcttctgggcttgtgatgttgagctgtagtcttgtagccataatgagcaaattgactaagagaagcaaaggtttcttggggttattaaccagtagtgtggaaatactagttttatgtggccaaggaaaagcaaagccttttcttttcagtttgtgttatttggaagacagaaaaacatcttgtctacatcctttggctgtttgtaggatcacgttgtccttacgatactgaaactttacagctgctgtaaattttttataaatgaatttcaaaatgttataatgggactgtaggttgtttttctacatcttcattatttggacctaaaaccagtttttaataagaaagtttatctttactctttctgaaattatgactccag

SEQ ID NO: 23498 - DNA, 1465 bp, Homo Sapiens
tcagtcccagcagttcccttcgtgcgcggggggcggcgagggtcttcagcagtcgggagaggcccttgacggcgccatgtcggcgggcggtccatgcccagcagcagccggagggggcccagggggcgcctcctgctccgtgggggcccctggcggggtatccatgttccggtggctggaggtgctggagaaggagttcgacaaagcttttgtggatgtggatctgctcctgggagagatcgatccagaccaagcggacatcacttatgaggggcgacagaagatgaccagcctgagctcctgctttgcacagctttgccacaaagcccagtctgtgtctcaaatcaaccacaagctggaggcacagttggtggatctgaaatctgaactgacagaaacccaagcagagaaagttgttttggagaaagaagtacatgatcagcttttacagctgcactctattcagctgcagcttcatgctaaaactggtcaaagtgctgactctggtaccattaaggcaaaattgtctggcccctctgtggaggagctggaaagagagcttgaggcaaacaaaaaagaaaaaatgaaagaagcacaacttgaagctgaagtgaaattgttgagaaaagagaatgaagcccttcgtagacatatagctgttctccaggctgaagtatatggggcgagactagctgccaagtacttggataaggaactggcaggaagggtccaacagatacaattgctaggacgagatatgaagggacctgctcatgataagctttggaaccaattagaagctgaaatacatttgcatcgtcacaaaactgtgatccgagcctgcagaggacgtaatgacttgaaacgaccaatgcaagcaccaccaggccatgatcaagattccctaaagaaaagccaaggtgttggtccaattagaaaagttctcctccttaaggaagatcatgaaggccttggcatttcaattacaggtgggaaagaacatggtgttccaatcctcatctctgagatccatccggggcaacctgctgatagatgcggagggctgcacgttggggatgctattttggcagtcaacggagttaacctaagggacacaaagcataaagaagctgtaactattctttctcagcagagaggagagattgaatttgaagtagtttatgtggctcctgaagtggattctgatgatgaaaacgtagagtatgaagatgagagtggacatcgttaccgtttgtaccttgatgagttagaaggaggtggtaaccctggtgctagttgcaaagacacaagtggggaaatcaaagtattacaaggatttaataagaaggcagtaactgacacacatgaaaatggagacctgggcactgcaagtgaaactccgctagatgacggtgcttcaaaattagatgatctgcacactctgtatcataaaaaatcgtattaa

SEQ ID NO: 23499 - DNA, 59339 bp, Homo Sapiens
aaggagaacaagaccgcgggcccggggaccaccggccaagacagggctgaagcagaggaggaagaggaagagtgagggatggagaaagggcagaggaagagacatgagaaagggagaggaagagaagcccagctctgggaactgaatcaggaaactcaaatcgaatagggaagtaaaaaaacaaaacaaaaaacaaaaaaaacaaaaaaaaaaccctatttaaatgaaaggagtttaaaaacattttttaaggagggagaaaggagaaattttggtttttcaacactgaaaaaatactacctataggaaagtctgtcaggtttggtttttttgtacaatatgaaaaggatattatctacctgttctgtagctttctggaatttacctccccttttctatgttgctattgtaaggtctttgtaaaatcttgcagttttgtaagccctctttaatgctgtctttgtggactgtgggtctggactaaccctgtggttgcctgccctcctgagcctccgccttcccagcagcggcaccaaggggccttagggagccccaaaacctaccactcgcgtgttccccaagcgcctggctgctgcttcttgcttcccgtcccccagccccatgctcccttttacattctgtgtgtatctaaaggatggaaaaataaaacgcaattaaaaataaacagatgccctattttctgtgtcttcctaaagctgggaaggggttcagggttagagatgagtgggcatcccagagctccttggctctgacttctgatgcagcttcatttctgtgctgagtttgttctttttcttggtgcctcctgctctggggggctgccaagtagtgaaccccgatattgcactcatgcattccctttacacccttttacacccattgacatacatgatgcacacagtcacatgtgtttacaggctgacatcaaacatacacactgtcacagtcacaaagagacactcatacccatatgttaacaaacatacaggcattcacgtaataccagcttcacgcccagaacataggcattcatgttcacacacgctcacaagtaaacacacattcacactcacagacacattgataccaacgtacattcacacattggcttataaacacagattcacatttgcccccaagtaaacgcactcagaagcccacatgcttagtcacacaagctcacaaaacaacaaaacaaaaacctcacagtttcacaaacccgcgtcctcattcaggcctggaaaccaagctgcgggatctggatctgggctgcagcccaggcacaaagacggagctgaaatccaagctgctaggccccacatgaaggaagagcggaaggaaagggaaaatgaacacccaaattcactctggcttcttgggtggcgttgcgtagaggccaggcctgggagtagaggcctctcagtcggcgcagagcagcctccaactagggcgctcacggcttcctgctcgcacggcaaacattttcgccaagagctattcctatattttatttcgatttattttactttctttgtcttaatttatctcgttctaaattgatacagacgacccaaataaaactttaaaatagggggtggggaagggaatgagtccgggagcaagatcctaagaggtgcgagtttaccaggccggtgtggccgcatcccggccgctctcggagcctgaccacgccacgcccggggcttcctccgagcctctcttcccgctctctgcgccgccgccggcagcctggaaccttctccgctgcacagagagagaggggggaaaatgttgggggaggttatttcgtttccagaattcgggcattggtaggtcaacttgaaatacggggttatttcaggggacctgaaaaacctgggctgaatttttattttattttttgcttccaaacatccgctgattgcaggaccaaaacttggaggatggtgtctatgcggctagacccgctgaattgatttttagcatttattcgattataaactctggattgtttaaatttaaacagactttggatagaaagagggaagagggttggttttaggataatctgttgaatttgaatttgtatgtaaaatgcttttaaacctgcagtttcccccattaatgaccacgtaacgccctggagagcgcatggagctgtcataggaaacctggacttgcctgcatttgggcgggataagccaggatccggctttaccctcccccagtttctgggttccggaggcgagaatcaggttgtcagactatctgccttggcccccatccaggccacttttcctcctggggcaaaaactaagccctagggaatctaaggcccccacgcctgcaatgctgcaagcctcacaggtgggggtcctgctgtctacagggctaggaatgagggggccagttcagagggggagaggggacactgaagctttcattttgcccttatgcaggtggcaactctagacaccgtttcctgctcctgcctcaccccaaaattgtctcagaacagtccctatgcagaggatttggggtagacctttactagaagagggagcagagctcctgtggagagtggggaggttcggaaaagaacccccttcccagctgtaccgttatggtttttgcactctgatttcctgcccccccaaatctcaccccttctcagattggggtttccccaaaaagagagaaggagaagaaaagaagatggcgactgagaaaagggttgctggtggagcagccatgaagaaatgcaataaattccttgttgttttatgaaaatttacaactttgtgatagaagtttatgagtggttgaatccagcgattggccggcgccggtcatgtggccgggcgatcgtgaacatgaactttttatcatttccctggtggttataatgcagcattcttttggacaccacacctaggtcggagcactgtcgtccttcagggctccagcctcttgatatttttgtacttcagtatcagctcgatagagcaaaagagagagaggacgagagaggggggtgaggagaaaagagagagagcgcgagagggagagggagagaaggaggggtgggaattacacaaagagagaaccaaaaataattttgattcctaagttaatttgctcactgatctgggattttagtcaccatggagggtaaatggacaatctgcccaggactgcagcccgatactatttttcaaagccagaacttactccattttctatgcaaatgtcagaaaaatgaaacaccctctctcccaagtcagagaaggggaagcaacggctctcacgttgggacaatattatctggaagctgaagaagaaactgaatactccttccttcctccccacccattcctttaaatccggagggggaaaaaatcccaaggtctgcaaaggtaagggagattctacaattttcttcttgttcttttgcatcgcttttgtagggtgggggtggggcttgggtttttctccctcctcccccgttccaagacggggctgaaccccacctctgggcgctgcagggagaagcttcccaggaaattcagtggtggagatatgggtggctgcttcctggagggggagccaaggcagggaaagcgggaagaggaatcaaaagagggccaggagaccagctctaagtcgcctttttaagcttggaggagagactcaagcaaggggggtgcgaaagagaggatggggggtatctgggcttcagtggcacccaaagaagccagtggttctggcctccgcgggcttgcccctccccctcctgccatccctcccttgtctcggcctctggctattgccccagcgcagttctcttgcctggtgcggatatcgctgggttcccggcagcactggcatgtgaggcggtggcgctaagggacgtcctggtttctatagggcctggaatctccgccgaggccggcgagggagaggaaacggctagagaaacacagaaaagacaatttacagagaaatgtttactatctcccttcggagacatttttgaaattaaagggctgtgggtggaaacaccaaaaatgagggagactcccccctcaccaggaagcctgcccgagaatgcccaagtatctcgccactcccgcaggagggagcctcgctctacagggagacagttttgtggttttaatgcggtaggttacagctgttggtttctgcgtgatactgattctattacttgcgttgtattggtatgggatgtgtggatttcggtggaggaaaaaattgccatgtgtgtgtctgatatgataacatttcaaactttcctgggtccagacatggtgattgtgaagaagctgttaagtgcctttttgttttaggcttgtaaataaaaataaaagagaaagaaatgaaagaagaaaataaaaagaaaatccaattatgggacctagcggcgtctaaactgaaaagctaactggcactgagctcagacagtcccgtccctcgggtgtccaattttatccctcagtcaggccttctagggggtggggagggcggagaacattgggcaggtgacagagattcctaaagtagctcgtggggtggaagtaggtgccagccttgaggcaaggacttaaaaatggggtaagggagcttctggggaagcttccagccaagagataagtgatgttggctgtggagggcaggagaaattgtgatttttagtctggtttgcacgaacatgtgattgcttttctctttcttaagaccagatgcaggacattcagcctcgggcctctggttgccccggagttacagggtctggggcgttttggaagtggggatatatttattatctcagtcctaagctaggagagggacgacgctgccacttgtggcgcggaagaggcggctctgtggccccaggtagatgccctaggttcaggcccggcctgggcgcctggagggaccgctgggcttcgtagctagagttctccgccagcacccacggcactcggggactattctcaagggaaaaatttcccaaacccacccatactaaaggtctttttctcctgtagtcttggagggttataaatcctcccttagacagttcgctgtgacccaaattatgcggtctgctgccatctaccgtccgttcggagacacgcggcttcggcgccgcaagccccgcgacactgtccagaggtgcccgacgcctggagccccggcctcgcagggtccacgggattcgggggatttcgggcccacaccgacgctctcagctagatcttggttccccggtgtgagttagagaacagaagtctctcctccacccatcatccccaatttcccactgcccccgtccccgcccatcctagccccaaacctggcggctggcaagggaagcggcttcctctagggcatatataaaaaggtctaattctgcttccagcgggcaggggccctgaatcaaagggtggagggatcagagccgacacccccaccgccatccccacccccaccccaccaaggcgcgggagaggatgaggccgcttgagacatccgaagccaaggctgttcaaggtttatttggttttcttctcagccaagggaggggacccgcagggcaggcgccggccccgtcagttccactcggttgtcaaaagacaaaccgggtctgtgttctcctggttggttagtgggttttgccagctccttggttggtgggtccgtggtgaaggaattgaaccgaattttctggaaactgttgatgtctgcaagtgagtgccgatcccctcctccattctcgatcttttcaagcgaagtctacctaaatatgatttgggaaaaatttggtagtgggactggggccaaatccttaaggaaccacaccgtcgtaatttccgttcctgttggaccctccacaccggcttaactcgacctccttcccaagagggggtggccagggctaggctatgcgcctctgctgcagcgtttgaatattggcccctgtctcacgggttactgattagcttgggctttcaagccgtaggaggaagctctggcagttcctttaaaggtgctgtggtccccgttcctgggtgggggtggggttccaggaaattgcctgcggtgccaggcaaaccaaggtgttgccagagtctggccgagggctagaggagctgacgaggttaaggggcctggtggtgctggggacaaacactgtggctgcagccctcaccctctttcggcgcctctggagcagctctttatagctttcctgcggcgaggtgactttctggtggctataaggcccgactcaaggagctgctctataggaggccctgagggagccagccctagaaggtccttggcccctctgagattttgcttttgggcaatccaaaggacatgtagagaagtcaagctggtacatggtattgaaacacttcagggccctcaggttgtcccctggacctgcgggtaggaaaccgggagagtgggttcagcactactgctcactcccctaaagatcaaagaggatgccgctcctttgcataatgaaaatgaagtctttgtactttgatttggaggggccgattttagggcaaagtgtctcatctaaacagcctccctcaacctatgggagtgatcactcagtacccctgggaacatttatttatgttccccaaacccagagaaacagagtccaggacgagaattgagttgaaatattttcatcccaccccaccccagccaaagttgggggtggtgggagaaggtgctcatcacctcaaagagctgagggagagggctttatagcttagaggaaattggaagcctggacaatgtctcagcaccctcccacacacaccacaccacaccacacacacacacacacacacacacacacacacgcaaatatccctcctgaggttacctatcaagaattttactcccgaactgaacacaacttaggaaacattttcctgggagctggaatgtgttagcttgcccacaggactgcagactcacagcatagaaaattacaattataaatcctgcctgtggggtatctgtacaatccctctgttatgtactcaagaattggtacacacttctatccatctctctgaacacacacttcctcattgaggcagggagagacaccccagactggcggatggctgagcccgctgtgtatttacatattcccccaaggagacagacagagggcggtggaccgaaccacagacagattcgtagggatctggctccagaaaggagtcggtctctggcctgccctgcccgcctgctctttttcccaaacaaacggatcagacgaataaacgctcataaatacctctgggcttagataagagcgatgaggcgctattttctttcatgcccgactccaggcgcccaggcccgcctgtagtggctccatctccagacaagcaacctgcagaggtgaggttaatttgggggctgtgactctaaagataaggcaattatttccctgcttctgacacagggaaatgctcccttcctcaccagatcttattttgttcagacttcactgagaaaaccacactatttagtgctaggatggagacattgtgggcagggaggaggcagggaaggctgaggcccagggctcagcctcagcagtaggcagggaggtgcatgcaggtactctctcccacttttctccccctgttcaaatggcccctagtcctctctagaagcaagcccagccatacctagatatggaatatttatccttcttcattatcagggggtttaaatttgttttcttaaatgcttatcaaacactcccacagagtcaggttaggaagtaattggaggccatctagggatggctattttgccattaaggtacagccaagaagttgccctgagtttagagagccttggagaccacgttgcaaccaaataagttcccacccttggtgatccaagctcagtcccctgccaccttccctagtgtcttgtaccatcttcagtgggcagaacttggccagaaaaaggagcccaaaggaaggacaaggcagaggagggtcagcctggcctgacatctgactttgttccatgccctggccccttcttgtccccaggtgtgaaggttgtcacccttcactacttggcctgtgtatgtatattagaatgttgggaatgcactgtggccctgtctcccagcctgggctcaatgcttattttccttggatgaaagagccagagacatacattctctgacacacctaaatttgtaaggcggcaaagctgatgatacaaacacggggtgtgggagggaattgtagcgatgctgagatacagacagaagggagaggggatgctggctgatggctggaagcagcctgctgagtccccaagagaacgcaaacgaccttctctccctatcaaactaaagcaaaaaccaagtcttgggaaagaattaattttaaaaagaactggcagctcctacagagacttagaagaggagtgaggatgcatttcttcccagtggtctctgactgcctcaactatcaggagggttcaaagcccacaactggaagaagaatgatttcttccttgtgcccagatttactgggacatccctgattcctgaaaatcctatagcccaggctattcttaagtcttttgggattgtagagggtactggagtgagggttgcaggcaggatagggatcagacaaataaagccacctaggctgagggatacccctcactccttcactccatatcaccaagtgaggagagggctagtctctttccccagtgccccttcccctgccaagggtgagcagctgcatactagaaccaggcagaatgttttgggcagccaccctcgtcgccgccttccaagaagctcctagtctagccacagagtcagaaggggaagcttgggctcagtccctcctgccagctcctcctcttctgggtcttctaggcagtgggatctggcctgccccctcagaccagaagggttgtggagaagcaggaacaataagccgaggcttggaggagacagagcagatctgataaacaggaaaaacgatgttcaaaacctggggaggagggtgtttcttctttgcttatcttagcggagaactcttctcaccttctaccgacacaaaaccctagaaacaaaccttctttagttctctctcaaggcgattcggagacatttacccaaccctccctggagagaaggggtcgaagcaacgcaggggttaacttttctgaaaacagaattaactttttccaatcctgcgtggggtgggggagagacatatttatttaatcacccgggagtggggtggtctcaatctaaacgttccctcctccctcaaaggcactgagcctgtttcacagatcctacgtaggtggaacaggacgcgttgtgttgttggggagagagaggagaaaggcgaaggagaaggaggaaaaaaaaaaggttgataggtttgtgcgcgggtccctcgtgcgggctgcgctcctcctgggtgctatttgacaattcctgcctctgccattggtcagtgttggatcagatggttgtatttccttctggccctcactggcacctcgccatcccccctcagctaaaacccaatctcggatatactactaataggcgcggcgctcggactataaaacacaacaaatcataaacccggcggagcagcagcggccgcgcgcgcctcccctcccaatgagttcctatttcgtgaactccaccttccccgtcactctggccagcgggcaggagtccttcctgggccagctaccgctctattcgtcgggctatgcggacccgctgagacattaccccgcgccctacgggccagggccgggccaggacaagggctttgccacttcctcctattacccgccggcgggcggtggctacggccgagcggcgccctgcgactacgggccggcgccggccttctaccgcgagaaagagtcggcctgcgcactctccggcgccgacgagcagcccccgttccaccccgagccgcggaagtcggactgcgcgcaggacaagagcgtgttcggcgagacagaagagcagaagtgctccactccggtctacccgtggatgcagcggatgaattcgtgcaacagtgagtgagacttcccgtcgccgtcgccccggctcccctgggcgcccaccccgggacacagaactagtgagcgccccctgccccaatctcccacagggtgctgggtgggcatctcagttaggagatagaagaagattgggcgccggccgggggtctctcgctgtgtcccctattaggcaggagttacaaagtttgcaaagtcccagccgcactgggagccatggggagcaagtgtgctctcctggggcgcctggccagagccggggttccaggacagggaagggagcaggagcctgcagtcactggcttggctttactttgagcccccaacccccctctcccagccctggtagggttccccaaccaaagacggctccattaaaaacggagtgcgtcatgcaagggggtagggggtgacgctgaagaggaagagttgagtctgtctgggactgtgtttccctgtgggtggggagctggggcaagatgaggcaccaggaaaggggtggtagtcagaggagggaggaggaataaggggaaggaagagagagggagcaggcggagcgagagagggagaaacaggcgcggggtctcaggttggattatttgttggccttaagtcccaactgatgtccattagccggactcgaaagtgaggagccgttaatgtggactatggatcgatctacgtcattacggattaacggcctggatttatcattgggttggggggatgacggggggtgggaacaagatggatggaaagggagggaaagacaagatgcaactaggaagagacacacctgaccagcccctccccccaggctcaggtgggagttcaaactgctcctcccctcccccatctagagtctagacagacggcacaggcctaggagactaggagggaatctggagggggcgctggaggagtgcgaaacgggggaagggagccggcagaatagagggcatcccggtactggctggagtctgtgttcgagggtcgactaggggagggggtcctgggcccggtgaccgcaggcctcagcatctccactctgcgtaacaggttcctcctttgggcccagcggccggcgaggccgccagacatacacacgttaccagacgctggagctggagaaggagtttcactacaatcgctacctgacgcggcggcggcgcatcgagatcgcgcacgccctgtgcctgacggagaggcagatcaagatatggttccagaaccgacgcatgaagtggaaaaaggagagcaaactgctcagcgcgtctcagctcagtgccgaggaggaggaagaaaaacaggccgagtgaaggtgctggaaagggagggaggacgcgaggggaaaggcctgtggggagccacgggcgtcagagagacccgggaaggaaggctctcgggtgggggagccaggagacctgctctccggcgcagacaggcggggcccagcgctctcctggacgcccccgcccgcacagctcccggcgggtgctctgaggcctcactactcgagcccacccagcatcccgcgcgcccttccttcccgaggaactcgcctcagcctgatcaggcttcctggtgagaactgaggagcggactcacttgatgtttcctggaagcagagcaaaatgctcttgtccctgtcgcgtctcattttgtccatgtcccccgtgcacggttcaatggtagattcgctgtcccctcagcgggggccttgaagactccctgatcccagacctgtcgtctctcccaccccctccccaaagccactggaaggagcacatactacctagaagtaagaagaggagcctcagaagaaaacaaagttctattttattaattttctatgtgttgtgtttgtagtcttgtcttagctctggacgtgaaatacttcgatgatgatgatgatgatgatgatgataataataataataataataacaacaacaacaacaataataaagatgtgaaaactcgacgctcggtcacctccaatcctcccctgccattttttcctctctcctcaacccccagcctctccatctttcctgagccagaattcttcagcaaaggcgagagccctggcccgccgaagcgagccctgttcgactgggaagttacagctgagataaaggctggagcgatcagtcctgcccaggccccagcgctgcgtttccctggtgctgaggctcacagccgcttctccccgtgcagacttgggggatggagaggtgctgtgtccctctcattctctagcctttcctcgtgtatacacagcactaagggagccactgaggcccctaaagctctctggcggagacggagccatagtctgggggcctctgcagcgcttttctgtcctcaccttcgcagcgacccctggtctttggcccgtccacatggccaggttttttcgccagccttggccctccgctcctggcctgtggctctggagactgaaaaatggggccactgggtatctctcaccctgcagctgaaggctccaggtgccccttcccacctcaagtagcagatcagcctcaagtaggagatcagcctcaagtaggggaatgtaaagccaccagccaggcacaggccgaaggccacaactttcccttgctccttggagaccccagggcaggaggccaggtgatggggcttttagtgtcatcctctcaacccagaatggctcattctctctctgcttgcaccggcacccagaaggcaagctgcggtcactgttttcctttattcctccgccctctcgcttcctttcttatttttaaagaaaatagtcccctcctaataggagaccagctgcggcggtctctggccgcccagcgtgctcagcaaagcatgcgggtccttggaaccccttttccgggaaggcggctgccaccaggcaaattctcaaactgcctagctgcgagtgaggggcctgtagtggggcctccgaatgcaatagccgaggaggaggggaagggatcccgctttacaaactctcagacacatgttactactcaaactaagcagcagacgcggtggccgctgcagtcttttcggcaactaggccgcttagccccagctgtgctcggtttctggggtccctgtcctgctctgtcactccccacgcctgggctaaggaccaccaaggaggtccggaaggggatttcgaacttccaagtggcccaggagaagtgaacgcttctccttctttttcaagcctcccgcccagccctgccggctcggcctgggcgctgtggaccggtaacagcagttccaccaggatgcaggccggactaagctcctggggaaaacccgttgcaataattgtttttcacacacaacttccaacccttcccccatttccgcctccaattcggagacttgcaaagcccaagaaagggaaaagcaactctatctttgatcttctcatccaaagttaaaataataacgacaatgatgatgtagggagaaagaaccaaatagagaggctaaccccacccacaagaaagtgggtaaaaagcccaacccctgctctaaaaggctcaaccctgtggctgagccttggccgggtttctttctctcccggcgactgcagggagcctgcagggagccagcagggaggcagccgcccgccgccatggcggtctcacgcccgcgctcccgtcggtcgccgggaggtggcgcgctctgctcagaggccaaagccaaccttctctctgtttctcccccttctccttttttccccctctctcggaggctcgcattgaatcggccctaacgattctcggatcgtcattatttgtaaccatagagcatgaattacctcttgaggtcatcagcgagaatttacgactggtcaacaaaagcacgtgattccctaacgcccccccaccccccttccaaccccccccccatatttggccgcatacatagcaaaacgaagtacagtgcatcgctataattcattaatacatcataaatcgtgaagcacagggttataacgaccacgatccacaaatcaagccctccaaaatcacccaaatgagctcgtactttgtaaactccttctcggggcgttatccaaatggcccggactatcagttgctaaattatggcagtggcagctctctgagcggctcttacagggatcccgctgccatgcacaccggctcttacggctacaattacaatgggatggacctcagcgtcaaccgctcctcggcctcctccagccactttggggcggtgggcgagagctcgcgcgccttccccgcgcccgcccaggagccccgcttcaggcaagcggcttcgagctgctccctgtcctcgcccgagtccctgccctgcaccaacggcgacagccacggcgccaagccctctgcttcgtccccctccgaccaggcgacctcagccagctccagcgccaatttcaccgaaatagacgaggccagcgcgtcctcggagcctgaggaagcggcaagccagctaagcagccccagcctagctcgggcgcagccagagcccatggccacctccacagccgcgcccgaggggcagactccgcagatattcccctggatgaggaagcttcacatcagccatggtaattctctctctcttttttgtcttctcggctttccttctctgcgttttggggtgggatgggggggacaaggagagcttggctttaccctaaatatagattcatttttctaagggggagaagtatctaagaggggcctcatagcttcgtagacagagccaaaaagggtctctctgttaagaggggggtatttttaataatttgtttccagcttcggcttaggtttttattagcgcagctgaaccagctttaggataaaggatggggttcatataatgtggggaagggtcctgcttacccctgaaattttgagactgtcgctagcaaagaaggggtgaacagtaaaaggagctttccggggcaaaagtgcaaccgctctcctccctcccggggcgagcggccgcctgagcccagccaagggtgaggcactaggagcgagcaagagacaaagccgggcgcactggctgcctgcagaagtgggggatgcagtagaaaggggtgcagaaatcgagcttgaatgtgggcatctggagtagagaggattggagctgtggtgagctgggtgccgggacgcctgggtcctgctcccccgccccctcccacccagtgccccctcccttaaccggaataatgttgccttgcggctttcctctatctgctccagatatgaccgggccggacgggaaaagggcccggaccgcgtatacccgctaccagaccctggagctggaaaaggagttccacttcaaccgctacctgacccggcgacggcgcatcgagatcgcccacgcactctgcctgtccgagcgccagatcaagatctggttccagaaccggcgcatgaagtggaagaaggacaacaaattgaaaagtatgagcctggctacagctggcagcgccttccagccctgagcccgcccagaggagcccagcggcccaagagcccgtgccacccccagccctggcccctccaatcctccccgctctgccgccgcccgctggggaccggttcccacaagcctgcctcgccttgtgttacgatatttcgtttgatcttaggtcttcctgtggctccctctctcctggactggttatcttgttattattgttaataataataattattattattttccttccatgctcccaactcccttctgcttgtcccaaatccgccagtgtttctgaatgtttgtgtctgtggttgcagtctttcccccaggaaaaaaaaaaaaaaaagaaattcgcatgtttaatgtgaactctcccctccccatctgtgttctaacttatttataaaagatgatcgctgtattttgagtttcagctggaaacttctgtaaggggcagcagttgaggtggggtagtgccgcagtggggtcaagctgagctggcttcggagatggagtcccttttcattctcctcctcctccctcctcactccctaggcccaagtctcctaggggcttggtcctagggtgggaaggggctagggaggaccaaagggatggtattgagaagagagaaagaagatagtgagatttaagttcctgctgcctgggtaggccccacaaggcctggtctgggagtatacggaaacaaaaatgatcctcagtgcaaaatgtcttgtgtatttctctgtgaatccatgggtctggctagagggcccaaagcttgtaaatatggggatagtctgggtcagacccatctctcccttacccatcttgcttccaagaccatttgtagtgagcgagtggatgctgtgctacgtgtgaaatctgtctttgcggggcctgtctcagtgattcgcttttggtatttgtttgtagctttcctggaagtcaaataaatgtttcccccactccattgcccttccacttgtcttttctccgaggggtctgcctctcccatcccgggcacaccctgcaccattctcaatagatctggggtgcagggaagaaaaagtaggctgctccccaacaactcttctcagccatgtaagtcactggcttggtcaacagtgcttgggccagggaacagaccttcatgcctgggggactccaaggcccagaaaccccatgtggggctggggcagaggaaaggctgagctagacttcatcctggtcttccactagctggccaaggaagcctctggaaaactcttctgggaaagtaatttgggcctaagtcctcagcaggaggctcctggccttttgggagtggtagaggcctgcccagccccctgtctcctactccaagtcccaattcagctctgccaccaactaaagcaaaaaaaaaaaaaaaaaaaaattcagctggatttcaaaggatttctctcaccctcagccttccctacccttatcaagggctccttctctccaagggcccaactgatcttccctcttgattaggagttagggtcctttcagaaagacccctggttccctttcagcctggcccagggctagggcccagtctacctccatccaagtcagcctccaccctgagcacaagagtcaagtctggacacttacccggtcaatcccttccagcttggcccaacttcttactggacttggagggagggggagctggtgaggaggaagccgagggtcgtggaggctctacttggccctcctttcccttcaccccttgactttgtctccctttgtcgatagcaaactatcccaaaagtcgctatgacatttagatgtcaaatggataggggttttatctcgaagttagatcgtaaaaatcgccgagaagtcagacagatacccctcactggctcgagaaagtcacgtgaggtccataaagttagttttatggttttggggagttgacaccgcgcagtatatttcacattctccagaatgttaagtgacactttaactgctcgctgtggtggggaagggggcagaggtaggtgagcactctcccagcctggagcagccggaccagcccagaaggcagcggcggcccaggccagcattcccgcagtaagtcgctttcagctttcgcttttaccccttgcaattctggggcctgggactgggggaagaaaacttgtttccacctggggctgtggggtgatgtaggggaaatttagcctgttttatgcacccagttctaagggactgggtgcctgaaatgagtgctctcagtttcttaaggcctcatcagtcgggggtgcctgatttttaccaacaggagtgtctgactttgtggggaaaagggtttgtgtgggggatccatgctccctcagtgccagcggaaatttagggaccaggaaggaggggtgtatattgctgaaagaaggggccattggtgggggccacttcactgctggatatcttcagacaactatccccccatcctccggaaagaaactttatgacattcatttgtcggaggtgtgtgggggtgcaccgctgggcacttttatctggatacatctgagctgagaaaaagcaccgggtaggcggctgctgtgggctaccttgccctggggtgatctctggctttccgatctttgaagcccataaaaagaggtccctccggttatctttggcttcatcaggcttctctgggatggggagcacagcgctgcttttgcctccaccttcagcctgttggtctcaagctaatctttctccttggctcgaagtaggatcctgaagtcagactagggagcagacagagagggcaattcccccaattcaaaacctaattcctgaaccaggagtgggggaagggaagagcttcttctcttgcctagaggtgttaggtgtttaagtagaactctggcaagccctcctcaaataaaatcagctcaagaatacaaatccctcaactgtcgggaggaaatagattcaggagctggaagagaaaataggaaaggtgctcttttttcctctctttttccctcttcttttctgggcacaccctcaaagtcccctttgttttgtagaaccataaaccagagagacttcaggatttgatccccaggggttctgttattttctagggaaaagtcacccttctaaaagtcagaggcttcttccccaccaaattgacccccctccaatttaacacccgtggggctaactaccctgtcactcctactttcaccagcctgccatcccttgattcagctcaccaactgccataggtagtttctgggattggatatgtggcacctcgaggggcttctgatctttgggacaaggatggggtcataagactccctttttctcattaagggacattggagttctccccctgtcctctttctcctgaagccactttctattccctgagctctctatccactgcccaagcctgacttacaggaaatccttaacaggctttaagagcagagtcaccctggtttgaagacatatcatcccaagaatgatgagggcatttgtatcccttagaaaggagacacaggtcatctcccaaaggatccccagcaccactgaaaatataaagaagtgctggaggcacagcttccacagtcttccactctacaaggcaacggagttgacagacatgcagacaaagagctctgcaagggagagtctgacctgggtctccaggggaaccccattcctattgtgcccctggcctcactctaatatacttccctttctgaaagcccttctggaagctagaaccccagatagtaaggcctgctcctgaaaaattgtttctttgccccctctcatgtcagttctgtaggctctaacatctactaggcatatctggtcggattttccaggatggcaaagagcaaattggggtgcccacttccacctcagtgaacaaactcttgaagggtctcctccagctctaagcaggtcctggagaagatgccctaggctgggctttcctcttctccacttcaggctccctgagctgaaccccagtcctgtctgaaccccagtcaggacaagctgcgggaggcaatgagaggtgtgaagggatttctgatgccaagaactctctcctctgccccagacctctgtcctctcctcctgccctcccaggctgtctccctctaagagagctgctctactctctccagggctttgctctccctcctctcccacctgctttctctccctgccagtccaggcttcaacctcttgagctataagccaagccggtaccctctggccaaatcttcaacctggggcaggccccaggaggtgacagctggagattaaggctgcagtttctcttttccctctgaggccagcctggccaccactcggtggacaattcaattttgattttttttgttttgttttatttggttatttgttttgttttgtttctctgaggccaatgggtgggaggaagtataaagaagtgtaaacaggaaagccagctgggcctggagttccaagtgcccatatttcatcagcttcctctccataactgtggcagggacacttaacccttccctggctgtgagaagttattctctgagggctggtgagcagaatgggaagatctaagaggcagctcctttccttgcctggttcctttatccctgggaattgcaggccaaggattctgagcaatggagaagacagaagctcagcacaacccccccaaactcagtcccttcccagggctagtctccccagcatggacttctcagcttgggggaccaacctggtcaatctcggaagacagggctagcaagaatgagctcccctcttttaagggaggggatactggtaaccctccccatttttggagtttttcagagtaatcggattttgaggctgagatctgcccacagtgagacttattgattgctgcagcgctgttacacatccatattaattaacaccgcctggaaacggagctgtttggggaggggaagggaaaaacgggggccccttaagcagaatggatatttctccctaagggactctgaggttgagattggagggccctctgcacatgaatcctgtggccctccccaggcttgaagcccctggagttctcagcaagggcaaaaatgacttagtctctacagtcaactccacacacaagtctcatggtggtaatggttggcggggtgggggattaaatacccctcaggtcgttcctgcaggccccaccccactcttccttgtctctggtgggtttccccagccctctaatgctctgtctccagcagaggttagtgagcatcctttctagaggggttaacctcccccctcaccttcctttcgacttctcaaaggtagaggcttatgacggttttcgaatttggtttgttttattttgctttagcgtcccgttgttgttggtagtgatggtcttatggccttctcctttctcctatccctccctccaaaaagtgattaaaatctgttaaaggatttaattaagagagttaaatgaaaaggaaggaggcgcaaatgagttgggggaaaaaacccacaccaaagctattctcaacgattaaatcgccattttaacaatataatggagtttgcatcctgaaaggggaaatcaacgctcatatctcatcaataattcatagagtccgggatcatgcagaggtcagcagacgggggcagcagcgccggcctacgtggggctccgagccgctgcagcatacattacgcgccgccggccacaccgccgcagccacctccgcctctgtagaccgggggtgggggcacgccggcaggtttaggcggatctttcgttctttcttttggcgaatttactgattgcaggctccaagaggaagaggggaaatttgggagcctggagagtattggacttcgggcaattcgggaacctgtcggatcccaaaaagcaccttgtccccaagttttaacgtttctcttccctctcttcttattccttttctcagtgatttaggcgtctcctctcttgtctcttctccccctaaagttcctcttggagagaaaaatgcactctctgcagtatcctctagcttctcctccccggaaacagttcccagtctgcgaggccgccctctggactgcctctcccctagtggatccgggctgagccttgcggcttcggagcacagcggctggttttggtcgcaacgatccctggatccctgacctcggagcccggtggggtagggctgaatgcatctagggaggaaaggtacctcgcaagccccagaccattttgccttaccaaaagatgacccaggccagttggaaaggtggggagtcaggacggaaaggcacacctaggggagaagtggagggaaagtgccagcctgtgtggggcgtcgcctcttgagggatttggaggcatgatagaggataccctatttcggggctcctgcaggcttgtccttaggtgcatgcatctctctaattcgttttcttttctgttttctgaatcccaagggatcccaaggagggagaaaggaaatccttcccagggagaggtgggggtctgggaggcgatatttgggcggaagggaaaccgaaagcgcacgggttgtccgcaccgccgctgctctggaccagaggcagaggctgtaacatcccggagctgccagtagagtccgccttagaccaagttcacagccaggctggggcctctgaggcgtcagcgagcggccgcgcaaggtggccccgggcccccccgcatcgttgggacactgaactctccctctagccctgtgagcacagcggccccttctgctcccgaggagcccctgctccaagctctctccacccttcaccccagaaatgcccttctccaggtcagcccattctactgctcgccataggtctcctcatccggcaacctcggccccactcgggtgtcaaaaatgaagaagggtgggtgggtcaaaagcccttccaggcatcccaatagaagagaccgctgaaaatgcgggaggtgggttccgcgtctttttccaaggagttatttaatagtcaaaagactcctcttgcccaggtctaaggctctggggtagtagggacattggcgaaggggggaggggtaaggaaagcgttttgccctggggtttctgcggccggcgcgtagcagaatgagaccctgggtggtgaggccagtgttattgccggaggggtcgcaaagttggagggtcaaaagtttacaccatgcgtgagtgggagcggcggaggcgactagcggcgggggcggggtggggcggtgggggagggggctgtatgtgtgtgaagacggacgagggagcctgggatgctggaggtaaggaagacttgtgggttgcagaagtgggggagcagaaatgggcagcgaagaggcagatatctggggaagggaaactgaggaaggaaaaatcccttctccaaaaagggcgagactggtggtggtggtggtgagttgtagaaaagacagcgcttaagggtgtggtgaaccctctgarcaattttctcttccaaagataatctttgagtcaccatattaaatttaattaaaaccttcctagccacacacattttagaaattcaattaaattacccccacgtctttgtaggacttctggcagggccaaagaatacttccaatgtgaaggtttgattttcaccaacatcaactcactctgcttgccctaaaggggtcaaactactggctctttcaatcctccacccctgggagaggcaggcctgttttcaagaacccttaacccccaggctgtgtcaggaaggtggggtccatgagcatgggccaacactggagcctttccaaactctcattcctctctccaaattgctccagtttaagaacttgcctactgaaagattagcttgttaattctctcactctctcccaagcctccatttgtgtgttcatcttgactccttctcttcctatttggatgagggaggagaaatgcaaaggaaaaataccaaatggcctcacggagatcttttttacgggagttgaaacaggcaacctgaaatgaactttgaatccatacattaaacttagctcatgagcaaatgcctagagagactcagtaattataacactggggcatatgtctattttgggtctttaaatgactgttgtattatgagatgtcattatctgctcttccaagcatttactataggaggtacactgtgggcgtttttccttccaggatggagataacctgagagtttctgtaaagatgctttttgaaacatggccagaagagacaaaggtttaatatcaaatttcaaatagatttaacccagggttttgactaaaccaattgggtgaaggtccctatttctgcttagtccttaggtgagtttctctgcagtgtcaggccaggaaggaattcctggagtcctgaagagacagatgtcaaagcctgaactgaagaatccatctccttctgttccaggacagaacgttagcaaatttaggtatagactggagcagcccaaggtcctgggctagaaggaccaggatggggaagaagtggcctctgccattctggaccaagctgggtgccttggggagttctttcttgacctctccgtactaggaggataccaccctaccaactaggctggagccctgtttcagtctgtagacttgaattgggaggaaagggagtcacctgacccacctctgcaggaccctaggaagctggagaaagggagaagtgtgttgtaggcaatccaccagattctaatcctggagagacaaacccaagaaaatctcactattttaaatgccttcttgatctgctcctgaacctccttgtgtgggtgatgggggtaggcaaaagtgttactgtattgatgagaacgattcttcggggggagggggaagctattgttttgtatttaaaggacagttaaagctctgaaagttatgtcgccggctttgaccagcccagcccagcacctctctcagggttctatcttccccaaacctgctgggttgtgtggaccaaaatcttggccccaagaggtggagtggtcatttctaggccctggagcttccaaagcttttgtagaaatgaggatatctctgacacttgggggagcaaataaagcagatggagtgtgcaatggggtggggatccgggccctggccatacaggcatttaggggtaaggttcagggaaggggcctcttgctcaggcctgctctctggggcccaggtgcccaaagccatgctttcagttttccccgtgccagcctcattctcaggcctcaaaaggatcccacatgaaaccccacactctctctggaacccgagctgacaaaatatgggaatgatggaaaatcaaaacaggggcgtggccgactgactcctatccgaatgggacttttttcgggtgggggttggatgaagagaagagaaggctctggcgaaaagtcgagctggagaggatgagctgaatcaaatttctgctctgtcatttttttcccaagtaatgacctacgcaaaattcaatatgacccagcgaactgcgcgagcatattatagtaactgcctgctcgtgggggaggctgggagagaggtgaaccgcaggtcacggcgtctaaaaattattaaaatgtttgagagcctcgtgacgcgcctagctgtttaacaaagactgccaaagtatgagattaacacgaaaacttgcgcttccaaaacaaaaacacaccaaaaaaaaaagtcacgttccggcttctgagggagcccgtggctgtgtccgccgccgcggtccggttttccggacacacaatagtggacaggagagagctcagctgttgcccggcgcgtccgcgggcggctcggcggccggcggggctggggagcctcccggtgagtaccctcgcccgcgccccctctgggcctttctctcctccgcgccgccgccgccggtgcgcaggccggctggggactcgcctccgctcgggccttcggtttcgctccctcgctgagtcccttctccccgccaacaaaaggtgatgattcctagcggactgggcacgcctggacggcggagggtggctgggaggggcgaggtcacgctagcaacctgtggctgccaggagaaggcggctgggaagccacggaaagacccgggagcgcaggggaggtggctcagctcgcgcgcagcccctgctcttattttactattatgcgtgttgctgttcgtatccttctgggcggtgaaggggagaggcagcctcccgctccggtgaaacccgtcctgggagtcgcccataaaccctgttctccatctcgggcggctggaggggtgaggggggtgcggcgccttggtgggattggcaggtggtgacttccagggcgcagaggagaaaaatctctgctcttgggcgccaggatcaaggatacccaaacccgcggtggctctgccgcctgttcctctctcttggggtgctggggcacctgggccgcatcccttgtgaagtgtagagcagcagagaggcccggccgccggcccagcggccctcccaaacttccgaaatgccgacgggttggacgggtttccgagagctggcgagttgagaaggacaggaggtatggggtgggggaggggcctggaccgttggagtgggtcctggagaccctaagtggcctatgacaagatttggaaaggtccctggttgacgctagggagctggtggggatcctagcagcgcattttgtctgtgggccctgggccagactctagtctccctgagtgcccagatgggggtctgagattacctattggaccctctcttggcaaagacaaccatagtgtgatagtttgcttttttctcccaaatatgtgtgagttcagcctgtctgggagaatgttgatgttagaaatcaggcccagaggccaacattggcaattcctagatttaagattaaaagaaaatcagagggtctctggacctagttgtgggcaggtgggaactctcctcctacccacctgcaaggtcccaggactgggcataggcagagatctctggagtgttgcagttagagggttgtttttgtgttgttcctgtatttgttaatgaaattgatattattttgacttcctcactaaagatgcaagtatttctcagacctagggagttgagtagggagtctgggtggggtggaggctttttctatgcacattttcccttactctgtcacagctttcacagtctcagttccctccagcccaatccccagactctcagcttagtaaattcacggcttctgggagcttcagaaagttggttcgtaaaccccagatgcccattttggccctaccaccagcaacccaagcaggtggctaggcgagttcatatgtgtttagaaggaaaggacccgtctggggctaggaaggtggggaaatggggttcctccccacacctccccgggatagaccctctctcctggctcccaggatgtgtgagaggctgggaggggccctatatcatctggctgcatcttttatggttcctcattgcccttcattcggaaatgaaacgcctttgatcttttctcaggttgtaaacggaattgcccgtcattaaatatctggggccccatctgcttggtctcccagcatttttctttacagctgtttctctctctttttaccactgaatttttccaaaaggacttttattacaccaccttcacacccagccgcctcttcctcctcccttcgctgagaggcgctttggaaaatatctagatattcgtttgatcacaaactaaaggcttggaggggcacggaggagccgattggggttttgttttttctaaaaaaaaaaaaaaaaaaaaaaaagtcctggggggaggggaggggcgcgaaggcacccagaaaggcctgaatctgacttcgtggcagcctcagaatgacccttcctccttttgtgcttagctaatgtttacatctcataattcatgcgccaccgagagttgcgcggcggcggcggaggcaaggttctcgtccctttgcgaactggctacttgaaattctaatagaagaggagaattgaaaaccttgtaatcccaagaacagactcgcactgcctttttctgttcccagagctcaaaactagaacaaaacgaaataaaaccaaagcactcaaaccacaccccaaacgaagaaggcgcggaaagtaggagaactggaaaatttctgggccaagaagatctgtctgtcttctgtatataccctgtagatccgaatttgtgtaaggaattttgtggtcacaaattcgtatctaggggaatatgtagttgacataaacactccgctcttatttttccagaagaaaaaaatatatatatatgtatatgtagtatttttctgaatgaggacagtctggtgactggccacacgaagactccttcctctttattcctctatcttttcctccttcaactggttagagatggagaaatcatctacctgaactctccccacgcctgcccctgggagccttggtcccttttcacatctctttaagaggttaatgttattgttgttgaagttttaaatttatcttctcgtcccaaacgcacccattttctattctgggctcagggaggctttattggaaattgcgaaaaaaaatgacttgtcttcagtgtgcgaagaaggcaaaggaaatttgtttaacaaacggatgctgaggccgcctttccgtttcagttcagaacaagatgacctggaaatactcgattaccaaggagtgttattgtctgtgtgggtcacctctatggctgtatccccagtatcaaagggatgtgagatttctattcgccgcggaggcggcgacaattagaacgtctcggacccatggttagtattgctcgggtggttatggaattagcaaattgctaatcaattttgctctcaaaagttgcaggtttttttaccccagcgctctgtctatagtgtgggaaaccaagtcgtttctccaggcttgggccgtgtgggttaaagggaggagtggataggagaagggggacagacggactgacggacacagtctagctaaccgtgcagctaaatgagatttggaaggcgaagtctccccgaattagtgcatgaatttcctatcgatccgcccgcggttccattcatctctgacaagtccctctgcgcacccgccctctagctctggacgcctcctctctcacccctacccttccccatccagctgcagagaaaagccccaagctctgtgctctggcccccgtatgggttcccctttcgagacggagcccccaacccgccagtaacctaactccccatagagacgcagggtgctagcgctccctcccgccgaggggaggagactggggcctttggaaggtacagaatgctgggcagaggtgaggcagaacaggagggctacaccgggagccccaacttcttaagggatctagggtttgcgctctgcctagcgccccaacaggccctccagtcgcaacctgcgcgcgctctctctctcgctctctctctgatcccggagagagcgaggcaaggagggggtcgccccgcaggagccctatgtaaatcctggtgttgggtgggtgggtggggagggggaagggaagaaggggaaataaacctctttggctggagtggggtccgggtgagcagatttccttatccgggaatcgcaggcggggcggccattggctcggaggatcacgtgggcgcctaactttgttcacttgacagtaagtaggagggctttcggaaacaggaaaacgagtcaggggtcggaataaattttagtatattttgtgggcaattcccagaaattaatggctatgagttcttttttgatcaactcaaactatgtcgaccccaagttccctccatgcgaggaatattcacagagcgattacctacccagcgaccactcgcccgggtactacgccggcggccagaggcgagagagcagcttccagccggaggcgggcttcgggcggcgcgcggcgtgcaccgtgcagcgctacgcggcctgccgggaccctgggcccccgccgcctccgccaccacccccgccgcccccgccaccgcccggtctgtcccctcgggctcctgcgccgccacccgccggggccctcctcccggagcccggccagcgctgcgaggcggtcagcagcagccccccgccgcctccctgcgcccagaaccccctgcaccccagcccgtcccactccgcgtgcaaagagcccgtcgtctacccctggatgcgcaaagttcacgtgagcacgggtgagtgcgtgggcaccccttccccctcccacccctggagctttacaccaaagggacttcggaggcatgggttgggggggggtttgagctggggaagccaattgtccccgctataaactcgccattgccggagatttacggtcgcctgttttcagagccacataattacatcccccataaatttttatggcctggtgggccctgcgcctttgaagtaggttccccatcctcttcaccattctcaccagcgactttttcgccagggagatacagtcttagtgaagttggaagttggggaggggtggaggaggtggaggaggagaaggaggaggaggtaatccgtatttaagcagagagttgagtcaactcccagtatttattttttcctttcttccagtctgactccttggctggagaagtgagcaaaagttttcagtaggggtaggcactgcttggaatctgagcagcaagggtgggaactaaacagaggaaaggtttagggaaacctcccctccctcttccaccccctcattctcccattctgggggccccaagctgagggggagagaggagcaattaaaaccttgggggagtcctcacacgccccccttccccaccacacacccaaacaaggacacagcacagccctccaaaacttggaggtctctttctcattcttgggtcttgcattcttcccttttcgtttttccccctctccctcagaaggaagaagaggtggcgggagagggagggagggaaacgctgtgttccctggaagaaaggactctctctttcgggggcaataaaactttctctttctccctctctccgtgtgtgtccagtaaaccccaattacgccggcggggagcccaagcgctctcggaccgcctacacgcgccagcaggtcttggagctggagaaggaatttcactacaaccgctacctgacacggcgccggagggtggagatcgcccacgcgctctgcctctccgagcgccagatcaagatctggttccagaaccggcgcatgaagtggaaaaaagaccacaagttgcccaacaccaagatccgctcgggtggtgcggcaggctcagccggagggccccctggccggcccaatggaggcccccgcgcgctctagtgcccccgcacgcgggagccacgaacctcggggtgggggtgggcagtgagtgcaggggatggggtggggggacaggagggggccttggggcctgggccccggaaaaatctatctgccctcccccacactttatatacgaataaacgcagaagagggggaggggaagctttatttatagaaatgacaatagagggccacggggaggcccccccagaagcaagattcaaatctcttgctttctttcttaaaaaaaagaaaaagaaaaagcaagaagaaggaagaaagaaaaagacagaaagagaaataggaggaggctgcagctcctcgttttcagctttggcgaagatggatccacgtttcatctttaatcacgccaggtccaggcccatctgtcttgtttcctctgccgaggagaagacgggcctcggtggcgaccattacctcgacacccgctaacaaatgaggcccggctcggccgcctccgcctctgctactgccgctgctggaagacagcctggatttcctttctttgtcccccactcccgatacccagcgaaagcaccctctgactgccagatagtgcagtgttttggtcacggtaacacacacacactctccctcatctttcgtgcccattcactgagggccagaatgactgctcacccacttccaccgtggggttgggggtgggcaacagaggaggggagcaagtagggaagggggtggccttgacaactcaggagtgagcagggaaattgagtccaaggaaaaagagagactcagagacccgggagggccttcctctgaaaggccaagccaagccatgcttggcagggtgaggggccagttgagttctgggagctgggcactactctgccagtccagagttgtacagcagaagcctctctcctagactgaaaatgaatgtgaaactaggaaataaaatgtgcccctcccagtctgggaggaggatgttgcagagccctctcccatagtttatgttgcatcgtttattattattattgataatattattattacttttttttgtgtcatgtgagtcctctctccttttctctttctgacattccaaaaccaggccccttcctacctctggggctgcttgagtctagaacccttcgtatgtgtgaatatctgtgtgctgtacagagtgacaatagaaataaatgtttggtttcttgtgaccagcacagcgtgtttttgttgaaacattggcgtaaagatatggacaaatgccacccagtgtatattttaagcaccctactgggttcagccccacattgtgtgtggttgaagatttttttcaaagagtctgatgggaatttttatctcagaggactccaaattgtggtggctggtttgttttccttttagggtgggtgtgttttgttttggggcttttaattttttcccttcagtccaaaaatggattgaaaggactgggaaggctgattccagtccctaatgggggaaaatgtttcattgtaggacacaagaggcttaagtacggcaaagcctttcatatcgtgatttatttgtcataagcaaataaaatgcggttaagctgtctccttttagacagaaggctctttggttattaaagttccgagagaggattccatgaggctggcctctttcctcgcagcataagaaggtatcgctttcctctgaggtgtttaaggctttaatgagtataattttttgcacagatgtttctgggtgtttgcaggttttcagagtatttttatattacaaagaagctagccagtgccatagctcaaactctgacaagcaaatagataatcaagaagacaaatggcctcttttgtgaagccttgctccagtattaattttcattttctttctcatagaaagtatcgaaagtatgactggggaccaaatagctttctgtctctgaggtcccagtcacccctagaatggagtgggggtaggggaaaggggtgcaggtgaccctcagaagctctgtcaggctcagattgcttttgtgcagcactgcttggaagttctaaggtctgggggctccagcctcagggtctctggtctattggtcatccagggtgcagccaccacatctccaaaaagctcggggctcgggagagcatatgcaattaaaagtcgttttttcagtcccatctcctttcagaaaataaaaagaaccaatcccacccgcgcgttttattgttatttattttgcattcctccagcttgcagctccggtagttggaggctgggtagggcagggggaaccgacaggccggtgtccccagccgcaaaagagctgctgaactgtccgtttaaatgctgctgggagactcgtaaaaaaatcatcgtggacctggaggatgagaggggcgagctttatttcggtcggattgcggtgtggtggtttagctgcaaggggatgccgcagccccagttgagggggaaaatagttcttaaaaagcatatgcccccctaaggaatgtctctaaagaaccaaatcaaagctgctctttggaaggtatgaatagaatttaaaaaaaaaagatttctatggagcttaaagttcacagccattctgtgtagacaagagctaagaaaaatgtgagaattatacagaaaaccattaatcacttcttttctttaaatacgtatcctctctcctttgttattattcaacagcaaatctccttggaccggctgttgggggaaaaaagtgttagccgtctctcccggatctgcaagggggaaaaaatttggaaccataaagttgaaaacttttttctctcagtttggaagaagcccttcgtcatgaatgggatctgcagagttcgggcgagaggaggcgagaggcgcaaaggtaacaaagcccgggcccgggctggcgtgttttgatcgttttatgagctcttttcacaactgaaagaagaaacactctctcgcctcttcctttttcttttttaactttcttggctgggtttttatggtggatgcttcggcaggtttgctcccttttatgatgactgatgcttgggtcagagggagagaaagaggggcctcgacacctggagagtgtttgaactggttgggactgaggtgtcagggcccatgaaaaaccccagagaagacggttgttttgtgaggcagttcagaagcgcttttctggttttggaaaatgcaggcaggcacagcgagccccagcatgtgtgcatgggtgtgtctagtgaggtccacatgtggtcggtgtgttcctgtgactctgcttgtctacactgggtactggtgtcccctatgcctgtttaccagtgagacgttgtcactgctgcctcttggaaaaatcaaatccagtgcttggatggaatgttccagctttggagcgggtataagtggatatgttcttttttttcttcttgtgtctagcttgggattctagacaaatatgtgctactctctggagcaggaaactgctcagttcacagacaaggtggactgatgcagaaatatttctcttctgctctgtccccccagccttcttcctggaggagcaatgttggtttggtttggtttggtttccctttgctctcctaatttgaggtctctgttctctcctctgcagccctgtttcttaggctgagggagtcagtgggctctgcagccgacctgaatgtgttggccctttttccctgaggcctcacttagggtttggaggcgggaggctggcaggagagagagttcatggagaggccacgttttctaggcgattagctcagtattagaaccacaaaatgacctcggaagccccttgacctcgctgagactggacattgcgttggcatttgcctcctgcccaggagggagagtcacacctctgcagggaggggtccttggcccatcatatgtcccatcttctccatccccctctaggccccaaacccatctttgctattttggaaattttggattatttttctattactgcccactgggggaaaaaaacgtaaagatttttagcccaagggtccagttgggggacgaaagtagggtgctaatctgtctctctgtacacagcaccttcagcagtccaggctccagccatcctccccgcaaccactcccaggtccagttcatctctttactatttcacctggagggaactgagggaagaaagacaaagggagaagatatgagaggttggaggggcctaatccacaaggcttcagagggccaggggaataaactcctgggctgcgaggagagaaagggcttatccgccctgaacattgcttcagaggctgtcatctccctgagggctgacatccaaatccacagcctgtcaacccattttctgaagttcatttgttgaggaagctatttctataactacctttacctctttcccctaattctcaatctcctcaataatgaaaaaagcccttggagtgcctcacccaccagaggagcaagggaaatgggaggaggatcagtgcaggctattctgagtactttccagggcctgctgtcccaggttagccaaagtttccagaaacttttaagaaataggtgaaggatttgccaaacagtgagccctgaacatagagcctttccaaaaactgtattctgtttgctgtatcttaaaaatccacaccagcagccaccctcttagggagagacagagacaaagagaaagagaaagagagacagatacagacagacgctggctgggaagatgaaatgttacccttcagttaagactaggagagacagaaccttgctgggatatgtgggttgttggtttgcattttgtaaattgtttcttgacatttggggactctatctcaggcaagaaataactggagtggttgatactctctcctttgtccctgggtggcataagtagaggggctggaggcctcaggaaagacagaggatgagcacaaagctagctaggctgctcctggactaaaaatatatggggctcagggagatgtgtattcattacctgtaagggcagatagccagttgtgggccttctacaggctcaagtgacaaagacctagtcgccgaggactttacaaactgctttctgcaatgtgaggattagggcccaccaaagggaaaaggagagagaccatagtcagggaagcctggggttcactaaggggaactgccagatctcccatttccttcactccagacaatcctagtgccactccagtcctcccaaccttttgacttctttccctctttctccccagttccctcggccctccccattctccctcgtacttccacccgcctgtcctgggcagagggggttgcccagttctgccagagcccttgaaggcggccccagcgctggcagtgggtctccctgggaagcggcagctggggagggggtctggttggaaaacggagttgggaagtttctcagcgtgagttgagcgctgacggatttgtgatcagccataaaactggcgcgttcagattcgtaaatcaatctcgcctttctcacagtgtaaacgttcgctttatcggcagcaagaaagtgctcggctcgcgatcaggcgcttgtttatttgaacgtggacattcccaggatccgaaaagagtatggtcattttaacagaacctgctggcgtgccttcgtgtcattttgctgttctttttcttgtccttaaaaattatttctccgttttagagattgctgtcttcccacatccagcatttctctctcctctctctgctctctctctattttcattttagactttagcagagtgtttttctctggaggaccatttttaatggatttgtggccagaacgtttcagggagttgccctcgctggagccgggagcagggcccacatcgggatcaggctgaattcaataccagtctgtgttttgtatctggacaatcaaagctgaccacctcccctacagagtccaggcctggccggcgcccccaccccatgaggccagagcagattccagtgctcttagctggggcagaagctgtgcagctgccactgtagctggaacctccgaggccgacaccggggtggctgtttctttggggcttgttaagacaaccgggtcctcaaccttctctccactgagttgcttttggtttagaccccttcgaacaagctgggggaggcccctcagacccctgctcccgtaccctgaagctcattcttcctggattccctgcctgccccggaggctgtggtcctggctgcctccagagctgctgaggacagataaggctgcgacttcttcaggaatgtcttttctgcttccctttgcatccccaccccccatcccatgccccggccgagaactctgattctagttgcacgtaactggtcaagtttggatggggggttgtttttgttttattttgtttatatttgagttgaaggggtctgtgtgtgtctctctctttaggcctggggaatagatagtccctggtatttaaccctttaacaggcatagccatcccccatctttttcccactgatcagcctccattgtttgttgattggaagctcggggtgctaacacctgggaaatagggatcctggggctgccaggctgacttcaaagcttttcttttcttttccctcctctcctgttcaaatctccagctgtcttcactggtgggtttgggaagggggggaaatgagacagggtgtgacataggtagagagaggctgacagtccgattcttttgtgtagaaaccttagtcccagtctttgtctctagaatctattttcaaacggtcagtcgcatttgatttcctatagtagtaacaacacaacagggaaaaaagtcccccttgcggttattctcaactctggaagctccagagtaatctcttcaccctgtcccttttttgccccttcaaaaggtaccagaaaagatcaaaacgagaataaagccagaagccccattatttatccacttataccatggacttatgaagtgtttattttcaaagtggctccttcagaaattttgtccattatttaggaagagagggagtgggtctcactcaagtaaatatccccaggagttggggaaaaaatggagttggggagggaaccttaatcctaaaggatgcagagagaagaactggaagttgagaaatccaggggcttggagaagggctctgagcccaccccacccccaccccctagacgcccctgcagactatttctgcacctccacgaactaagcagaagcaggaggagaagggagagaggagaggtgggctgtgggtaagtgtgtgtccatgggggttagggagctgcagatgtagtaggtatggatgtgagtgtgggagacagacggagacctcactactgttccattggtgggttgagggggaacttattttgcaggaaaatttctcctcctgaaggggaaggtcatagtggtcctttgagcctgaaatcgaaagacccccttccccctcccggtcacgtgattcattaaataattaatgccgaggttgcagaatagatatgtattcgtcaggaaaatcgcaggctcggtctccctgtttctgacgtgcaattcaactgtcctttgaaaaacaagcctgtaccccgagaaaaaaaaagagagagggggagagagagagggagagagagagagagaaagaaagggagacagcaataaaacagccccgcagccggagccacaccgcgggctggggtattgtaagtagaagggatttctcactacctaccgcgtcttatatgtccatgtaaatttattgtttgttattaatgttattgtcgtaaaatgtgacaaatagccatcttcatttcctgccatttctcttcacacggtgctctgtgtgtttatgcccattgaggcattgcatagagattttaggaatattcttcttttctctctctctctttctccctccctccctctccctctctccctctgtcctccaacctttttcttgatttatagcaatatgggtgtcagcttctcagccggcatgccagccattgtgtgtgtgtgtgtgcgcgcgtgtgtgtgcgtgcgcgtctgcgtgtgtttgtgagcgagttgtgttgtttatggccatgtcttcgataaatcatttttcacggaaaatgatgtggaagctgggctgtttctgcggccggccgggagagagtcgctctcggaggcacttcctccctctctgctctgctcccaggagttggttatttcagacgatttacagtaatatatcagcagttaatatgaaagctctatagctggaggtcttaaattacagcatctgtgattatcaattaaagcgagattttcataaatttggtaaaccagaaatgcctcattggcatataaacccagtcaatgaccatggtctaatataaaaattatatttgtgagcctgatagagccaacattcctgcagcagcagacagagctccattttttagcagctcccctccaggagtttggcttctccaactgcagccctggatgaacaaacccaactctgaaggcagaaggagccttagagtaagagaggtggaagtggagaaagaaattactggagttgaaggcaaatatttttgtgatcaatggagaccaaatcaaagttctgtgcaattggaaagggatgggaggggttccgttacattattaaagcttaatttataggactgatgtgtctggggggtggtcgaaggtggaaaaggaattacccaaattgggggagacaatggaggcaagcagagggtgaagggcagggagagaagctgaaagctttggctccccaccctcctggctaacaaaacaaggaaatgaattcacaccccaggagccttcctttgacctgctgaaacaaagaaaagtttcctcagcagtgagggactctgtgtttggggctaaagtggggagaagttctccgaagtttttctagaaaagaaatgttctaggaatcaggtggtcccagaaagttgggagtgttggaggatgttgggtgtgttcttttaactaagtccccatccaaaaagggagcaaacggggtgcagattggagagggaggggaagagctgttaactttctcctatagtttcatgtggaggtcacagttccttcctactaggggagaggctgctggtcaagagcaaagccagaggtggctttggggaatgttctgcactgtgccccaaagttgtgatggatgaggtgcagagggccagagccttcaccaactccagtcccagctgttggcccctcattccctgactggagccaggccaactgactttatagccacgattatctgtgatatttaactctgcctgctagtgtaaacctttgagcagggaagttagagcaacgccgcgcccaggtgttaattattcatggcatccactacgtggagtggcagcttaggccccagtccctgcagcatccaggagctcgctcccacactctgctccaagtgaacactgagtctcatccatgttaacaagggattctcagtgggtagtgggtgaagcctcccaattcaggagtctcagttgaaaagggtttggggagaaagagaaggccaggacccaaggctgggatgggtagaggcactgtctgacctggataaaaagaactagggaaaagtctggatacaggggcagctttgacagcactggagattgtgaggaggtgggaagggctggcagaggcagcaaagagacctggggcataggggctccaaacctttcagtctcattccccacccactccttgagtgttggagaatcccacacacattcagtgtgagaggcaagcagttctacttctccctcatctggaaagtgttggggggtatgactgtgaagagggtgcgttctccctcaaactggtggtccagagttagggcaaagtcttggagtttttgagagagcagggaaggatcacttcttccatggggaggaggagggacatgacagagaaggaagagggtagaatcatttgtattagcttctgaattcagcatgctttgaaagatgggaaagaaaaggatctgctctttgggccagcccatagctagcatggagagccagtcccacaggccccttccccctgcgtttgcaactcctcctccccaacccttttccatctcccctcctgctgctacctttgcctgtgacgtggaagtctgaccaaccacccccacccccactccaccagcttttcctctttattctttcagccctcttcaggtctttgtctcctctggcccagaggagaggaggtgacactgataccccctccccttccctttccccaacacgcacagactcttccccaggagacaaagcaaggggaccatcccttgccaccattatctggtaaatcccccatgtgatgcctaatgccttccatccaggcatctaggcctaccccaaatcagcaagtttgaaaggactttgttgtttatatatacatttgcttcatttagctatgaagcaccctgtctcttaccagtcctgcaccctccaccccactgatttgcttttgtgttgttcaggggttgggatagaatgcatctggtagacagagctctaagaaagctgctgactctgtcttctcccctaactctctgctggtatcctctctatataattgcagtgtttatctctgtgcctttaaggagccaggctgctaacgctttagtgaccagaggaattggatagaaagatgaagagtgagatgaggaagagagggacccagagagagaacaagcagcaggatccctttctgggatgggaagtcaaggctgagcccaaggaggtgatgacagggagagtggaaacaaaggccagtcagaggggaagggaggctgtcctggaggaaggagccccacaattcacaaggggacacacacacagagttaagtgagaacaagggcagtgggaaggaaactaccccttttgtccccttctctctagaagagaatttctctggatagagggtgggttcccccacagaggaaagggaagaagagactcaacctaatgggtgagcccagaagtgatttctggagacactcctaaatcctttgcaaggctcaattcaaattcactgaagacactgagagacgcagaattggaaaaagacaaaggggctgtgagaaaggaacggagacaacagagatggttagaaaagacagagagacccaacacagaaaaaaagcccaaaccctttggggagcaggcacagagggaagcccctccaggctccctgctccctagcagccttctttacaggaagctgcccaaagcccaggccatctcagaaacaactgcctctagagtaggcccttgggggtgctaaatcaggtgtgaggcagctgtggcaggagctgaagtgccagggaatggccaagatgtccaggacacttcagcctccaccacaatcaccagcatcagtaacttaatcattgggacctccccaaacagaatttcatcatgggggtggggggagttgggactttcacacctggaccctggaatcctttcttggcttttcttcccccttgtgggtttggtctctttttttctctagggacctggggaagttgttgatcttccagccgcctaagaactttcacctccattccacatctccctcaaactcccagccttaacaagcggatgcttcccctactaatctccttcctcccccatcttacaggaaagaacaagaaaaggaaaaagagaaagcaagttcctaccagcctaagcagctttagaaaactcgagggaaaaggggagatgcaaatctttctcgcccgtctgatccttcctattgccccctcgccattgctctgttccctccattgccgccctccctgtccccactcctgtcctgcccagaactctctcccttcccctcccttctctgccgggtcggacatatggaacccatttcgctggtgacattgaagagtcgccggtgtgcccgccttccgccatggcgcccccggcgctccctacgcctcgccgtgcccctgtcagttgccgctcctctcgcctggcaacttggcccgctctcaaagcccgagttcagctcggtgccagacgagcccggggttcccgcagccctgcgcggcccggacggagtgggagcttctcaggaaactggcgtctgccgcgcccggagtgccagatccgcgcgctcctggggccctggaggccgaacaaagccgggggcgggggcgggggcggggtgggggcgagcgcatccgggcctctcccccagctcggcgggacgctcgggggttgctgggggttgctgcgggttgagcgactaggatgcggctggctgcggcggcggagccccagcctgggccgagggtccggggcctggcagtcggcccccgcgcgcacccagcgcccggccgcccgccgttgcccgcgccctagcggaagaccgcacaggtaagtgtggggtgcggagccggggcgctcggggcctggcgggggtgcagaggtgggtggctgagacccccgcccccaggcctctctcctgggacaggccgggatccgaattgaagacgaagatgagagcaactttgaaaggcagggtgggggcttcaagggggtaaagggacctgggggtggaggacgagtgtggaggaatgtggagctgtttgggtgggcgtgtggacatgatcttgttaggggatgggagagccctcccgctcagaaagggcgttgaggcccaggagggttttccagggcagttgggggctgtgggtactgagggaaatgtgaggggcatctgttaggggcagtggggttggggggcgaccgctgggtcagcttccacaacccagctgccaccattgcccaaccctttagcacctagcgggttatttgaagccaaaactacaagggattgcactgaggctgagtgttaagcccagaaggtaggaaagggggtgatttatggcttcagagaagctgtgtttactcctgcctgctctggaaaccaaaaaccaaacagagcagaggccagagaagcccctctccttggagtgggaagcgatgccagcctgacgcactgggatttattttcccagatgagggagaatagtgggaactgtccctttgcaggcgcacagtgtggtgggtgtatgcaaagggagcatgtaagcaggcacatgtgtaggtatgtttgtgtattgtgtgagtgcatctgcacatcgggagctgtatgtactccaggtggggctttgcggatgggtttgcagaatcactttgtgagctgggagattgggagccaggagagagaccccatgttctctggttctggaactctgggatgaggtagctctagacacactgccccttgtcctgtccacgaagtagtgctctttcctgcttttttcttcccgcagccacatgcagcagagcccacttggcctggcctcctggcccctgcccctctaccctttccctgtgtgcctcctgtgccttctgcccacccagcctcatcttcactttgaatttttaactttgtggtgggaagccaaggaattagtgagtatggttggttgaggaggggaggccaaaaggagaaaaggcttggtgtggtagggaagatcggggagatccgtggtttgaggctggaccttggcagccttgtgtcccaccattactgctcgaattcccccaaaatctctgtttgggagtggggagcaagtgaataatacaaagacgaacagagtaagggagccatgcaggaggatggcggtggggagaaaaacattttgacccccagatagtaatttccgcaggccaactagtggctcttgcatttctgtccagacacccagctttgcctggaaattgttttgcattaaattttctcagccgcagaattatctttcctcgcctccagctaaacttgcatttttccaccagacacttgggccccgcaccaatgaaatctgagaggaagcggctgggccctaagtggccgtaatttaattgattttatcataaatcatcaacttgatgaagaacccgaggtttcagtgaagtaaattgatattaatgggagtttcttgaaatgcaaactcgctgcattgttggggcatcttgagctggggaggtagattacacatttcccaagagcagagagcagagacctggagcccagcacagctttgggggtagggaaagcaagctttgaggtgcagctgccggcagacctatttctatggggaagcacagcagagcgtggaactttgtcatgagggacacagtctggccctgtggaccctgctggccatctgggggaatgctggtctccaactgagggggaggcaactgggaaggctggtaggtgtatgggcagggagggggtcgggtgagagggctcggctggtacaatgggtgcattgatgcctggttaaaaattgccaggttgaaaccttcctcctttaattagactaattaattatttactgctcaagttgcagtgtctaaatatagcacttttggtttggtaatgagggtagaaaacaacccaccctacacacagaagagcagtaaaacgcagtgcatgagcctctatggggcaagggagggccaggcatcgggttggtgctcagtggtggtaagcatttaaacctcaagaggaaatactctgaatctggtgacgatggtgcccgttattgtctgaactcagtttattacttcttgtcactcacttttacatcagcacatggagaatcactaacattcagtccaaaaagagaccttagagatcatttagctaaaccccttccctccatacacatgcccaggctttacagaaggggacactcaggcccaaggagtgccctgcctcatgtcacatagccaagctggaacatctgaaattcaggccttccaactcccaagcctatcccaagtatgactctagacaaatcacttccttgctctgggcctcagtttcctgatctgtaacaatggcaagagttggactggacacttcctgatttctctcctgttctgaaattgggcacctctgtgtgtacccatcctcagcaggacagtgcatgggaggcactcccttgtgtgtcctggagctctgtgggcatctgggtatagaagttactgcatgtttatttgcaatattcagagtttacatacacccagagcagtggatgcttactcagtctggctctaggaaatccactggaatctggactattcctctttctgaaggtgcccttattctcagctgaggagtagccctgaggagagcagtggaactagaaggaagtggtgaggggccagctagctgggttgggttgagattggcatttggagaagggctaagtaaagaagggctgggccttactgagcaagagtctttccctgccaggcactgggctaaggctgtcattgttcagtgtgtgtgtgtgtgtgtgtgtgtgtgtgtgtgtgtgtgtgtgtgtgtgtgtgtgtgtgttttgagacggagtttcgctcttgttgcccaggctggagtgcaatggtgcaatctccactcaccacaacctctgcctcctgggttcaagcgattctcctgcctcagcctcccgagtagctgggactacaggcatgcgccaccacacctggctaattttgtatttttagtggagacacggtttcgccatgttggtcaggctggtctcgaactcccaacctcaggtgatcgcctgcctcggcctcccaacagagtgtggtttttaaggtgccccctaccccagcccagggactgaacagtggtttcagagtttagattctgtgatagcaggtgcctcccttctcagcctcaccccaaccctgggcctctgagccctggcttcttgggaggaagcacacacagggtgccacagcactctaccgggtctcctctagggtagccaggacagaaggcctgcatggtggaagactcccactctatacttgcttttattttccagctcctcccccagttccaaaggagtggtggcttctcaattgcatggttgtgagcaaggaaatttcttgcaggatcagggatgtgaagaggctagcaggggaggggaggtttccaggctgccttgggaagtgtggtttggaatatgaattccggggaaggagggaagaagaagatgggaagagatgggaaacaacctcatctttggggctctggaaatctgagacactgggcagataatccacttcctaaagcctagccccaaacactaatttgagagagaaaaaaaaacaaaagagctggcaggcccagactctggctctgtcccattctgacttcggagttttatatttggaggcaattcggaaggcctttcgctgattggtcattaatccactgagttattgtctgctaaacagaggtcactgggagagaaacatccagtctgtcaggagaggcccgctgaacctcagggactgggcccgttcctcttttcgtgcttctccctccctttcccagcaccccctgcagcccccaagctgcccaggatttgcagcctcccttcctctgccttctctgctctgcccacctttgtctcaacacttgctgggggtggggtttgccaggctaaggctgagcttctaggtgaggcgggagccctgattcagattgggatctatcaccaccaaggagcccacctgcctgaggctcccaactcgctggcagcaccgccatcccctcattagcatgttcaggcggcctccgtggtcatcgagtggacttcgcagacccttgtggctgccctttttgtcctgccaccccttcacaggctcagctggggagagggcagcgcccccacacgtggggtggggaaaaagtacagcttggatttttcttcttccactgcagcgacctttttcttcttttgatccccactattgctgagcagtgtctatgcgagtctcctcttctcccttccgggtgcccctttgttccctcctgctctggcttattggagagctggagatggggatccaaatgccaagagccttcttcattagcaattcccactttacaactcccagctttgaaatcttcgttaatacttaagggaaaatggagattcgggtgagtgtgtgacctttacaccacttttctagggctacaaagttgggcagtgaagctggaaaacagtgtgggactgggaacccagacagggccaggaagaaacacatcgccaaacatctcgccccaggcttacaggtcctagctcccaagctagcctttgggccaggcaaattttgtgtggattgagccaggggcaggatccttgactgccccaagtctgagatcagaaattggttttaaaagagccaaccagtatgcccttattgagagaatttttgtttgctagttgatgcatttttgggggaggagagaaacaggcacgatcccgccgccgaggtctagaagggcgggtagcccttgattgctccagagggtttaaagtgctcccgtcgcctgatactgggtacccagtggggtgggggagagaagtgccagagcgagtgctctggctctgaagaaacggaatggaagaggaaaagatgtctgtgaagaagggcattttctctaatctttacccttattatttttttacttcattagtttatgctagtgtctctgtctcttactcaattttcctctttttcaatttctctttctcctcctttctctctctctctctctcacacacacacacaccctacacacatgggcacacacacacagtttcccaggtttccctcccaaatccaagaagaaattgttccctcttctgtatctccagtctgttccgaaatcatggcttcactctcagggatgataagcccttctcctgcttctcttttcccagaccccaaagtcttccctcagcctgctctggcgtcccccaccccaagttccctgctcaaactcctcactaccagcctttatcccctgaagtttgaaaatcccctggctagcagcaacacctcagtccaaacaggggcccttaggggtgcctgttccaccctccgtcctccagcctcccagccctaatcagagggcagcccgcctgctcgccagagacctctgagaatggaagaaaaaaggcaagacagaaactaaactgggatctaattgcctcccaagtattccaaatgggctctgtactccagaattaagaagcccccactccatctcctaccgcatttgggggtatatgtcctctgagattttctccaggttcattttcttgcttctcggtcctctttttcactcccaccccactatgccccactgccttctgtagcccgagggaccacaaagagttgaggaggcttggggaagggaggggtctgccgttgtctctggaacactcctccactcccagctcagctccaggcccgcttctcctgcagccggcccgaggctgcctgggtgccttctggactctcgtgttattcctagaggcaaagctgcgcagtcccaaaagcgatcaggttctcctcttctctcagttttacaatgaccttctctaacccaatgatagtaacagctaggacagcagaggttttgaggtacattcttggctttttttttatttgggggagtgatagaaaaaaaaaccccaaaggtactggtttctttaagcctctggaagcctccctggcctgagtccctgacccaccaagctcaaagttacatggggtctgaccctgtaggtctctaaccagagtgtagagatctcaggacagactttttgcagccacatgctcaggcacccctaacaggtctctttggggttccaggctggcttgagccccaagtctaggtctgacttggatgttttattttcttgatactactaataaacacagaaaaatactaataaacacagaataatagctaataaacacagaaaaatagctcccaccctccatccccatgtcccccaacccgtgcttccccccagctgtcaactttctaggtaggaggtggggtcctcaggacattacattctgaggctctgcaagtggcttctgttgctggagggcaggaaggccataggtacccccagtttatcagggcccctggaaaccggctgctccaaatcacctggcctgacttagccttgcctggaagaagtaggggctggaggccaggggccactccctatctcatcccaaagtagagcctgtgagtggggagagagagggaatgagggaagctttgccagacacctccaacctatgctggagggaacacaaaagctggaaatcaactctcacctttgttgtccccagtcccgttccctcttctggtgcatccagatgggagaaggcaaaagccaagtattctaaccaggaaatcacagggtagtgccttacatgaagttaagaggaccagttttccaagctgcctttagagaaaagagtcagctttctatttcatcccctagctccgagtcagcagttaggcagagttgcaaacactcctgctttgggaaatgtcctggtgctctttttgtcttttccttcctcccggaatgactattccccaccccctgtcccaaatctgcagacacctacatttttggctcctgtcttcctcctacaggcctcctccttgccttttcctgccctgctcaaacacaccctaagaaaactttagcttttgtggccttcctcacttgtgccaagagtcataaatcttgcagggcagagagaaacaaacagggttgttctgaataataataataaccatcttccatctcttctgccagtgcatttaaaattaagcgaccctgctagttcttctcttcttagaagtacaaatgtccttatcacctcttagccccttctgcctattcggaggtgagaatcataacagaaacttatccatgaagttctttcagcccgtctactgccagccagtctggagctcaaactaaaacacagagtcctccttttgtcacccttttctcaaccctcctccccctgcaagatgttcagagtttttaaaatcatcactcaccgcttgttgtctgttctcaaaaagaaaaagggggaggggtgttttttttttgttttttttttaagttctggtctttccctctcccttggttagagactgggcctggagactggagggagatttgggaggaatagagagggtgtagtggagggaagaagccggggctggagactcagaaggagggagccagagtgtgagggttggagacccagaactactttctaaaaaagtcctggtgttccaattgcgaatgagtgcagaggggcacccggcaccctcacccccgggccaggcctgcctttgactcagcctccaaatactacttctcatattagcataatagttcactagtggggtatggggggagctgtgaacttcaccgcccttccttgcctttgctcacctcttcctccctgtccctccaatctagatttaaatttttacctgttctttaaggaaaaaaaaaaaaaccctccttcttttcttcttactctttttttggggaggcgggtattttaaaatttccccccttccccatcaccaccatcaccttccctccttatcaggcatctaagcttgctaaagggggagaggtgggggggtgtgagcttgtgtgtgagtgagtgtgtgtgtgtgtctgtgtggttttttttccctgtgcaaaagcagaggccattgttacggagagtagggcgtaccagtcttatagggcaaccacactgtggcggcttagccctgctggagcccggagctggattctggcgagctgagccgcccggcacctttcggtcttctattttttttcccgctcccccaccccctccctcgtgcgcacccctgctcctaagccgagtgaattgaagcggacgccgcgcggctcctctggccggtctgcccctcgggctccccagccggggtggctttgcggggcgggggcgggggggcggggggcgacgcagctttaaacagtggtctttttttcctttgccttcaaggaggggagatttgtcgcctgccgctcgctctggggctcgatgtgaatatatattatgtctgcctgttctcccctcgtcggtggctaaggtaagctggactgaaataggctatcagtttgtgaatggcggagagtatgtctcaatgatttatggcccatatgactccaatctcggttcaagaagagttcacaagctttaagcttccttccacgcagcgactctctctctccctccctccctccctccctctctctccctctctctctctctctctctctccctctctctctcccctctgtcttcctgcttctctcctcttttctcctctctctcttttctttcagcagccagatccagggctgaattttctccgcggctgctaagaaagtctcaacctttctctgtcttcctttcttgttatttttctttctcccattaatttttttaagtcctggaagatggcctatcccctctctcggggcttccccagctattgttactctcctggctctccctggggtgtgcttggcaaggtggggttcttgcggggggctcatctcccttctccagcgagaccctggggggaagccggcagccaccgtctccctccctccctcccgaggagccatatggaacctgaatttttccaacatggaggcaagggaaatagatctgtttggcttggtagagttgttccccaccccctcttgttctggatcccagatcttgggtccccttagcacctttctctcttcccactgtcccgtccgccaggcctcggcgccctccaacccggagccctgctgagcaaagtcccgaagcggagtttctaaggcgccttttaattcggttacctccagctcccaaaacttgctgccgcccgcggggctcggccctcggccggctggtgtgctgggaacctgcctccgataaccgttttggtgtcctgatcgcttgctcttcttcgcctccttgggccatcgtaggtggctggtagcttgtcgccagtcgccgcggcagcagcgaccggctgaggcagcctggcagcagcagccagggactacccgggtgcacaaaccttcccagccctgtctgcaccaccggcggagtctccattctttcctatcgcgtctctggctccttcgctttccacactcgcctggcctccgtcccgcgatggtttggggtttattgcaaggggagcggcaggaatttcggccccaggcatctagttaaattattgttttattattattactatcatcatcatcgtcatcattattattgctgtaacaatcagactaaataaagccagggcctagccagccaaccccctccaacgtttttatttcattctcttctctattaataacaaccacaactaatgcctgttaattaattcccccttcagccagggctgcttggaagctaattttggttaaatcagcagaggctaatggtaataataataaagggattgggtcagcctggtcaattgaactctggttctccctggaaggacctgctgctttgcagacccatgtgtatttccagaaaccaatcggaactcagggttacactgattcccttttgagtataaatctgtgccatgaagaaggggatttatgtgagggagggacttttcttcacctgcactccttttattttattttcctatgtttagttttctttggagttgaacagctaggctgaatgagattaaagttttccaaacacacatggcagtatggaggttttatgaaaagtgatggtgaagagttgggagagatggagggaaaaaaatgcagtcagaagtttcagaacaaatacacaaaatcctatgttagtttgaatctttatttttctggcacacttttaaaaggctgtattaaaatagtgatttttttttttttgcctcagggaacctcagtcaacaggaatacctctgtttctaacctagagaataatattgttaaaattgctttgttaatttttttttcctcaggaataattttctcttttggaaagcactttccccgtctcagtagaaaagtctagcagttgtaacttcttgtttcttatttgctttgggggaaatcaaagaaaacagacggtgaaggaaagggtgggaaaaattaagtctcatgaaaaaaaaaaaaagaggtccggggagagacctgggccaaatggtcacagcaccaactggcgtggcccaggaaattgaaacaatcctgctccatgtgggggccccacagggccactggctgcccgatcccaggtttggctgagcaaagacaagggctggaggtggtggtacctgcagcagggccatggacagatgagtctcggttcagctggctcttgaggttaaaaatcatcaggaagtttctaggtcaggctgttgttgtcttcctggtgggagagtggtgggaagtggagaggatacctcacaagagaagcttctctgctgaacttgcttctcctgcctgttcttttaggagatcctttggttttccttcaggctagactttgcttgggcaagagacctaaaccgacttggaaggaggcaaaggctggaagcatagaagcctctgggctcagaggagggtgttgatgatgcttttattttggagtctcctagtgtcccctcccttgagccatcctatcccagagttggggaggagagatagggagagagggactaggggaggtcaggggctagtgcacaggcaggagagaagcaatggcctttgccatagattctacatctaggcagtcttgaaaggcatatagtctttatttatttttttattttttagtggaaatgaaaactggtgggcttttttttctcagcatctgctttggagatgttggggaggggaaaagaaaaaaccctattgatgtcagttcccttttcagttcctaagatggattcgagccccagtcctcttctcccccttgtgtctcttctctcgcctcgcaggtcagccgcttggaacagaccccggaggaggggggcagagaggggaggtgggggggggggggtccggcgtgtcacgtgacccccagggttgccaatgtccggtcctgagggtatcaggcctttccaagttgccacccactgcccaggcctcacccagcgatgcagaaagccacctactacgacaacgccgcggctgctctcttcggaggctattcctcgtaccctggcagcaatggcttcggcttcgatgtccccccccaacccccatttcaggccgccacgcacctggagggcgactaccagcgctcagcttgctcgctgcagtccctgggcaacgctgccccacatgccaagagcaaggagctcaacggcagctgcatgaggccgggtctggcccccgagaccctgtcggccccgcctggctcacccccgcccagtgccgcacctaccagtgccactagcaacagcagtaatgggggcgggcccagcaaaagtggtcccccaaagtgcggtcccggcaccaactccaccctcaccaaacagatattcccctggatgaaagagtcgaggcaaacgtccaagctgaaaaacaactcccccggcacaggtaccagttctctgccttccttgtcctcagcttttgtcggagccaggaatgtcactgttattctagcacccagcccctaggcgcccgcgaggctgcctgggaacaatattaggtggccagcgggtacatttttgatacccctaccccctaatgacctctgaccccgccaacaccctcctccctctagctgccctccaccggagcttctgaaagctccagaaggcccagtgcgtggcctcaaagcccttcccaaggccacagagccaagacgaggcgctgccgggaggatgcagagtcgtcaacgattgattattattaagtatgattactgtgggtattaatcacaatcgcttggacggcccggggtcccggcctccagaaatggcagcctcttcgtgccacacttcctgcccacgagtgtccagattaccccgaggattctcctcagtctcccatcctgtcctcaggacggggtgggcggggaggggaaatgtcttccctgacctggaattggggataagggggagaaagcacgcacgcgaaaatccagccctaaataaatggccatgcggctctgtctgcgtgacatgatcaaattttcataagctggggcagcgaaaggagaacaggtctcttaataaatgccactattatagagtgtccgctaatgcgacgggcggtggggtgggggagtgaggaggcggcggggacccgaaggggagggcggcgggggctctgagtccaggcctggatttattaagaaacgatgcattcaatttcggcgtgttcagtaattatcttttatttcattttctccccttcccacccctccccctcggatccagcagagggctgtggtggcggcggcggtggcggcggcggcggaggcagtggtggcagcgggggcggtggcggcggcggcgggggaggggacaagagccccccggggtcggcggcgtccaagcgggcgcggacggcgtacacgagcgcgcagctggtggagctggagaaggagttccattttaaccgctacctgtgccggcctcgccgtgtagagatggccaacctgctgaacctcagcgagcggcagatcaagatctggttccagaaccggcgcatgaagtacaagaaggaccagaaggccaagggattggcctcgtcgtcggggggcccatctccagccggcagccccccgcagcccatgcagtccacggccggcttcatgaacgccttacactccatgacccccagctacgagagcccgtccccacccgccttcggtaaagcccaccagaatgcctacgcgctgccctccaactaccagccccctctcaaaggctgcggcgccccgcagaagtaccctccgaccccggcgcccgagtatgagccgcacgtcctccaagccaacgggggcgcctacgggacgcccaccatgcagggcagtccggtgtacgtgggcgggggcggctacgcggatccgctgccgccccctgccggcccctccctctatggcctcaaccacctttcccatcacccttccgggaacctggactacaacggggcgccccctatggcgcccagccagcaccacggaccctgcgaaccccaccccacctacacagacctctcctctcaccacgcgcctcctcctcagggtagaatccaagaagcgcccaaattaacacacctgtgatgggaaagggcgaacgaggattaggggatggggaggaagagagagactgtggagctctggggggcaacctggaggtctgaaaagaggagccagagaaggtggtacccaggcttcctggtcagaaccggcctggagctccttcccttccccctggcctgagaggttgcttttaagtcttccaccccttgttccatctgcctgccaacccatcggaaaggaatccacatcatattggagatgaccccatcaaccccagggctccagcactaccaagttggaattccacgcccgggagtggggtagaggaagacgagacaggacgaggcagaaaagcacattttaaaaaccagacaagatggctaggccatcaccaaccaacggacttaccttacatctttgtaggtaattccccccaaatcttgattttttttttcctcaattatcctttaaaaaataagaaaacacatttcaaacccaaaaggcacaaaacacgttcccttccaactttcccaaaacctcaaatttgttcccatttgaggtttattgaggtacacttctagcccccggtttttctgctctagaacattcatatctatacatcccacccccatcaattacagtttttagagggctcagggatggtgagagatcctgaaagagctgcctatattataaattatatacatttttttttaaggaaaagtgtggaggctagggcaggcaggttgttaggactgaaggtttgcccattctgctgcctccatctcagctccagctccatccccctctccacagaaagcagttggtgacacgaggttctatacttttcttctgttgctctcttgacttaacgtgaaaacagggtatatttgaacaaactgtctgtcccaggcaggggctgggcagggcctgtgtgccttgctcagcctcctgacaggacacttttgttgcacttagaatttacattttaatggatgtaaaaacaactgtgagagatgtctgggcctgcagaagtccagcattgctcaaaaaagcgtgtgttctagtgaacattttcatatatatttattggttatagcctgttaaaatattttcttttttgtattatttatccccctacattatgtatttatatgagggaaaaaaaggaaaaaattgtacttttttagtatttacctgttacaaagggacattgtgtttcctgtcatgtaaaaccagctattttagttactattgtactctagaaaagagctgtagatttatgttaaactcgtacttacgaacaattgtaattagttctaaaaggcatgaactcagctcctaatcgtcactgtatagtcctgaatttgtagaactagagttaattccctcttggaactttctttgttcttcagtagttacttttttccttacctaaaagggttgtctgtcaaacaattcttgaataaactttctgttatcaattttatcttgtcctggtggtccaatttagatagcagagcaaggctgctgactgccaaatttcccccaagggaagaaggacaaggacaaggacactgaagacccttccctggcctttttgtccactgcccaggttcctgtctcccccttgatatgtcttaagtttaaataccattttctcactcataagagcctgtaacattttgccaacttcttcagctgtggtttaagtagcaagttgggaggtaaccggggactcttggatgctctctgt

SEQ ID NO: 23500 - DNA, 5174 bp, Homo Sapiens
cacaactcgcggctctagggaaggccacagacctcagctgtacgagcggaacctggactagaggaactttcctcaggactcagggcacacagcccctcggccactactgtctgcgagcccgaggcgcaggggagcgccagcggctgcaggtacgctgcgcacccgcactggggcctgggcggtgcagcggcggcgggagggtcctgggaaccgcagccgccgaggccagtgtgtgagccggccggccgcggcaagccgcatcccccggccgcccctcgcagccccttgctccccggcagccgccgccgccctcacgcagcccagccgggcgctcgcgccaggacttccccgccgcccgcctcggcccggaacatggctgcgcgccctgctgccaccctcgcctggtcgctactgctcctctcctcagccctgctccgcgaaggctgccgagcgcgcttcgtcgccgagcgggactcggaggacgacggagaggagccggtggttttcccggagtcgcccctgcagagccccacggtgctcgtggcggtcctcgcccgcaacgcggcgcacacgctgccgcacttcctcggctgcctggagcggctggactaccccaagagcaggatggccatctgggcagccactgatcacaatgtggataatacaacagaaatattcagggagtggttgaaaaatgtacagagactctatcactatgtggagtggaggcctatggatgaaccagagtcttaccctgatgaaattggaccaaagcactggccaacctcccggtttgcccatgtgatgaaactacgacaggcagcccttcgaactgcgagggaaaaatggtcagactacattctgttcatagatgttgacaatttcctgactaatccacagaccctcaatctactgattgcagaaaacaaaactattgtggcccccatgctggagtctcggggcctgtattctaatttctggtgcggaatcacccctaagggcttctataagaggaccccagactacgttcagattcgagaatggaagaggacaggctgcttccccgtccccatggtccactccaccttcctaattgacctcaggaaggaggcctcggacaagctgactttctaccccccacaccaggactacacctggacctttgatgacatcattgtctttgccttctccagcaggcaagcaggcatccagatgtacctctgcaacagagagcactatggctacctgcccatccccctgaagccccatcagacactgcaggaagacatcgagaacctcatccatgtgcagattgaagcaatgattgaccgtcctccaatggaaccctcccagtatgtctcagttgtccctaaatatccagacaagatgggatttgatgagattttcatgataaacctcaaacgcagaaaggacaggcgggaccggatgctgcgcacactgtatgaacaggagattgaggtcaagattgtcgaggctgtggatggaaaggcactcaacacaagccagctgaaggcactgaatattgaaatgctgcctggctatcgagatccctattcctccaggcctctaacaaggggtgaaatcggctgctttctcagccactactcagtctggaaagaggtaattgatcgagagctagagaagactcttgtaattgaagacgatgtgcgttttgagcatcagtttaagaagaagctgatgaagctgatggataacattgaccaggctcagctggactgggaactgatttatattggtaggaagaggatgcaagtaaaggagccagagaaagcagtgcccaatgtggcaaacctggtcgaagccgactattcctactggaccctgggctacgtcatctctctggaaggagcacagaagctggttggagccaatccttttgggaagatgctgccagtggatgagtttctgccagtcatgtacaacaagcatcccgtagccgagtacaaggagtattatgaatccagggacctgaaagccttctctgcagaacccttgctcatctaccctacgcactacacaggccagccggggtacctgagtgacacggagacctccaccatctgggacaatgagacagtggccaccgactgggataggacacatgcctggaagtcccggaagcaaagccgcatctacagcaatgccaagaacacagaggccctgccaccgccaacctccctggacactgtgccttcaagggatgagctatgaaggctccctgggagtgtggcccacatcagttcaacatcctctggtttttctaaagggctattcatctgtttgctccagttttctgttttgttttgttcttagtggtcacagtcatctaaccaaagtgatctagtgtgatagatcgaaattaacatatttttgaccatggaaggaaataaggaaattcaacccaaatttcccaagacggctgaaagacaggttttttggaaactgttaagataaactgtaatccagacacctaattcttcagttcactactcatgtgatactgattcccacattaaggttgaacaacatggctcagagtcttgttcaagagaaagtgatcaccgagctgtcacatcagcaaatatgtagtcaaggcagccaggccaactagaccacacttattggtctagtttgtccgttttatatgacattgaaaacttgtgtgtgcaacttttgggggacaggaatcacttaaaatcatatttatttggctttttatttaaaggattctgtcacaagtcttattgaaaagtagattttttaaaaaaaaaaatcttagtccctgttatccagtaggggtgggtatttgggtccgactgagacttggcctgtgaccatcatggcagttggagttctcatatagaggtgaccagtttgccatgtggatataatttagtagatatttgacagtttgtgtaggtatttgagggaaaaaactcaatgtttggcttttttattatggccactcgagtcaggatgctctatttataaagataaatgtaatatataaagggtgaggactggctgtgcatcctgccctgtcccgggtttgcgcgctgctacagagcttcacgctctccgctccaccccttagcctgggaacccaccgcagtgwagttctgtgagtcactgctaagagacagagcacattttcaggccagcaactatccttgccagggttttttcattatattttgaattatttattttacaaaatgggcgaagatattgtcttttaggataaggcagagaaacagatgttgcagacttccacagcacccggggagtggtgggtgtggacacattggttcggcaatctgattctcctgaatttcccagccaggctcttgtggggaggcctgtggatggggggatttgaactatttggaaacaaatgattctctatctcaggtgagaaacctggtcagaaacaaagggctggtcacctgatttaggccagcaaccagggaagctcttagaatcccaggcggacaccctttctcaaaagatatcccctaagagtcctttctgctttcttcacagattgattttatgtaaaatgcagagttggactacacgatttcttcccactccacaatctgtcatcctagtatagatcatggtggtttccctcaagtttatgttctcatgccctcaatctgtaaatttttgtctccagaaaaaccctcccaggcatcccataccagcaccgttcctcatcactgtccatgcaccatgcagccatatggggggccgtgcacaccccaaaccctgagcttcacacttaaactcatggggaggggcccttcagagcagagtccacaggcgggtggtgctacatacacaagcttagtgtacgagtgtaagatacactttaagccagacacctaattcttcagttcactgcccatgtgatactgattgccacattaaggttgaacagcatggctcagagtctagagaaagtgatcaccaagctgtctcatcaccaaataggtagtcaaggcagcctcatctccccaggtgaggggcgggtccccactttaggacaagaggcagcttgccttccaccagacgccagcctcggccttccttcccgactcactgtgggtacccttctacactgaccagcaagctaggccgctggaggaaagggaactcacccaactctaaattgtgccgcttagacttagctgtcagtgtgacttcctttcccacccacccccagaaaaacagaaagagcatctggggagcgagtgaaaattccttaggtgattcctaagatttccttgggtatctggtttttgttttcatatttgagtgtgtgcatgtgtgcatgactttaatgacttttttaatggggtggtagttgtctgggttgctgggtttgaaggaagtttgggttgatttttgtggtgttttgtttaatagagaatttttttttccctgtycccctgtcagctggtctgacagatttaagaactctcattcttaaaagactttggacttaaatcctagcattttagactaggactgttctactgtgaagaaagttctgtctcctttagcccggtttgtttctccctgctcaggtctagaatcccaagcagtgtcctttcctggtgaacactgtgagccgcagatgtgacttttttttaaagtcatctcttcagcaatccagaggttccttgacctcattatttgtcctatctctcccttatagtcctaagccaagacatttgacctttgacatttgacctttgcagtgtcatgtgagggcgtcagtatagaggcctttgcatctgggcctggcacccgctctctgcctctggaggctaaaccctgtctggatttctcttgggatctaacgtgggatcttctggacagacaaccgtgacatcagcagtgctggtgctgctgtgtgtggactgaacacctgcactttgcagaggacacgctgcatgggccccgcttgcggttcattcaggcctgctgcaggagctctgagaacaagaaagagtggacacccgttcccctgcatcatctgtcttgcgtgctatttcagagtggggaagtgataaactatttgccttctggagctctttgtgaaaaattaaaaaaaaacttagctc

SEQ ID NO: 23501 - DNA, 3604 bp, Homo Sapiens
cgcttttcaggatgtccagcaaagaatcctgtgggaaaaaagagacatctcagaggaaagacaccaccacctcatcacccaattttggtgaaaaagacaagraagagagaaaaaccccagcaagttctactagttcatcttctataagatcagtttcatcagaaaagagaaaactgaaatcagatcatacagatgttctgtactataatataaaaagaagacaaggactgaaaagattgagtgtagaaattgacactctcagaaggagaccaaaaatcggttcttcatcccaaagacctattaaactcaaagaagcatcatattcaaatgataatcaaattattttgcagagtccttcttcaaatggawctaaaaaagacatacataaatgtgtagactttaaacctaaagatatcaaattgacaaatgctgggagcaagcttgaccatggaattaaaagccttagtagtcctaagattgccagtgatgtgaaacctaaagccgaaggccaggcaagtgaaaataaatggtctcatttacttgttcagagagagaagatgaaagaactcaagaaaggaagaaacagtaaatttagagacaattctgaaaaatgtgtcttagagaaatggaagagaaatcaattttctcaggattataactccaacaagataattaaggaacccttgggatctagaagacagaagatcagtttcaaaatccctataaaatcccgtgacaccctccagaaacttgtagaagaaaatgtcttcaacatagattctaataattcgaagactaagcaggaagaaagagaatacctggaaagctcccaggtttcattaaatgtgactaggcagaaaactgaacatttactttcagattttacatataagcggactgttcatgagtggaaacgaaaacatcattatgaccatcaagaaagtaatgattcacattctagggaaaacctaacccagagttttgaagcaccatgttgttccgtgtcatctgaaagtatccaggatgcagatcaagagatgcagatagtagaagagcttcatgctgcacgtgtgggaaaaagtgtggatttacctggagagttaatgagtatggaaattgacttagaagatgatgtacattcctcctctgcaaataatacttcagacagaaagcttctaattgttattgacacaaatattctgatgaatcatctcaaatttgttagaattttgaagacaacagaagtaccaggttttgacaaacttgtgttaataattccctgggtcgttatgcaagaggtagatcgtatgaaggaaggaaaactactaaaacgtgcccagcacaaagctatacctgcagttcatttcatcaacgacagtctcaaaaatcaagatagaaagctatggggtcagtcaatacaacttgcatcccaaaaacattatggattgagtgatgagaacaatgatgatcgagtactaaaatgctgtctccagcaccaggaattattcccttgttcttttgttattctgtgcacggatgatagaaacttaagaaacaaaggcctaataagtggtgtgaagtcactcagtaaagaagaattgagtgcagagttattacacttatctctgaacacagatgtgtgtcatcagccttgtattcctaagcaacagttgaaagcagaaacaacacccttgaaagagagctataaggaggaatctacaaattctggactgtccattctgcttgagagcattgtatctgatcttgaaaaatctcttggaacaggtttatcttcaatattagaaacagaaatgaaaattgcttttggaaacctttggatggagatcctgtacctgaaaccaccatggactctactacatttactacagtgctttaaaaaacattggttggctgtatttggattagttatggaaaagaacttgcttttaactattgagagcctatacaaaaatctccgtaaagctaataaggcagtggattttacaacagtcaaattcttgcttcaggattctagaagtttgttacatgctttcagtacaaggtcaaattatgatggtattcttccacagacctttgctcaagtaaacaacctccttcagacatttgcagaggtcaagacaaaacttaagccaaattcttcagaaaacacagtgactaaaaagcaggaaggtacttcattgaagaattctcataatcaagaaatcactgttttctcgagttctcatcttccccaacccagcaggcatcaagaaatctggtctatcctagagagtgtttggattacaatatatcagaacagcacggatgtatttcaaagattgggctcaaattcagctctgactacttcaaatatagcatcatttgaagaagcatttatatgtcttcaaaagttaatggcagctgtgagggatattcttgaaggaattcaaaggattttggccccaaacagtrattatcaagatgttgagaccctctataacttcctaatcaagtatgaggtaaataaaaatgtcaaatttactgcccaggaaatttatgattgtgtttctcagactgagtatagggaaaagttaaccattggatgccgccagctggttgagatggaatataccatgcagcagtgcaatgcatctgtttatatggaggccaaaaacaggggatggtgtgaagacatgctcaactataggatataagtactgatttgtaactttaaaggaattgcatttgtccttaagaataacagagtagttttcaatctggtcactcttttgggccaaacccaagagaattttaagaaatgtttcataggtataaaaaggtgatcgcctattactgacagtctcattgtagctctaaaaagcctaatgtatccactgtggaataaactccatagactcaactcttctggagttcacaatgcctccctacctctattcttgatagtgagccagtatctctaaggaaaggagagccgtatttttagtcatcttagggcaggagccactgtggcatctgaggaagacccagggtacagtattagcatttctttcaaccctaagtatgggcatgtgaccagagacactgccaaaccctaagaaatcattagggcatgatcatgctcaccatatttcacaaatgaaatcttaatgtgggctgttttttatgatcaaactgtcatccatgttgacctgatgaaaataacaccctccttcacctccctcagggtaatgaaagtagaaatttgactgaagctcctacttccttatacagcctttccttctgtgggcttgtcacttttcagtacatttctagtggggaagagcagggcgacccctctgctgggtttctccttaaatgtgaagcaaaataaatttatataatggaatttggtggcagtgactgatgtttgtctctagctaaaaccaactgtttagttgactttttagttataggataagttggaagtccttgtttactggaatatattatgcttttgttaacacattagattaaatagaatttggtattctattataaatgtttattttttaaagcaataaataacttatttttggtaaaaaaa

SEQ ID NO: 23502 - DNA, 963 bp, Homo Sapiens
ttctcatccctgtgctcagagctctcaagcacccacgatggccttctcaggccgagcgcgcccctgcattatcccagagaacgaagaaatcccccgagcagcccttaacactgtccacgaggccaatgggaccgaggacgagagggctgtttccaaactgcagcgcaggcacagtgacgtgaaagtctacaaggagttctgtgacttttatgcgaaattcaacatggccaacgccctggccagcgccacttgcgagcgctgcaagggcggctttgcgcccgctgagacgatcgtgaacagtaatggggagctgtaccatgagcagtgtttcgtgtgcgctcagtgcttccagcagttcccagaaggactcttctatgaggaacgaacgtgatggttaagctaccttcattaagcagcatgaccgcttctgagctcctgctgccgcatttaggccctgtcagctgtgaggccactggtgctgagtcaaagggaaaagctcagaacagccttgacagcgaagaataaagcatgactcatctcgtcctgcccacccctcacactggactataaataccctccctgggtctgtgtgctgttattccaaaagatgcgatgaatcccagaactaggctattcatgggctgttgcccagttcaagctctattgggtcctgaggaagattactattttggctacattgtttatcattaaaaccagcccagggatgtgtaaacctgcatctggagaataagacatttctttttggttaaatgatattagagaaaaaaaaaactatccaaggctgctaacaaataatcttcactttcaattatatccagcaataagttgttctccagaaaagaaagcttggaaacttacccagtttgccttccatttgggacatgactgatgtgcttcagtctttgtataataaatgcatcttcgcccctataaaaaaaaaaa

SEQ ID NO: 23503 - DNA, 41863 bp, Homo Sapiens
  misc_feature (18490)..(18490): n is a, c, g, or t
tgtgactaaaacagctgagcaatttctgtcctcctggaatccaaaatggactttcccaggccccattcctggaaacccaaatggacgcatccattgagcctggaaggtgggctcttctcaacctcctttccatctcccaggattcagaatggccattccaaaggtccagaacacacccccaaggctcattccaggaattcttggcttctgagattagaaaaggctgatggggtggagttttgttcctacaggtgacagaaatggactcttccagttccctttgtcccaaatttctcaatctcctggggcgttgggagttctggccgttttgccttccccaaagccagtttaccaaagagtctctggggagctgggggttggggatggaggctggggctgggccaaagcagattcacctatttcttcttttaacaaatgttgttgaaactgttcaaggccaggtcccattcttgcccagaaggagttcccagtctggaggagacaatcaattttggtttgatatctgctacaatggaggctgcccgagagacactgcggttggacaaaaaaaaaaaggcaacatatattgaaaagtaagccaagatacggtttacgtttatttctgctttttcacttccaagctgtgtggccctgggcaagtcattcgccctctcgacctaagttttaacttctgcttaatgggactagccttgaattactgtttttcactctgagattctaggtctcctgacaactcaagtcccgacacgttggctgcagagaaggggggaggggaggaaggcttcctagaagaggatttcagcagtcgggggtgacagtggagggagaaagggaacacggagacgcttgcgcagtaaacaccgcacgctctcttgcctcgcccaaccccttctctgcagcagggaattgcaggcgtcgctccacctatcccagccgagcggagtgacaccctcccctctttccttctctactgatcttcgccttccgcccgccccacagccgcccaatggagggctgaagtaggacagatctcgccaatccgcgacgcctgcggggcaggtctacccgttcattggtcccagtcaacctaagtcccgcctcctaggaccgttccccgccttccttcacgtccctcccttcctccttggagagccgctagatccaatcagtgtttgacctggccgcgcggagggggcgggcccatgatacgcaatcgaaccccgcccgtctctcgggcaacgcctcctcccccccctccccagctcccaaacggaaatagcggaacactgggccaatcgtagcgtcgtgcctttgcttggcggccaatgagagaggaagtgggggagaaacccgcctgtgagcggcaggagctcaagccagtgggcggctcagagctccggaccgcgggcggaggggaggggcagggggcggtgccacggcctgccagcccgcccgcccgcccgccagccagccctccccgcggccggctcggctccttggcgctgcctggggtcctttccgcccggtccccgcttgccagcccccgctgctctgtgccctgtccggccaggcctggagccgacaccaccgccatcatgccggccgtgtccaagggcgatgggatgcgggggctcgcggtgttcatctccgacatccggaactgtgagcgcgcggccgggggacactggagacgcgggggaggggggagcgtgaaattgaggggtttggggatcacagagggacccgggggatcaaaagcctctgcggccgtatagggacagcatagatgggccccaggaagaactttagagtggggggcacgtaggggcttggggtgtcatagagtgcctcttgaggtgacgacacggagtagctagaggggtccgggagggcttgaaaggggaggaagccagtgaggtcccggggatgggagcatagaggtgtcccctgggaaagactgaaaagctgggggatcttacaaacgatggggttagagggattcccaatgtagagaagaagtgaaagaagtgtatggcgggggtgccctgtggagcgatggaatgggaagaggccagaggggacctggaggaagtggaatgccggaagcctaatgaagcagggcttgaggacctgggatagggggtgtcatacaggggaaaggggttagataggtcaccgaggctcctggccagtggtatagaggaggcctgagagtggttgaaagtccatgagtttggggcagggagatgatgggacggggagactataaggacaccctggtgaaggatagaggggcttcagggtgggagattgcctagaagacatggaaggcagtgtggagggggctagaggggcagctgaggggaaaggagggacccaaggaacacagaggaaaagagctgtcggtgtaaggtcttgggagaacctgtgacagggaacggggggccaggaaagaagaggacattagagtaggggattggggaaagggtagaagaaggagcgcccagacctcaaggaaggcgttgggttctgaagtgcttgaggggtagatatctggaaagctgggaataggggaagtctaatcccagagagaggtcaggggtcaggcagcaggacaggcagggatctgagcccttttctatttgaccacagtaatatggggacggtggtccctgccaggaagagttgtcgtgacgatgggaatcctggcggcaagtcagctctcaactcctgggaatggctgtgggtgattggagctgccaggagtcttcagaggctgcatccgcatgggctctggggtcagccagacttgggtttgcgtttgagcactgccactccctggctgtgtgaccttgaatgagggacttcacctctcggtttcctcatctgtcaagagagactgctgatagtatcttcctgaggggcttgtgacaatgcccctcaggcctttcactcgttccaggccccagatggaacttggctattgtttttactccgttggctctgaacagcagccctgtaaagtacccagtgatggttgttgttttagaatttaactgttatggaaggatctggcatgtaataggtgctcagggaacaggagggtggaaacagttgagtatcagttggaggagaaatgatcacttgttatgataaggggcggggctatgggggttgtggaggagctgggagccactgttagcagacgggggctgcctctgttacccaccagggatgtgaccctccacgagttgtttaacctctttcaggacgttttcttgtctgcaaacttcattcataacagtgtcttgcctctgaaggctcatttattcattcattcacttgacaaatactttttgattgctctagtgttgtccaggccctgttctaggtactggggtgacaatagtgaacagaaattcctgttcttgctggtcatggtggctcatgcctgtcatcccagcactttggggggccgaggtaggcggatcacctgaggtcaggagttcaagaccaacctggccaacatggtgaaactccatctctactaaaaatacaaaaattagccaggtgtggtggtgggtgcctgtaatcccagctactcaggaggctgaggcaggagaatcgcttgaacccgggaggcagaggttgcaatgagccgagattcacaccattgcactccaggctgggcaacaagagtgaaactccgtctccaaaaataaaaaaaaagaaaaagaaactcctgtccttgggagctcccttccccgaggaagacagaacatatgcacagggaacaccctgatatacaacctcaggacctgactggttctgtgaagaaaaataaggaggaaatggtcgggagagggactaggatggagagggtactcagtaggcctcgtggaggaagtcatatctgagtggagcaagccctgtggattttggaggaaaggggtcctggcacagggaggtgcattcagaggtcctgaggttgcggcatgcttgacatgtgttcgagcgagagggagaaggtcagtgtggctgaagctgtgggagtgaaggggagagagggcgggtgtggaggggagtgggaacaggatcgggaaaggctttctgggccatggtgagcactttggcctttgtctgcatgagaatattttgagcaggggagggatgtgaccgattgatgttttaagataattcctctggctgctgtgagaacagattctagaggtagccatggaagcagggaaccaaattaggagggtgttgcaggcctctgggtgagagatggtgctggcttaacagggtgagaagggactggtgagaaatgggttggtgatacatttttttttccgagacagtctctgttgcccaggttggagtgcagtggcacgatcatacctcactgcaacctccgcctcccaggttcaagcaattctcgtgcctcagcctccccggtagctgggattacaggcacccgccaccacgcttggctaatttttgtatttttagtagacgcagggtttccccatgttggccaggctggtctcgaactcccaacctcaagtgatctgcccgccttggcctcccaaagtgctggcattataagcgtgagccactgcacccagcctgggatacaacttgaaggaaaaactgtcaggatttgcaaagggatttgatgatgggggttggggaaggaaagagatcgtcccgtcactgcaggaccccagagacgagccagaggacagaggggagatgcaggcttggggcactggtagtaatttagccacaggaattagggctggagaatcaggagccttttcttagcaagcgtatgttgaacggctggtatgtctcaagaattgtgctgaatgctggggacactggtgaacaggacagacttgtccaccccctccatgaagctcccagccctgtgggggagaaggtgcaacatacaaattgcagtagtccttcacactaatacctggacacggatgttcactgcaacattattcatgatagccggaaaacagaaacgggccaaatgcccatcaactgagaaataaagtgtggtctatgtagtggaatattaccgggccttaaaaaataatgacgtcctgctacatgctgccacagggatggaccttgaaaacatgacaccaagtgaaagaagccagacacaggaggccacgtgttgtatgattccatgttgatagagtatcttgaataggcagatccatggagacagaaagattagtggttgcctagagtaggggctggtgggatggggagtgactgctcatgaatgcataggttctttttttattttttgagatggagtctcactctgtcgcccaggctggagtgcaatggggtgatctcggcttactgcaacctctgcctcccaagttcaggcgattctcctgcctcagcttcctgagtagctgggattacaggcgtgtgccaccacacctggctaatttttgtacttttagtagagacggggtttttacatgttggtcaggatggtctcgaactcctggcctcaggtgatccactaccccagccttccaaagtgctaggattacaggtgtgagctaccatgcccggcagcattcagagcttcttttgggttcatgaaaaagcctacagctggacacggcacatgcttgtagtcccagctacttgggagactgaggtaggaggatcatttgaacccaggagttcgaatccagcccgggccacatagtgaaacctcatctcttaaaaaaaaaaaaaaaaaaaaaaagaaaggtcctggaattcgatagtagtaatggttgcacaacatcatgaatgtactaaagaacgctgaattgttcactgtaaaagggtcaattttatggtatgtgaattgtatctctttttttttgtgacagtcacaaaaatggcgcgatcttggctcactgcaccctccatttcccaggttcaagcgattctcctgcctcagcctcccgagtagctgggattataggcgcccgccactatgccccgctgatttttgtatttttagtagagacagggtttcaccatgttggccaggctggtctcgaactcctgatctcgagtgatctgcctgcttcagcctcacaaaatgctgagattacaggtgtgagccaccgcgcctggccgtatctcgatttttttttaaatggggaaagaatttgcagctgtcctaagcccagtgaggaagagggccatggtgttgagagaatggggattctgtgtggtcagcgagctgcggcctggctttgcttcacaagagacctttggagctgtgtgggcaggaagtaggggagttacctaggctgagggcagtgagaagagctgtgaaggcagaggcggggcaagtgcaaaggtcctgacttccggacgccatggcgggcatctctatctagtcccagctactcaggaggtggaggcagaaggattgcttgaggccaggaatttgagaccagccttggcaacatagcaagaccctgtctctctttcttttttttgacagagtctggctctgtcatcccggctggagtacagtggtgcgatctcagctcgctgcaacctcctcctcctgggatcaagctatcctcccgcctcagcctcctaagtagctgggactataggcacatgccatcatgcccagcaaatttttttgtatttttcatagagtttttttttttttttttttttttttttttttgagatggagtcttgctctgtcgcccaggctggagtgcagtggcgcgatctccgctcactgcaagctccacctcccgggttcacggagatgggtttttattatgttgcccgggctggtctcaaattcctgggctcaagtgatctgcctacctcggcctcccgaagtgctgggattacaggagtgaggctcagtgcctggcccccttctctattttcaagaattcttttttttttttggaaacggagtctcgctctgtcccccaggctggagtgcggtggtgcgatctcggctcactgcaagttctgcctcccgggttcatgccattctcctgcctcagcctcccgagtagctgggactacaggcgcccgccaacacgcccggctaattttttgtattttttttttagtagagatggggtttcactgtgttagccaggatggcctcaatctcctgacctcgtgatccgcccgtctcggcctcccaaagtgctgggattacaggcgtgagccaccgcgcccggcccaagaattctttctggaaacaaaaaaaggccctgatgccccagtgagaccctgagaaaagggctgtgtggctggtgcagagagggatgggatctgacgctggggagtgggcagaggctaggtccgtgtttgtcctgagagctctggagaaggtttcaagcaggagcgagggaagagaagggcggagggatgcggaggaggaggtggggagaggcagggctcagagagcagcagagggaagagtgtggagccagccagcaggaggatctgaagggcacagtggggctatggggaagggtctagaaggtgaaaggcaggctctaaggagggcagggagggcaaattctgcagataaggagggggagaggttgaggctgggcccagcccgagggcgtgttctgtcctgtctgcagcaggaatacagcagaagtattatctcacagggagcaagggctggggctgcctcctatctaggcagagtctggctggagtgggccttaggagagttggacgagtgagccaatgggagcggggtgctggctgcacactgccctgagctcttccatcagagcacatcccactccaaatggtgatccactgcagtggtgacatcgagcccaggccctgggtctcactccagctttgtcctctgtaggttctagcccatgggaggcctcaggagatgattgccagttgaatgaatgaatgaatgatggaaccagtctttcttgagttccagctgggtgccaggcactgttctaggtgatggggctacagcagtgagcagaagttcctgccctagggtgctcacgttctagagaggagatggtccactacacaggtgaatattttgggggccggacaggtgggagtaggtgttgatggaaaatgaggcaaggaaagggcttggggatggagttaaggatgatgctcttatataggctggtcagagagtgtcgctgaaaaggtggcattggagcagagaatctaactaagtgggggaatggtgcatgcatgactctggaagagggagctgcctgtgcaaaggccctgaggcaggattgtgcttgtagtggagcagggacttaggaggaggagagggcagctcctgccttggagagagaggacaggagaaccggccagagagggaacagggtagatggtgcaggcccttgtgggctgcagtgagaactttacttttacttcgaacttgctgggagccatggaaggggtttggaggagtgctggggtctgactcaagttttcacatgatccctctggcctctgtgaagagcacaggaagtcaaacagatttcaatttggtatcccttaagaacgggacagatgcaggcctgagccccagccccacccgtttccagctggttattgtgtgatggctttggtccacaaatccgcattcaacacctcccctgtgccaggctgccctgggccctgggaacactgtggggactgaagcagccgtacatccctggcctcatggcactggtgttccgatccaggaggaaatgaacatgcaaacccttaatatgtaaggaggcaactcaggcagggtcttggtggcccaaatagttcgccctgctgagcaggggggctgaccaggagaatgagagggtttgattttgttatttacgaagaatatattttcatcacccaggaatagtgatgaccttgagaatatgagtggtgtaacccagcaccaaaatgcaagccatatatatgttgaaattttcttttttttttctttttttgagacggagtcttgctctgtccacgcccggcatatgttgaaattttcttgccacattgcaaaagcaaaacaggggccaggtatggtggctcacgcctgtaatcccagcactttgggaggccgaggcaggcggatcacgaggtcaggagtttgagaccaacctggccaacatagtgaaactccgtctctactaaaaatacacaaattagctgggcctcgtggcacacctgtagtcctagccactcgggaggctgaggcaggagaatcgcttgaacccaggaggtggaggttgcagtgagccgagattgtgccactgcgctccagcctgggtgacagagagagactttgtctcaaaaaaaaaaaaaaagcaaaacaggctgagcatggcagctcacgcctgtaatcccagcactttgtggggccgaggcgggcagtttggttgagcccaggagtttgagaacagcctaggcaacaagatcctgtctctccccaccacaaaaaaacttttaaaattagccacgcatggtggcatgcacctgtagtcctagcttcttcggaggctgagatgggacgatcgcttgagcccaggaggtcgaggttgcaatgagtcaagatcgcaccaccacactccagcctggacaatacagcaagaccctgtctccatatattttttaaaaaagcaaaataatcagtgaaattcattttaatatattttctttaccctagtatatccaaactattatttcagtgtgtaaccagtgttttttgagatggagtcttgctgtatggcccaggctgagtgcagtgtcaggatctcagctcactgcaacctctacctcccaggttcaagcgattctcctgcctcagcctccctagtagctgggactacaggtgtgcaccaccatgcccggctaatttttgtatttttagtagatatgggattttgccatgttggccaggctggtcccaaactcctgacctcaagtgatccacctgcctcggcctcccaaagtgctgggattacaggtatgagcctgtgttacccaggctggtctcagattcctgggctcaagtgatctgcctgtctcagcctcccaaagtgctgggattagaggcgggaggcattgcacccagccttcagaaggctttctgaggattcagggctgctggggcttgtacaggaagcacatcaggtctcggtctctgtagaggaaatgtccttggtctagaaggctctgaaggcctttgcggtgagatgctgggtgatgcctgtgttaccttcataaatgcacattagtccctccagggcagggcccaggtttgacaggatgcctttgctggtagtaacagacccaccctgatctggggcttacatgtttagggaaggcgttatctcccctaaccagaagctccaaggtaaggcagctccctggccccgtcagcacttcccttgactctgccttactctgcctggagcaagatgttggccgccttcgcacccgaacacccctcacggcaacagccactggacggagcacggcctgcccctcccatggccccccccagcacctcagaaaactctggagaggctgcgtggtctggccccacctgctgtgctcttctccacccgcccccgccgccgcccgcatcctcagactctgtgcctctttcatcaccgtccgcctgccttgcctcatgctgtcctacctccaggccattgcacctgctggtcctcctgcctggagcgcgcctccccttgtttctgcctggtccatttcagcctcatcttttgatcctcagatcccagcagctgtgtgcagagaagccttccccgtcccctgcgccattctcattttagcctctcagccccgaaatgtgtatacctctttcagaatacttgccactgtccctgtctgccaccactccaatccagggatgcctcgagagcagggtagatgtgactcatccttaagcctggccccagaaatcccattgtgaatgagagaatccctttaaaactctctcacaggcttgcttgcctcctgtgacagtgagctcattccccctgttgctggccctgaatgccgggtcattcttcccatgatcctggtctgtcagagctgcctcagccctttccccaggcaccaccccagtagcacccatacagtatccctgggctccctggccatcacgggcctttagatctttgcagagctgggcctctgccagagccctccctttggggccacaactgctcctgttttgaagaccgagagcttttcttctctctctgaattcctttttttatagcaaattataccagttatgcagaagatagcatcaaatagatgtggaccatttaaagcctatttaaaggccaggtgcagtggctcatgcctgtaatcctagcactttactttgggaggctgaggcgggtggatcacttgaggtcagaagttcaaaaccagtctggtcaacatggtgaaaccctgtctctactaaaaatgcggaaaaaaaaaaaagccaggtgtggtggtgggtgcctgtaatcccaactgctcgggaggctgaggtaggagaatcgcttgaacctgggaggtggaggttgcagtgagccaagatggtgccattgcactgtagcctgggtgacagagcgagactctgtctcaagaaaaaaagtaaaaataaagcctatttaaagaaaaatatacatatatatgcatatttgtatatatatgtaaatacattttaaatacaatttaagtaatactttaaaaagagatttccagccgggcgcggtggctcatgcctgtaatcatagcactttgggaggctgaggcgggcggatcaccaggtcaggagattgagaccatcctagctaacatggtgaaaccccatctctactaaatatacaaaaaattagccaggcatggtggcgggcgcctgtagccccagctacttgggaggctgaggcaggagaatggcgtgaacctgggaggcagagcttgaagtgagcagagatggtgccactgcactccatcctgggcgacaaagcgagactccatcacaaaaaaaaaaaaaaagatttcctggcagtaagcggtggcccatgcctataatcccagcacttcgggaggctgaggtgggcggaggagttgagaccaccctgggcaacatggcaaaaccctatctctacaaaaaatagaaaaaaaattagctgagtgtggtggcgcacctcacagtcccagctacctgggaggctgagatgggagggtcatttgagcccaaggggccaagactgcagtgagctgagatcaaaccattgcattccaacctcagtgaaagagtgaggccccgtctcaagaaaaagagaggaaatctatatattatagatataataatatgtatttctttaaatgaatactagttaaagaaatacgtaaatataaatatataagtacatatgatatatatttctttaaatttaaagaatatttaaagaatacatatacatgcacatatttgtgtatatatttaaatcatttcaagtacaattgagtgaatacactcgtgtattaacgatggggatatgttctgagaaatgcatcgttaggtggttttgttgtggtgtgaacatcctggagtgtgcttacacaaattgagatggtatagcccaccactcactgaggctctgtggcgcagcttgttgctgctgggctgtaaacctgcacagtggccaggcgtggtggcttacacctgtaatcccagcactttgggaggctgaggcaggcagatcacttgaggtcaggagtttgagaccagcctggccaacgtggtgaaacctcgtctctactaaaaatacactaattagctgggtgtggtgacgcatgcctgtcatcccagctactcaggaggctgaggtaggagaatcacttgaacccaggaggcggaggttgcagtgagctgagatcacgccattgctctccagcctgggcgacaagagtgaaactgcgtctcaagataaaacaaaaaaacctgcacagcatgggactgtcctgtaggcaaccgtgactcagtaagtatttgtgcatctaaacatagaaaaggagcagtcgaaataaggcattagaatcgtatggaaccactgcagtgtgtgcggtttgttgctgactgaaatgttgatatgcggggcaggactgtattgaaataatacatattatttaaattaagtaatacatatatttaaataacacatattctttaaatatgtgtatactctttatatatactatatttatggtatgcatatgtatatatacgtatttatgacaaaaccatatatatataggccaggcatggtggctcatacctgtaatcccagcactttgggtggctgaggcaggtggatcacttgaagtcaggagttcgagatcagcctgggcaacatagtaagacctcattgctaccaaaaaaaaaaaaaaaaattagggctgggcgaagtggctcactcctgtaatcccaacactttgagaggccaatgtgggcagatcacgaggtcaggagattgagaccatgctggctaacatgctgaaaccccatctctactaaaaatacaaaaaattagctaggggtgggtggcaggcgcctgtagtcccagctacttgggaggctgaggcaggacaattgcttgaacctgggaggcagaggttgcagtgagctgaaattgcgccactgcactccagcctgggtgacacagtgagactccgtctcaaaaaaaaaaaaaaaaaaaaattagttgaatgtggtgttatgcacctgtagtcccagcgactttggaggctgaggcacaagaatcactgaacccaggaggcagaggttgcagtgagccgagattgcaccactgcactccagcctgggctacaaaaaaaaaaaaaaaaaaaaaaaacagaaacaggcaaaattaattttaataatatgtctctataacccagtacacccaaattattatttcagcatgtgatcaatactttataatttgtattgttttatttagttgacacacaagttctcactgtgttgtccaggctggtctccaactcctgggctcaagccatcctcctgcctcacatgcgtgagccaccacgcctagcccctataatttttactgaaatattttacattttttctccacactgtcttctaaatcccgtgtatgtttgctgttgacagcccctctcagtttggaatggccacatttcaggatctcaggagccactggctggcaactgctatattggatggtgcagcgctagggtcctcttagcactgatcaggaggtgctaatcagaggggcttcctggaggaggtgatacctgaagtgaggcttatgggagcttccatagaagttgggagcagggacaagacaggatttctagagagaaggatggcacatatacttgctttctcagtcattgactcatttgttgaatgcacaccccaccctgctggggactacgccctgaaggatgtgggtcagagcagatctctgccccttccataactagacatttatagagcacctgctgtatgcagggcactgctctaggagctccctcctgatgcttacagtctgaagtgggaggaagttcgacagtggagagaaataaaattgtgacatggtgaaatgtaccagagaggacttcttgaaaaataactctttaagcagaataataaagaattgactttaaggaagtgaaacggaacggcctttcaggggtggcaggagccgagacccaaatgatgggaagatgacaggggaggggtggccccaggaagagggcacagcttgtgtgaaggcccttgaggcaagaggatgtgcgtgttcccggagcaaaatggaggccagggggcctggatggacagtaggggtctgaggggtgacaccggcagggttgctgtgacaggggcagaggacttgatgggccgtggagtggagcacccccagctggcatcacagagcccaggatatggaaacacgagggaggcaagaaggctggaggggaggctgcttcactgacctgagcgagcgagcatgggatctggatgaagtggtcatcgtggaggtgctcaagacatgttctgaaggtcaagttaggaggaggtggctgggcacagtggctcatacctgtaatcccagcattttgggaggctgaggtgggaggatcgctggatcccaggagtttaaggtcacagtgagctatgattgcaccactgcactgcagcctgggcgacagtctaagaccctgtctcaaaaattaaaaggacgaggcagtagcccgattggcgtgaggatgtccaggttctgtttggaggagaagagggaacggtagaacctgtcaagggagggatgaagtctggggtgagtggaacagggacaggagaagcagagagggcagccgagagcatccagtcggattgtgctctgaagggggtgctgtagggcattgaggagcatggaggaagcagagacctggcctgcaggatcaggggaggctttctgtgcttattccacaagcaggtcctgtcagaggtgtaggaatgtcccagacaaattggggagaggttggcagccagagaacaggaggcagtggggacaggccacgcgggagaggacaaagccatggctgtggggacaaagggggtgaggacagcacccaagggtctgacctggtgactgggtggacagtgggaccttcatgggattgagaactggaagaggcagtgagctcagtggtaggggtgagcaccctgcggccagccaagctctttattcattcattcattcatcacatgttcatcgcatgtggggagtggggacaggagctctcagggagcgtgtctggggccctgaggagccccacaaatcaggggccacagtggtaggaggaaggagagaggaagtcagggacagcccaagggtgtgtgctctgtgctgtggggctcagccagcggtggttcttccctctttgaaactcccagccagagaaggggtcctggcctgtcctgagccccagggcttgggggcggagaagatctgcccttcctgctgggtggggccgcgcctaggaaagagagggcaggtggctgactccccagacccctcactgcctaccctcctcctcctctcccaggtaagagcaaagaggcggaaattaagagaatcaacaaggaactggccaacatccgctccaagttcaaaggtaggctgggggcccaacttctggttctgagggaggagggggctgggagctggggctcctgtgacctatcctgtgacccttccttatttctggctcccctttcctccttcctctgccctaggagacaaagccttggatggctacagtaagaaaaaatatgtgtgtaaactgcttttcatcttcctgcttggccatgacattgactttgggcacatggaggctgtgaatctgttgagttccaataaatacacagagaagcaaatagtgagtctggagaggggggtgccagggcctggactcctgggtctgcgggggagggggctggaggtctggactcctggatctgggggaggagggggtctaggggtctggactcctgggtatgagggaggagggggtctggggctctggactgctgggtctgagggaggagggggctgggggtctggactccccattctgagggaggagggctggaagcccagactcctgggtctgagggttgaatctggggcctggactcgtgggtctgagggaggaggggcctgggggcctggacttgtgggtctgagggaggaggggcctgggggcctggactcctgggtctgaggttgaatctggggcctggactcctgggtctgagggttggatctggggccactcagtcacaaggctcctagccatccacgacctccctccccacagggttacctgttcatttctgtgctggtgaactcgaactcggagctgatccgcctcatcaacaacgccatcaagaatgacctggccagccgcaaccccaccttcatgtgcctggccctgcactgcatcgccaacgtgggcagccgggagatgggcgaggcctttgccgctgacatcccccgcatcctggtggccgggtaaggcactggggacccgttggcagtggggggcctgggggtgatgagtcccagccaagtgtgaggctcagagaggctctgttgcctgcccaaggtctcccagccgagatgtgggctaacgctgggctggggacccagtggttccggtggcagccccatacttgtctcttcccgtgatacgaagctgacttgatggtgtgaggctgctcccggcaaagccagtggggtgtttctgaactgcagaattctaacacctacgataagaggcgtaactgtgctatgtgggtgacggccctccagaacttcctcatcttctccattcattcaccaaacatttactgagcacatactatgtgccaggcactgtgctgattgctggggatgttgtattgtccagagatggacacggtcattgccctcctgtgttcatggtctggagcaggagacaaatggtgatggaagaattgcaggatgaagtgtagaatttgccaggtgcgatggctcatgtaatcgctgcatttggggaggctgaggcaggtagattgcttgagtctaggagtttgagaccagcctgggcaacatggcaaaatcccaatctctactaaaaataccaaaaattgccagggcatggtggcgtgcacctatagtcccagctactcgggaagctgaggtgggaggatctcctgagctggggaggcctaggctgcaatgagttgtggttgcgccagtgtactccagcttggtgtgcacacaggtgagacttctatttctggcagtgtggtcagctagatacccgactcatgttctccctgaaacctaactgtcaatattggataaaagaggaaagacaatattatttaatggattcatgaggtagccagaaaatgaggagcacacaggccacaagctaagagaagccgggcacccaagcagatgagccgcgtgctggagccagcatttgcttagaaggcatttgctgaactgggtgaacccgagtatcggttttggggccctgcagcctctgggaacagaagacaaagcttgtccgagaagttctcgaaggctgtacttcaaagtgagagtgacctagaaataaacccccttggggactatgaggaaaattacctgtctgaaacgttggcacggagcagccctcagactggttttcagcctgactttaccctatctgggtagtccaaaagcccctaagtcaacctttagtttaaagtgatggaaactggaggttccctagtgcttcacagaagcaaacacgagccttttcntgaggaagctcatttacacaacaagcttgactaatatatataatcgcctaaatagctcggagtactccccccccatcatgccactgcactctagcctgggtgacagagcaagactctgtctcaaaaaaaaaaaagaaaaagaaaacagaaaataactttggaattggaattatacagaatgtaaaagaagtatatttcatatgtttcaataaataagagaagcattttaaaatatgagtaaagtttaagcagatttgaaaatataattgaaatagtcaaaaattgccaggcacagtagtggcttacacctataatccaggcactttgggaggctgaggtgggaggatcacttgaggccggaagttcaagatcagcaacatagtgagaccctattgccacaaaaactaaaatattagccgggtggggtgctgtgtgcctgggtagtccatccaggaggctgaggcaggaggattgcttgagcctgggaggatgaggctgcagtgagctatgatctcatcactgcactctaacctgggtgacagagtaagaccctgtctaaacaaacaaacaaaaaaaaccaaaaaacaaataaatgtttaaaacattaaaaattaggtgtctgaatttagttagcagagtaggcacagccaaagccagaattagtggcctggcagtagaactgaagaaagacatcaaaatgcagcccaaagaagacaaagcgatggggattttaggaaagagacaaagactcatggaagacagagaacatctaacagaattgccatttagagttgtagggagagatcgtgacataggcagtgttcgaagagagataatggttgaaaatattccagaatggatgaaagaggctgatccccagattcaaataggccaggaaatcataagcaaaagtacagactgtagggggtgactgtggggcagcaagaccagccaggcatctgtcaccaggtccaggtcagagctcgcggtggcttggaccagggctgtggcggtcatgtggttatgagaagggcatgtttcgggagtagagtcgatggattatatgtgctgtgctaggatgaggtggggacattgaacaggtgagtgaatgatggcagacctttcagcaatgtgacaaaggccataggaaaatgggtcagagagggcagaacctgagtgtggtttggtcatgctgaatttgagatgtgtattagacatctgagtaggactctggggaggaagttggattgcagggagtcagggcgggagggagagagatctgagagagatcggcaccgtccaataaaaatataatgcaaaatacaggccaggcacagcagctcacacccgtaatcccagcaccttgggaggccaaggtgggcagatcacttgaggtcaggagttcaagaacagcttggccaacgtggtgaagccccgtctctactaaaaatacaaaaattagtcaggtgtggtggcgggcacctgtaatcccagctacttgggaggcttaggcaggagaattgcttgaacccaggaggtggaggttgcagtgagtggagattgtgccactgcactccagcctgggtgacagagcgagactccatctcaaaaaaaaaaaacattagtggggtgcagtggtgcacacctgtagtcccagctactcaggaggctgaggcaggagaatcgcataaacccggggggcagaggttgcagtgagccgagattgcaccactgcactccagcccgagtgacagagtgagactccatcttaacaaaaaacaaacaaacaaaaagcaaaatacaaatgtgtgcctgtaatcccagctactcgagtgactgagatgggaggattgcttgagctcaagaggcccaggctgcagtgagctgtgatcatgcctaggtgacagtgacaccctgtctaaaaaaaatataatgcaagccacataggtgtttttctgttttctagtatttaatatttcagtttaacctgatccacacaaaatattatcactttgacactgaatcagcgtaaaaattattcacgagctattttatttgacatctgtgtttggtgctaagtctttggaatgcggcgttgcgggtgtctctcagtttggactcgctgcagttccagtgctctgggggctgttgtatctgacagcatggggattgatggcagttaagctcgggcctggtgaagcccctgagggcaggtgttaactgggaattcccaaaagctgggcccttgagtggccctggtgcagcccagcgtgttacgctctggcagggggggtgggagtcatgatcaggggtgtgggaggaaaatcaggatcaggccatgactcagaatgctaagaactttgatggaggagggagtggccagtcgcaaatgctgccagcagtttctttaggacaaggacaggcagtcagcatcagcttgggggagacagaggttacaagccaccctgaagagggaagaaccgggcactttgaggactgagagggaggccaccgtggccaacatgtgtgggtgcagatgacattgtccctggagtggatgccgaggggtggtgctctgccagggtcaaggggccagggtggggctgtctggctctaggctgccccctccacactggaaacttggcctcagcagtgactggggcacgaaggaactttattttgtaggtagacttttatttaactttttattttttggagacagggtcttgccctgttgcccaggctggagtgcagtggcacagtcttggctcactgcaacctccgactcctgggctgaagcgatcttcccacctcagccccctgagtagctgtgattataggcgtgcaccaccatgcctggctaatttttgtatttctttttttttttgtagagatggggttttgctatgttgcccaggctccaggctggtcttgaactccagagctcaagcaatcctcctgcctcagcctcccaaagtgttgggattacaggtgtgagccaccactcccatctaggctttttttgtttgttttttttgttttttgtttttttttttttgaggcagtctctctctgtcacccaggctggagtgcagtggtgcaatcttggctcactgcaacctctgcctcccaagttcaagcaattctcttgtctcagcctcctgagtagctgggattacaggtgtgtgccaccacacctggctattttttttttttttttagtagagacgaggtttgccatgttggccagactggtctcaaactcttgacctctattgatccatctgcctcagcctcccaaagtgctaggattacaggcgtgagcctctgcgcccggtcattttaaccatttgaaggtgttcagttcagtggtttctagtatattgatgatgctgtgcaacaaccactaccacctaattgcagaacactcattgctccaaaaaaagactctgtacccattagcagtccctccccattccctcttccccccagcccctggctgccaccaatctgctttctgtcacagatttgcctaatgtggacatttcatagaaatggaaccgcacagtaggtggccttctgtgtctggcttcttccactcaacaagatgtttttcaggttcatccacattgtggtgcatatccgtgatttgctcgagatagagtctcactctgctgcccaggctggagtgcagtggcatgatcatagctaactgcagccctgacctcccaggctcaggtgatcctcccacgtcagccactccagcagccgggactacaggcacaagccaccaggcctggctaatatttgaattttttatagagacagggtctcactatattacccaggctagtcttgaactcctgagctcaagtgatcctccgtggcctcagcttcccaaagtgctgagattacaggcgtgagccaccgcgcctgacttgtggttttattttttatacttgaatatgcagcttgatattgtgtagtttaacattttcctaagtagcgccatagcccttattccacttaaccaagttgataaatagctcttattcctttgtgtggtatccttatctgtaaatggagatgatagaatccgcgtccttagagggctgtggtggggagcgagcgagctgtgcgggaacacttagagcagagtttggcccagagtcaggactcgggagatgcgctgtggctcaggagatgtgtgccgtggcagcgatgggaaagtggcccagagtcagggctcgggagatgcgctgtggctcaggagatgtgcgccgtggcagcgatgggaaagtggcccagagtcagggctcgggagatgcactgtggctcgggagatgagcgccatgacagagatgggaaggtggcccagagtcagggctcgggagatgcgcgccgtgacggagatgggaaagtggcctggagtcagggctcgggagatgtgcgctgtgacggaggtgggaaagtgccgtcacaaatggagcatcgtctgtggccaggcttcttgctggtttctggttctaacttgatgaccactgggcagtgaacgtttctgtagggtgagcgtctgggggcagcactgctggtcttggtctgctgcacacacagcagtggcctttctagacagaggaagcccagagcctctccagagggcctgtccctgtgtccgcctccagctgcagcacacgagggttcccagcactttaggaggccgtagcaacaggcgtcagtcgggcgagtatctgcctggatgacggcaggagccacctgctgggtggctgcacatccagtgagacatgctgccacaggcctttgactcgtgcaggtctcccctctgaggacttctcccctgtgtcttttgctgtctgttgggtgctttctgggaaaccctttactgataggccatggctgggccagtcttgacagctcccagcacctcctcttactcaaggctatggccatgcaccacacaatctcatttctgtttttttttgagacggagtctcactctgtctcccaggttgaagtgcaatggtgagatctcagctcactgcaacctctgcctcccaggttcaagcgattctcctgccccagcctcccgagtagctaggatttcaggcacgtgccaccatgcccagctaatttttgtatttttagtagagatggggtttcaccatgttggccaggctggtctcaaactcctgacctcaggtgatccacctgcctcagcatcccaaagtgctgggattataggtgtgagccactgcgcctggcctttttttttttttttttttgtagagacagggttttaccacgttggcctggccaggccggtctcaaacacctggcctcaagtgatccgcctgcctcagcctcccaaagtgttgggattacaggtgtaagccaccatgcctggcccaccatcttatttctttctccccaaagccgacaaggctcctcattttcctgaaggggaaacagcccatcagagagggtcagtggcttacccccatctgtgccccacagtcacaacctcatgcaggcgtgtctgaccccagaaggtgctcccctgggatcctcttctagaacaacatcatgctccatgctctttgctgtgctaggagctgggttatggttggggcctggagtcagccctctgagatgggctgcccgctggctgccaggttctgtgccaggcaagtgctgaccctggtttcctgtgactgctgtgatgaattaccaccagcacagcggtgtcaaacaccggttctggatgtcggaagtccaacatccatctcacggggctaaaatcaaggcgtgggcagggctcgtcccttccgggggccctagaggagaggccgcgtccttgccttctccagctcctagaggccacctgctttccttggctcgtggccccttcccccatccccaaaggcagcagtgtggcatcttctctcctgcctgacctctgttccatcctcacatcatctctgactctgaactgtatctttcccttataaggaccctgtgatgacattgggtccacctggatcacccaggatcctctctccatctcatgatccttaactttatcatatctgcaaagtacccccacccttttttttgtttggagacagggtcttgctctgccacccaggctgcagccttcacctcccaggctaaagcgatcctcccacctcagcctgccaagtaggtgggtctacaggcatgcgccaccacgcttggctaattctcatatttctagtagagatgggggtctcaccatgttgcccaggctggtctccaactcttgggctcaagtgattctcccacctcagcctcctaaagtgctgggattacaggcgtgagccaccctaacccccagaacctgtgaatatattcccttggattcaaaagagccttgcaaagtctgttccctcacaacaggcagagggaccctttaaaaacctaagccagatcaaaaatacacccattttctcagtttgttgtggagagaagataaacgtgtgaatccacccagagacctgtgggagtgctggacaggccgaaggggtccgggggcagctgttcctgctgtcgtgttaacatcacgctgattctctgctcaccacccacagcggctttcatctcccaatcggtaaaaagccaagtcctcacttcagccaacaaggccctgcagggtctggctctctgttccctccctgtcctatctgcagccctcctgccccatggctcaggccgcagcctgcaggcctccttgctgctcctcctacacacgggctccgccttcctgatggccttggcacaggctgttccctctgcctgggatgttctgttgcagaggattttcagtctttcctccttaagttactctgttttgtttatttttaaatttttttatttatttagagacagctctaactctgttgcccaagctagagggagtgcagtggcacagtcatggtgcactgccgcctcgacctcccagtctcgagcaatcctcccacctcaccctcccgagtagctgggattacaagcctgcgccaccacacccagctaatttttgtatttttgaagagactgggtctcactgtcgcccaggctggtcttgaattcatggcctcaagtgatcctcccacctcgacctcccaaagtgctgggattataggcgtgagccaccatgcccagccctgacagtatttgatgtatgtgttttcgtggtgctgtctgaaatgtaagccctgtgaggacaagtgtttggaccactttattcaccactctatccatggagtgaacagcagtgcctggtaccccatgggcacccagtaggtgcttggtgaatgaatgaaggtgcagagccaggcttgacatgttcctgagccctgtgaggttactgagatgcaatcattttgcagatgaagacactgagtcctggtgggccgtgaggtcagcgccagactggatcctgcggccgcctggctgtctgtccctctcgctggcctcgcacacccttcctgggaggaacaggagaggaggggaggtgtgcagggctggggtcactgactctgcttcccctgccctgcatggtgtccccacagggacagcatggacagtgtcaagcagagtgcggccctgtgcctccttcgactgtacaaggcctcgcctgacctggtgcccatgggcgagtggacggcgcgtgtggtacacctgctcaatgaccagcacatggtgagcccccagccctcacacccccggatacccagggctcccacctcagccctgacccccctggatgcccggggctcccacctcagccctcacacccccggatacccagggctcccacctcagcccacgcaccccctggatgcccggggctcccacctcagccctcacgcccccggatacccagggctcccacctcagccctcacgccccctggatgcccagggctcccacctcagccctcacgcccccggatacccagggctcccacctcagccctcacgcccccggatacccagggctcccacctcagccctcacgccccctggatgcctggggctcccacctcagccctgatccccctggattcctggagcttccccctcggcgctgacgttcaccagacaccagaaaccatgatccagtgtccccggtactcattacctgcccaagtgtccagaaaccctcccatccccatctctgacactcccctggctggccagggatcctgtccagtgacccccacacccctcaccaaccacccagtcccttagaaaatcccactctgtttctaatacctggagattcccccaacagcgcccatcacctgcgcaccagcgcagaaaccttgactgtcccacccccacagtcccaaccctctagagtctcgccccttcactgctccttacccagctgcctggggtcctgccagggacaccccacacacccaggtcagtgctggccatggcgcccgaggccccgtggcctcctcaccccacccctaaagcacgcacagtgacacatgtgcacacccctaaaccccatcttcccgactgcacacacatcccgaccctgtcccgctcctgagcctctgctctcaggtaccacctcccccaggggcctgacttgtctctcctctgcccctgcagggtgtggtcacggccgccgtcagcctcatcacctgtctctgcaagaagaacccagatgacttcaagacgtgcgtctctctggctgtgtcgcgcctgagccgggtgggtgtggcctagatattggctgctggaggtggccctggcatccctatgccctctgacacccctcaggcccccactctccctgagaggcagcccagcccaaggtttacaaactcaggctctgagctggattcatcctggctcggcctcttcctggctgggtggccctggacaagtggcttcacctccctggcctcagctgccccctgtgttcagtggggataataccggtgcccacctggaggcacagagcgctgtggatagagtgctcagaacagggcctcgcgggccgagcaccccgggagccagccgccctcatgacctcctccctctcccacttctctctctgtctcccactttccctcttctggctttgcctcccgcctctctctttcctgtgcagcctctcactcctgcctggcgtccctctcccacctttgctcctgtcctgcccaggaacatcccctgaggccttgtgcatgccaggctccatgtcgggtgacaccagggacacagatgagtcagaaccaagctctgctcttaaggagctccctgtccttctggcagggaggtgactcagtcacagattgtcagaaaaggggtgactcgtgctataatggaggtaggataggtcacccataggaggcacttaacacagcctgtgagtccacgaaggcttcctgggggcggcgatcccagaattgagacttagaatacacatgcgcatctcctgggcagtcaggaagaggcctggattcgcaggcaaagagaagaacacaccagctcgtgcatccactcattgtttctttttttttttttttttttttttttttgagacggagtctcgttctgtccccaggctggagtgcagtggcgcgatctcggctcactgcaagctcccaggttcacgccattctccagccttagcctcccgagtagctgggactacaggcgcctgccactatgcccggctaattttttgtatttttagtagagacagggtttcaccgtgttagccaggatgatctcgatctcctgacctcgtgatccacccgcctcggcctcctaaagtgctgggattaccggcgtgagccactgcgcctggcccactcattgtttctttctcaggttttttttttttttgagacagggtcttgctgtcgcccaggctggagtgcagtagtgcagccatggttcactgcagcctctggctcctaggctcaagcgatctctcgcctcagcctcccgagtagctgggactgcaggtgcctggctaatttttgtattttttgtagagatcggtcttgctttgtcgcccacactggtctcaaactcctggcttcaagtgatcctcccgcctcagcctccgaaagtgctgggattacaggtgtgagccactgcactcagcctcagtcattgtttcattcattcatcacacatctgagtactgcagtgtgccaggatgacagtgaggtaggaacacagaccagcacggaggtgggacagagcttcctggagaagggcttttcaaggttgaataggagtttgcaatgaggaaaaaaagtcacatgatctttctttttttttgagatggagtttcgctcttattgcccaggctggagtgcaatggcgtgatcttggctcactgcaacctctgcctcccgggttcaagcaattctcctgcctcagcctcccaagtagcatggatcacaggcatgtgccaccacgcccagctaatttttgtatttttagtagagatggggtttcaccatgttggtcaggcttgtcttgaactcctgatctcaggtgatccacccaccttggcctcccaaagtgctgggattacaggcgtgagccactgcacctggccatgatctttcaatctttcactaattccctgcctcttccccgaacctcttcctatctgaccttgtattaggcctagggacccaaaaaagggtcagacccaatccctgcccctgagtggcttcaagccttgtagggggactacaggaaacagcctccaggagccggtgcgctgtgtgctctgacggaggaagcctggggcatgggaggctcagagccgagtgaggagggggccctgggaaactgtcacacagaagggaaccagcagagacctttcctgcccaccacacaccagcattacttggaaagatcaaccagccgggcttagtcctagttttgcccccattcagtgtgcctgacgcttcctcgctcccttcccagagcctcagattcctgcttcataaaaccattgcattggtcgggcatggtggctcatgcctgtaaccccaggacattgcgggactgaggtgggagaattgcttgaggccatgagttcgagaccagcctgggcaacatagtgagaccctgtctctacaaaaaaaacccactaacaaaaccattaacactgacagcactgcccttggaaggcaccatttgctccaccctggcatgtggacccacgtgcccctcccaccccagcccccaacttatttcttgctcttccccgccagatcgtctcctctgcctccaccgacctccaggactacacctactacttcgtcccagcaccctggctctcggtgaagctcctgcggctgctgcagtgctacccgcctccaggtaatgaacgccgtgcactccccaacccggggtggcctgctgctggcatctgggggcctcctgctccacggcgcaccaggtgggactggagggtctgggtcaggatttctctgaagctggggcggttcctctgtccccttacgtggctgcactcggggaggcaagcaggcagcccgaggcccagcgcctaccctgtgcagcatcgtggatcagcctcatagctgaggtccctgctacccgggctctcactccagccctgttgcgagggactgttaactgtgcctgttttatagatgaggaatctgaggcttggagagggagctcctggcccagcgtcactcacccggtcagtgggtgattccaggccgtgctacctgaattaccatagccctgtcaggggttttcacatctgttgggaaccttcccctactgctcacagtcacaatagccagtgtgtatgaaactcctgtagtgagccaggcactgggcagggggcacctgcacctgccgaacagagctggcaaggaggaacagccagtgtgatatgcacacagggaaactgaggcttggaggtgagacatcaccattctaggcagtaagtggcagttggcccccagactctctgctctaaacccctccctctgccactgagctcccccgagcttctgtcgccttggctgactgacctcatggagcagtttcttcggaccctgtgctgaggggcttggcacacagtaggtgctaatgcaccagttccctccattcagccagcatgtccagcacctgccaggggccagggctgatgtacaccaccaaatctctgggtgtgcatgcctgtctgtgtgcatgcctgcatgcgtgcatgcgttcgcctgtgtgtgtcgatacctgcccgtgtgcatgcatgtctgcgtgcatcccctgtgtgtggatgtgtcattgtgtgtgcatctgtatgtatgcgtgtctgtgtctatatgtggcagtgttcatggtatctctgtgtccctctatgtgtgtacatgtgtatatatcagtgtgtgcatctacatgtgtacctgtgcatgcaagtggatgtgtacatgagtgtagatacctgtgtgcatgcctgtgtgtgcgtgtctcaatgcttgccagcatctacgtgtgtccatgcatgtccctctgcacatggtgtgtgtgtacacactctgagtatacgatatggaggtgacaccagaggcccatcgtgtgtgaagccagtgatgaattctgttgtgtggccctggggacatgtcttccttctctgggcctctttttcgtcctgtcaagaagggcttaagtcatgctctaagcccatgaccaccccagaaggcccagctggtaattctggggtacacccattgcaggcacctcacccactccaaccctcggtggtgtaggaactggagacacagccttgtcctgaggctgggcctgaggacacaccaaccctgtgtcacctccttttcagcaaatggtggtgggctattgccaatttgtttgcaagtcatttttttgtcatatgcattatgaaaagtttcccagcatccagataagtacagagatttcattacttggacttcacattttgccatgtatgcatgctcttgtttattttcttctgaaatatttaaaagtaaattacagacatcatgatgttttgcctttaaatatgttgttctgggccaggcacagtggctcacgcctgtaatcccagcaatctgggaggccgaggtagaaggatcacttgagctcaggaattcgagaccagtctggccaacatggcaaaaccccatctctacaaaaaatacaaaaaattagccaggtgtggtggtgcatgcctgtagtcccagctactcaggaggctgagatgggaagatcgcttgaacccgggaggtggaggttgcagtgagccaagattgtgccactgcactccagcttgggtgacagagtgagactctgtctcaaaaaaaaataaaaaaataaaaaaacagaatatatatcacagtacaatctaggatcacatattcaatcggattctgccaggctcagtggctaacactgtcatcccagcactttgggaggctgaggcagaaggatcgcttgagcccaggagtttgagatcagactggacaacatagttgccctgtttccaaaaaataggatttaaattggattctgtctttgttatttctcgtagtctggactagcccccctacacctgtttatggagaaaccaggagatgccattgctgtgtgtcccatggtggcgactgggctcattgctgccttgtggtgtattttagcttgttcctctatctggtgaattttcctgcggaaaattctgcagaaaaatctgcggaaccattttttgctggaacgcttgacagctcttgcatacacttgaaaacacgtcacattctaggaaacgtggtgattggtgctcctgtgagctgctggctggcatctgtcagtggtggagagctctggggggtgagggggcacctggttgagccttgtctcctttggcctcccagcctctaggccaggaggatggcaccgagtgtgcctgcagtggcctcttgctgaatggacacttgggtgggtggcttgtgcatttttgtcaggggctgctcagcactcacaccagtccttgggaaggcctgggtttgggggcacctctggggaaggttcctggagcttcctttgctctgtgagaaacctaaggagcctcagagctgcagatgaggaaactgaggctcacatggtgccacctcttgcccgagagggtcagagcaggaggagagcccaggtctggggatagatcttgtgtctccagaggtgccttgtctcaccatctctgctgggctgggaagaggttgagggagcagagaccctggccctgagctgcagaattctcgagtgtcagaggcaccccgagctcctcctttggaagacaggagctggggcatggccaccaccccagcaggtgtgccaggtgggcaggacactcagccgggggcgtccccttcgtttccccagaggatgcggctgtgaaggggcggctggtggaatgtctggagactgtgctcaacaaggcccaggagccccccaaatccaagaaggtgcagcattccaacgccaagaacgccatcctcttcgagaccatcagcctcatcatccactatgacaggtgcccgcctgggcctatcagggcctgatgcctggggccaggaaagaggggcatggaggcccggactcctgagtcctaggcagagggcagggaatcttgacttttaggtagggtaggaggaggatggggctgtgaagtgtcacctgtgaggttggtgctggggcccttcctgggggcagaattgctaggtatctttctctgggctcaaaggcccagttgtctgggtcactggaggtgcagtactgcgatgcaaggccggcaaggttaagacctggatccttgggggctgtgagatgggtcagctggggcccgagtcctccaccttctcctgtcagtttctctcaccatccctctcttgtggcccctgctggcagtgagcccaacctcctggttcgggcctgcaaccagctgggccagttcctgcagcaccgggagaccaacctgcgctacctggccctggagagcatgtgcacgctggccagctccgagttctcccatgaagccgtcaagacgcacattgacaccgtcatcaatgccctcaaggtgtgagcccttggagcccaccccgggcctgccacccccctcagaaagaccagaggctcagaggcccttgggtggccaaccctgtgccaacagggagtctaaaacacacctgggctctgctctccgccctcagacggagcgggacgtcagcgtgcggcagcgggcggctgacctcctctacgccatgtgtgaccggagcaatgccaagcagatcgtgtcggagatgctgcggtacctggagacggcagactacgccatccgcgaggagatcgtgagtgctgtggggtgcgggctggactcttgggtctgaggcaggaggtggctgggggcctggattcctaagtctaagggaggaggggctggggcctggactcctgggtctccagatgggggcagtggtgagcccagatccaggtgagtgaaagcccgacatggcctgcggcacactctctctcacacgccccggcggcaggtcctgaaggtggccatcctggccgagaagtacgccgtggactacagctggtacgtggacaccatcctcaacctcatccgcattgcgggcgactacgtgagtgaggaggtgtggtaccgtgtgctacagatcgtcaccaaccgtgatgacgtccagggctatgccgccaagaccgtctttgaggtcagcatccctgaccctgaccctatgaccccacgacaggacctagaggcagagcaaggatggccggggccgtggcgcctgccagcccgcagccaccctccttctcctgcactgccgtgacctcaaaatggggcctctgcctctctgggccaacccaggggacccagggctatggtctcatgggcctgatgtgaggagtccccagggcatgggcatggggcacccagtgtgcagtcctggcccccggatctcggtagtttccctctgccccaggaaaggggccccacacagtcctgttttttgtttgtttgtttgtttgtttctggagacggagtctcactctgttgcccaggctggagtggggagtgagtgccgtggtgcgatctcggctcactgcaacctcggcctcccagcgtcaagccattctcctgcctcagcctccccagtagctggtactacaggcacgcgccaccacacccagctaatttgtttgtatttttagtagagacggggtttcaccatgttacccaggctggtttgaaactcctgagctcaggcaatctgcccgcctcggcctcccaaagtaccaggattacaggcatgagccactgcttccggcccacagccctgttttacttcctgtgtgagcttgggcccgtcactcaacctttctgtgactcagtttcccacctataaccccacctgcagcagagctttcagtgttccaccagtcagtaggtggctgcacccaccgatcccggagagggcgctcattgttgtcctctccacgcccttccccaccccactcaggcgctccaggcccctgcctgtcacgagaacatggtgaaggttggcggctacatccttggggagtttgggaacctgattgctggggacccccgctccaggtgagggagcctcagcctgcaggggagaacacacatgcttctgaggggtccagggcttgggggatccccaggggtctcagggcaggcagtgatgggctcccatcctctcggcctccaccccaatccacctagcagggtaagaaaggagcttagtcccaggatcgtggacagagtgtgactgcggcccctgtctggtgcctggggagggccactcccctccagcagcttggggtcctgggacgggtccatcctagggaggggcacctctcgagggggtttctgggagagggcagtggaacctggccccgctgacacccactcctgcacacagccccccagtgcagttctccctgctccactccaagttccatctgtgcagcgtggccacgcgggcgctgctgctgtccacctacatcaagttcatcaacctcttccccgagaccaaggccaccatccagggcgtcctgcgggccggctcccagctgcgcaatgctgacgtggagctgcagcagcgagccgtggagtacctcaccctcagctcagtggccagcaccgacgtcctggtcagagccctgtccccccaccccacccctcttgcacacccccttcccgccctcccctcctcctgacccgaactgaccttccccaccccgaccgcgccaggccacggtgctggaggagatgccgcccttccccgagcgcgagtcgtccatcctggccaagctgaaacgcaagaaggggccaggggccggcagcgccctggacgatggccggagggaccccagcagcaacgacatcaacgggggcatggagcccacccccagcactgtggtgagtcccctggggtgggccctgccagggtgcctggggctgggtcctgccgggcgccgcctgtcctcaccgtgacctgcgcttcctacagtcgacgccctcgccctccgccgacctcctggggctgcgggcagcccctcccccggcagcacccccggcttctgcaggagcagggaaccttctggtggacgtcttcgatggcccggccgcccagcccagcctggggcccacccccgaggaggccttcctcaggtagcaccccctgggcccgggccccttctcgcggccacccccagggctgtcccttctcggcctctgtccccgttttccctgagcccctcccccgcccccgactcgctcctctctccatcctgatgccttcgccagccctggctgctgcctcccctgccccagcctccctgctcacgccctccctctgccactctggactccgccgaccctggccacccttcgttgtctcctttcctgtcaccgtttctcagcctgctcttccttttctccttctctccttccctcttccgtccctccctctctgtctctcttctgccctctcgctgcctatgtggaattggctgcctgccacgcctgtcttctcttgtctgctctgggattggatggctcagcgagctggagccgcctgcccccgagagccccatggctttgctggctgacccagctccagctgctgagtaaggggtggcctggggtgggaggtcggtcgggggggcggactcgggtgtccccagggagagttaggggactgggagccctcgtcaacgggttcctgatgagcagcagaggcagggacttggaggaaagggaaacttggtgtctgccgatgcgggggcacgggccagggttctattcccattggaggccactgctggatggatgcgaggttcctcgaggctctgtgaggggtctggatatgtggttctggggttctgtccttagggcttgttctcgcactcaatcgctctgggcctttgcccctccccaccaagttccttcccatctcactctgctccatgcctccagcccaggtcctgaggacatcggccctcccattccggaagccgatgagttgctgaataagtgagtcctgggagtggtgggggaggggaacgggacaggtgcggagcccaggccaggtgcagacaggcacccccgtcatcttgcgccccctgccccctcaggtttgtgtgtaagaacaacggggtcctgttcgagaaccagctgctgcagatcggagtcaagtcagagttccgacagaacctgggtgtgtcccgggggactgtgggaatgggtcggagggagaccttggggaaggggtcagagggactcagatggagctctgcctcccccacctactgcaggccgcatgtatctcttctatggcaacaagacctcggtgcagttccagaatttctcacccactgtggttcacccgggagacctccagactcatatcctctcaggcccggcccagcctcctgcctctccacgtcggccttcctcaccgtggggaagccggctgacccaggtccacacttctcttcagcctctcttgggcacgcaattagttctctgagattgagtgtctgcatctgttaagatgggggtgggattccttcccccaggacaggggatgacagtgaagtggtgtgtgggaggctttacttccagaactccacctgctccaggcctcattttgtccctgtctggcaccttccgtgtcctgccatcgtcctccactgggctccatgtcatgatgccagcaccgcctgcactcaggagccaggcctgcgggtccagacgctgatcaggcctgatctgggctgagtcactttgcctctctgggctctcctgtccccgctgtgaagtgtatgtagaccctcctcttcctcatagggttattgtgaagatcagagtgtctggaaaaccctggaagggcggctggaggtatcagtcccccctgcccgttctctgggcctccattgccacattcatgaaattagaaaagctcgacctgaaaactccttctggccgggcatgggggctcacacctgtaatcccagcactggcaggctgaggccagtggatcatttgaggtcaggagttcaagaccagcctggccaacatggtgaaaccccatctccactaaaaatacaaaaatcagctgggtggtagtggcacgcgactgtaatcccagctactcaggaggctgagacaggagaatcgcttgagcctgggaggtggtggttgtggtgagccgagattgtaccactacactccagtctgggcgacagtctcaaaaaaaagaaaaagaaaagaaaaaattccttcttcggtcgggcacggtggctcacgcctgtaatcctagcactttgagtggccaaggtggttggatcacgaggtcaggagatcgagaccattctggctaacatggtgaaaccccttctctactaaaaatacaaaaaattagccgggcgtggtggtgggcgcctgtagtcccagctactcgggaggctgaggcaggagagtggcgtgaacccaggaggcgaagttgcagtaagccgagattgcgccgctgcactccagcctgggcgacagcgagactccgtctcaggaaaaaaaaaaaaaaaaattccttctttcataatttccagaggctcgtgcaggcagctcagtggaggcagtgacaaaagaacatgagacccaggccttcccagtgggctactgacacggatgcagatgatgataacactaattgctaccatctttgtgtacttaccatgtgccgggcacacagacaagtacttgtgatggattcttttcttttctttttttaaatagagttgaggcctcgctatgttgcccaggctggtctcaaactcctgggctcagtgatcctccccaccttggcctcccaaagtgctggattacaggcgtgagccgccacacccggctggattatttcatcaactcctgaggacattttacacatgtccttgtgttgagacagggcctcactcacccaagctggaatgcagtggcatgaacactgctcactgcagcctcgaacttctgggctcaaggcatcctcctgcctcagcctcccaagtagctgggactacaggtgcacatcaccatgcctggctaatttttttgtagagatggggtcttgccatgttgcccaggcttacacatgtccagaggctaagagaggttaagtggttgcccacagccactcaggtggttaagagctgggattcaaacccaagtcagcctccagagctaatactattatgtctcagtgcggtgtgacattgtggaaggccaaaggaggcacctagggggcgcctcagaggtttccatagtatgaactttgtagttgaaccttgtaggattgagtccaggattgcaccatggggtccctcaaagacctgcaggcgggagctgccgggagctctggggttcctgacccagacctcccgggggcccacctcctctgtctggcttccttgactcctggcgggcacagctggctgtgcagaccaagcgcgtggcggcgcaggtggacggcggcgcgcaggtgcagcaggtgctcaatatcgagtgcctgcgggacttcctgacgcccccgctgctgtccgtgcgcttccggtgagtcaggtacggcgcggccggtgggcggagcctccggggtgaggggcggggcctaatggagcctccctttcacctcatcaggtacggtggcgccccccaggccctcaccctgaagctcccagtgaccatcaacaagttcttccagcccaccgagatggcggcccaggatttcttccagcgctggaagcagctgagcctgtgaggggtggggagggggcggagccaaagccgcgcctctgggtgggcgggtcgggccgtccaggtccctgacttgaaccttcccggtccccagccctcaacaggaggcgcagaaaatcttcaaagccaaccaccccatggacgcagaagttactaaggccaaggtgagagaccgcgggcgtgtttgccggcctatggctgctttgcttctctgagcctctgttttcccatctgtaaagtggggccaattcccatccccaagggttttttgggatctgggatgccactgtgtggtaactaacagctctggcacactctgacggcgccccccctcctcccagcttctggggtttggctctgctctcctggacaatgtggaccccaaccctgagaacttcgtgggggcggggatcatccagactaaagccctgcaggtgggctgtctgcttcggctggagcccaatgcccaggcccaggtgagtgctgctgtgggaggcctgaggccggcaggaaggccgcctgtcatctctgcgtccacccttcctgcctcactgttctttaattcacgtccccactttgaccctcctcctctcacatttctttgtccacttttactcctctttatctatcagtttaatctcctgtctccaacctctggtgttcctctcctcttcctgtccctccctgatttctacctttccatatcctttccacctttctctcatcttttataattttcttcctctctggcgcctctgttgatttcagtcttacatttttctctcctgtgtcttgtatcacctttctggcccctttatccttccttccttctatctcccttgggtcccgacttccctgggctccccatctcctctgagttctgcccccaatgcccccacccagatgtaccggctgaccctgcgcaccagcaaggagcccgtctcccgtcacctgtgtgagctgctggcacagcagttctgagccctggactctgccccgggggatgtggccggcactgggcagccccttggactgaggcagttttggtggatgggggacctccactggtgacagagaagacaccagggtttgggggatgcctgggactttcctccggccttttgtatttttatttttgttcatctgctgctgtttacattctggggggttagggggagtccccctccctccctttcccccccaagcacagaggggagaggggccagggaagtggatgtctcctcccctcccaccccaccctgttgtagcccctcctaccccctccccatccaggggctgtgtattattgtgagcgaataaacagagagacgctaacagccccatgtctgtgtccatcacccactgctaggtagtcaaagaagtggggtgagggcatgcagagtgtgggtggccaggcttcgcagcccatgggtgggactctggggagacagcagcagcagcagccgccgaagccccagctgcaaggccaccagacgcactcctgtgcctggttcctcagtccccaacaccaggtagcaagctctgggcagctgggcctggtagacctcatcttctgtcttctctggtggccctggctctggagaaagaacagggggcactgacatgacaagtagcatgctaacctttgcaagccacaccacatcctgatcccaagttctgaacgcgtggggtctctgaacacaggttttgggagcctcctgccaggggagggcctcggggctctagctggctgtcagcaacttgaagaccacaatgatgtcactcagctcaccctcttcctctttctcagccttggcccccattttcctggagaaactgtgcagctgcaggtgatcctcttagcaatacacatggcgaacacggcagcaacacaggagctcctgt

SEQ ID NO: 23504 - DNA, 1841 bp, Homo Sapiens
gtctgattgggtggtgtggcgcaatgcgcgcgaccctcaagataccaaactgtacgcatctctgaccctttcctctccttgctcctgctggtaaaccgaagcccaggagacttccaggtttgggcatctgcagagggcgaggaactggtcacggcgccgggtgggcttgcagctgtgacgcttatgtggacacctcagtgtcgctggtggttcacctcggcttcccagtttatttattgacgtcaacaaataaatgttgaataaggaagaagagttagaattgcttgaagccctctggagttttagcactagtcccgcccactcccttctacttccaggtcgggggggggcgggtccaatagaaaggcggaagccagtgtcccaggcgttctcacgcccgcaacaattcctgagtagggccttgcttgagttcttcggaaagtctcatccacccccacatcgcctctttaggaagtcacttaatgttgggcttcattattcccacatccctttccttactacttgcctgcacttcttgagaaaaagactgcagaaaggagaggtggggctttcagtagaaacaagcaaaccgcaggtccctgtggggggactctccaggaagaaggttccgcaagaaccgtgggcgacagttatggagaagcgtctgcaggaggctcagctgtacaaggaggaagggaaccagcgctaccgggaagggaagtaccgagatgctgtgagtaggtaccatcgagctctgcttcagctgcggggtctggatccgagtctgccctctccgttacctaatctcggacctcagggcccggccctcacgcctgaacaagaaaacatattgcataccacccagacagactgctataacaatctagctgttgtgaaatagggagtgtttcccttcttaatcataaaaaggcagaacattgacctgaattgcctgaattgactcctctgcagcttgtctccttcagatggagcccgtgaactacgaacgagtgagagaatatagtcagaaagtcctggaacgacagcctgataatgccaaggccttgtatcgggccggagtggcctttttccatctgcaggactatgaccaggcccgccactacctcctggctgccgtgaataggcagcctaaaggtaagcaagaagggctttgaaatggtaaagacaaaattgtcttgctggggtggatctgtggaaagggggttttattttactttgccaatgtattattttcaataagtaatacattcacatggttgagaattcgaactgaaaaagtatacgatgaacagacctttttccactcttgtgttcttgtctccacagaaaagcagtattattagtttcatgtgtagggggttgatgcttaatcagacatacacaatatatatgttggtatgtctgtttcatatatgtatgtatgcctattctaatatataaatatatgtatatcaacgtgcttttatttataaatatacagtgtatatatttatacatatacatgaatatatatataaaataggcaggccaggtggggtggctcacatctgttatctcagcactttgggagaccaaagtgggtggatcacctgaggtcaggagtttgagaccagcctgaccaacatggagaaaccccatctctactaaaaatacaaaattagccaggcatggtggcgcatgcctgtaaacccagctactcgggaggctgaggcaggagaattgcttgaacccaggaggcggaggttgcggtgagccgagatcctgggcaacaagaacgagattctgtctccaaaaaaaaaaaaaaaaaaaaaaaaaaaaaa

SEQ ID NO: 23505 - DNA, 1102 bp, Homo Sapiens
tacggatgagactgaaagaaaacctcaaaggagaactctgagaattcatctcaggatgaagctgcaagggcaaaggagaagtacttgtgacacaagcaaatgggtccattgatcaacagatgcaagaagattcttctcccaactactgtacctcctgcaacgatgagaatctggctccttggaggcctgctgccattcctgctgctcctctctggcctgcagagacccacagagggttctgaggttgcaattaaaatcgacttcgacttcgcaccaggttcttttgatgatcagtaccaaggctgtagcaaacaggttatggagaaactaactcaaggggattatttcacaaaagacatagaagcccagaagaattattttaggatgtggcaaaaagcccacttagcctggcttaaccaaggaaaagttctaccccagaacatgactaccacacacgctgtggctattttgttttacacattgaacagcaatgttcattctgactttactagagccatggcctctgttgccaggactccacagcagtatgaacgttcattccacttcaaatatttacactactacctcacctcagcaatccagctgctgaggaaagacagcatcatggagaatggcactctgtgctatgaggtgcattataggacgaaggatgtccactttaatgcctacacaggggccaccattcgatttggccaattcctttccacatccctcctgaaagaagaggcacaggagtttgggaaccagacactatttaccatattcacctgcctgggtgcacctgtacagtacttctccctcaagaaggaagtcttgatccctccctatgagctgtttaaagttataaatatgagctaccacccaagaggaaactggttgcagttgaggtcaactgggaacctgagcacatataactgtcagctgctaaaagcttccagcaagaaatgcatccctgatcctatagctattgcatctctctcctttttgaccagtgtcatcatcttttccaaaagcagagtataaagaaatcttgtggctccttttatttaaaaaaaatatttaaataaaatcttttttattg

SEQ ID NO: 23506 - DNA, 5248 bp, Homo Sapiens
acgcgtccggcagctgcagcagctacgggagtggccgggtggccggcgggtgccagccgccatggaggccgtgccccgcatgcccatgatctggctggacctgaaggaggccggtgactttcacttccagccagctgtgaagaagtttgtcctgaagaattatggagagaacccagaagcctacaatgaagaactgaagaagctggagttgctcagacagaatgctgtccgtgtcccacgagactttgagggctgtagtgtcctccgcaagtacctcggccagcttcattacctgcagagtcgggtccccatgggctcgggccaggaggccgctgtccctgtcacctggacagagatcttctcaggcaagtctgtggcccatgaggacatcaagtacgagcaggcctgtattctctacaaccttggagcgctgcactccatgctgggggccatggacaagcgggtgtctgaggagggcatgaaggtctcctgtacccatttccagtgcgcagccggcgccttcgcctacctacgggagcacttccctcaagcctacagcgtcgacatgagccgccagatccttacgctcaacgtcaacctcatgctgggccaggctcaggagtgcctcctggagaagtcgatgttggacaacaggaagagctttctggtggcccgcatcagtgcacaggtggtagattactacaaggaggcatgccgggccttggagaaccccgacactgcctcactgctgggccggatccagaaggactggaagaaacttgtgcagatgaagatctactacttcgcagccgtggctcatctgcacatgggaaagcaggccgaggagcagcagaagttcggggagcgggttgcatacttccagagcgccctggacaagctcaatgaagccatcaagttggccaagggccagcctgacactgtgcaagacgcgcttcgcttcactatggatgtcattgggggaaagtacaattctgccaagaaggacaacgacttcatttaccatgaggctgtcccagcattggacactcttcagcctgtaaaaggagcccccttggtgaagcccttgccagtgaaccccacagacccagctgttacaggccctgacatctttgccaaactggtacccatggctgcccacgaggcctcgtcactgtacagtgaggagaaggccaagctgctccgggagatgatggccaagattgaggacaagaatgaggtcctggaccagttcatggattcaatgcagttggatcccgagacggtggacaaccttgatgcctacagccacatcccaccccagctcatggagaagtgcgcggctctcagcgtccggcccgacactgtcaggaaccttgtacagtccatgcaagtgctgtcaggtgtgttcacggatgtggaggcttccctgaaggacatcagagatctgttggaggaggatgagctgctagagcagaagtttcaggaggcggtgggccaggcaggggccatctccatcacctccaaggctgagctggcagaggtgaggcgagaatgggccaagtacatggaagtccatgagaaggcctccttcaccaacagtgagctgcaccgtgccatgaacctgcacgtcggcaacctgcgcctgctcagcgggccgcttgaccaggtccgggctgccctgcccacaccggccctctccccagaggacaaggccgtgctgcaaaacctaaagcgcatcctggctaaggtgcaggagatgcgggaccagcgcgtgtccctggagcagcagctgcgtgagcttatccagaaagatgacatcactgcctcgctggtcaccacagaccactcagagatgaagaagttgttcgaggagcagctgaaaaagtatgaccagctgaaggtgtacctggagcagaacctggccgcccaggaccgtgtcctctgtgcactgacagaggccaacgtgcagtacgcagccgtgcggcgggtactcagcgacttggaccaaaagtggaactccacgctgcagaccctggtggcctcgtatgaagcctatgaggacctgatgaagaagtcgcaggagggcagggacttctacgcagatctggagagcaaggtggctgctctgctggagcgcacgcagtccacctgccaggcccgcgaggctgcccgccagcagctcctggacagggagctgaagaagaagccgccgccacggcccacagccccaaagccgctgctgccccgcagggaggagagtgaggcagtggaagcaggagacccccctgaggagctgcgcagcctcccccctgacatggtggctggcccacgactgcctgacaccttcctgggaagtgccaccccgctccactttcctcccagccccttccccagctccacaggcccaggaccccactatctctcaggccccttgccccctggtacctactcgggccccacccagctgatacagcccagggccccagggccccatgcaatgcccgtagcacctgggcctgccctctacccagcccctgcctacacaccggagctgggccttgtgccccgatcctccccacagcatggcgtggtgagcagtccctatgtgggggtagggccggccccaccagttgcaggtctcccctcggccccacctcctcaattctcaggccccgagttggccatggcggttcggccagccaccaccacagtagatagcatccaggcgcccatccccagccacacagccccacggccaaaccccacccctgctcctcccccgccctgcttccctgtgcccccaccgcagccactgcccacgccttacacctaccctgcaggggctaagcaacccatcccggcacagcaccacttctcttctgggatccccgcaggttttccagccccaaggattgggccccagccccagccccatcctcagccccatccttcacaagcgtttgggcctcagcccccacagcagccccttccactccagcatccacatctcttcccaccccaggccccaggactcctacccccacaatccccctacccctatgcccctcagcctggggtcctggggcagccgccaccccccctacacacccagctctacccaggtcccgctcaagaccctctgccagcccactcaggggctctgcctttccccagccctgggccccctcagcctccccatcccccactggcatatggtcctgccccttctaccagacccatgggcccccaggcagcccctcttaccattcgagggccctcgtctgctggccagtccacccctagtccccacctggtgccttcacctgccccatctccagggcctggtccggtaccccctcgccccccagcagcagaaccacccccttgcctgcgccgaggcgccgcagctgcagacctgctctcctccagcccggagagccagcatggcggcactcagtctcctgggggtgggcagcccctgctgcagcccaccaaggtggatgcagctgagggtcgtcggccgcaggccctgcggctgattgagcgggacccctatgagcatcctgagaggctgcggcagttgcagcaggagctggaggcctttcggggtcagctgggggatgtgggagctctggacactgtctggcgagagctgcaagatgcgcaggaacatgatgcccgaggccgttccatcgccattgcccgctgctactcactgaagaaccggcaccaggatgtcatgccctatgacagtaaccgtgtggtgctgcgctcaggcaaggatgactacatcaatgccagctgcgtggaggggctctccccatactgccccccgctagtggcaacccaggccccactgcctggcacagctgctgacttctggctcatggtccatgagcagaaagtgtcagtcattgtcatgctggtttctgaggctgagatggagaagcaaaaagtggcacgctacttccccaccgagaggggccagcccatggtgcacggtgccctgagcctggcattgagcagcgtccgcagcaccgaaacccatgtggagcgcgtgctgagcctgcagttccgagaccagagcctcaagcgctctcttgtgcacctgcacttccccacttggcctgagttaggcctgcccgacagccccagcaacttgctgcgcttcatccaggaggtgcacgcacattacctgcatcagcggccgctgcacacgcccatcattgtgcactgcagctctggtgtgggccgcacgggagcctttgcactgctctatgcagctgtgcaggaggtggaggctgggaacggaatccctgagctgcctcagctggtgcggcgcatgcggcagcagagaaagcacatgctgcaggagaagctgcacctcaggttctgctatgaggcagtggtgagacacgtggagcaggtcctgcagcgccatggtgtgcctcctccatgcaaacccttggccagtgcaagcatcagccagaagaaccaccttcctcaggactcccaggacctggtcctcggtggggatgtgcccatcagctccatccaggccaccattgccaagctcagcattcggcctcctggggggttggagtccccggttgccagcttgccaggccctgcagagcccccaggcctcccgccagccagcctcccagagtctaccccaatcccatcttcctccccaccccccctttcctccccactacctgaggctccccagcctaaggaggagccgccagtgcctgaagcccccagctcggggcccccctcctcctccctggaattgctggcctccttgaccccagaggccttctccctggacagctccctgcggggcaaacagcggatgagcaagcataactttctgcaggcccataacgggcaagggctgcgggccacccggccctctgacgaccccctcagccttctggatccactctggacactcaacaagacctgaacaggttttgcctacctggtccttacactacatcatcatcatctcatgcccacctgcccacacccagcagagcttctcagtgggcacagtctcttactcccatttctgctgcctttggccctgcctggcccagcctgcacccctgtggggtggaaatgtactgcaggctctgggtcaggttctgctcctttatgggacccgacatttttcagctctttgctattgaaataataaaccaccctgttctgtggcccgtaaaaaaaaaaaaaaaaaaaa

SEQ ID NO: 23507 - DNA, 4677 bp, Homo Sapiens
  misc_feature (4022)..(4022): n is a, c, g, or t
  misc_feature (4633)..(4633): n is a, c, g, or t
caggcacgtcccgggggctccagcttctgctcagagcgcggagagccgggccgggcgggcgcgcgcgcaggactcgggccgctcgaggggtccggccggacggtgtcgggagccggacccgtcggcagaggagcgggcgccgcgatggctgagggcagtgccgtgtctgaccctcagcacgccgcgcgtctgctgcgagcgctcagctctttccgcgaggagtctcgcttctgcgacgcgcacctggtcctcgacggggaggagatcccggtgcagaagaacatcctggcggcggccagcccgtacatcaggacaaagttaaactataatcctccaaaagatgatggatcaacttataagattgaacttgaagggatatcggtaatggttatgagagagatcctggattacatcttcagtgggcagatcaggctaaatgaagatacaatccaagatgttgttcaggcagctgacctgctgctactgacggaccttaaaaccctgtgctgtgagtttttggaaggctgcattgctgctgagaactgtattggtatccgtgactttgcactacattactgcctccatcacgttcattaccttgccacagaatacctggagactcatttccgagacgtcagcagcacggaagaattcttagagctgagtcctcaaaagcttaaagaagtgatttctcttgagaagttaaacgttggcaatgaaagatatgtctttgaagcagtaattcgatggatagcacatgatacagaaataagaaaggtccacatgaaggatgttatgtcagctctgtgggtttcagggttggactccagttatttacgggaacagatgctgaatgaaccattagtacgagaaattgtcaaagagtgtagcaatataccgctcagccagccgcagcaaggggaggcgatgctggccaacttcaaaccccggggctactctgagtgcatcgtgactgttggtggagaagagagagtttcacggaaacccacagcagcgatgcgatgcatgtgccctctctatgaccctaacaggcagctttggatcgaactggcccctttaagcatgccgagaattaaccatggagttctctcagcagaaggatttttgtttgtattcgggggccaagatgaaaataagcagactcttagctcaggagaaaagtatgatccagatgcaaatacatggacagcattgccacctatgaacgaggcaagacataacttcggaattgtggagatagatgggatgctgtacattttgggaggagaggatggtgaaaaggagctgatttccatggagtgttacgatatttattctaaaacctggacaaagcaacctgatttgaccatggtcagaaagatcggctgctatgcagctatgaaaaagaaaatctacgccatgggtggaggctcctatggaaagctttttgagtctgtagagtgttatgatcccaggacccagcagtggactgccatatgtccactaaaagagaggaggtttggagcggtggcctgtggagttgctatggagctgtatgtgtttgggggagtccgaagtcgtgaggacgcccagggtagcgagatggtaacttgcaagtccgagttctaccatgatgagtttaaaaggtggatctatcttaacgaccagaatttatgcatccccgccagttcctcttttgtttatggagctgtacctataggagccagtatttatgttattggagatcttgatacaggtaccaattacgactacgtgcgtgagtttaaaagaagcacaggaacctggcaccacactaaaccactccttccatccgaccttcgccgtacaggatgtgcagccttacgcattgcgaattgcaagcttttccgcctgcagcttcagcaaggcttattccgtattcgtgttcattccccttgaggaggaagcagagcagagtgcgagatcctgacccaagagcaccataacatagctccgaaagggagagcagagatggcagctgaaactcactctgtgctgggctttggtatggtaactctttggtggttttatgatgcttacaaacttgagctttagctcttgtttgggagaacacgtaactgttgaaaaactacctgggaggagtgagttcctccagttaaatgtggctgtagatgttggaggctagggaggctagtaaatatcaaaaggaaaagggagtgggaattgctatcatgtaaaatatcaaagttaaaatactaaggtgcattttccctgaagggaactcatgtctgactgctgtattcaaatacgtagctttggtaacaaacaaaatccgtatatgcaaatcaacatatccaaacatgccaagactgcttttccactgcacttggaaggatatattatgcctaaccctgcccaacaaattaaggtttgtgcctaaaatgttagattggactgtatgccagttagtctccatttattcctagtactctgtcctaagaatctttttaaaactatatcatgatgaattgaaatgaagataaaattgctcttttgtaactttatcttagtaatgtaaagattcagtaaattgatgagtcaggttgcagccctcatgtgaactgaaagaagttgctcgcttctgtgttgacttagatcaagacacgtcacgcatcctttctggggtagtacctgtggagccgggaagggtctcctgcagtgccattctgccttctcaatgagcaaaaccattttctaagtatgaggatattagtgagtaggagattttataaaagaaagacctgagtcagacaaataataaaggtctgctgtggctaaaaaagcaaaaacaaaaaagctatccagacaaaatacatagggatcagaaactttttcatataacctgtctgaaagcacacaaagtcttgtttactactgtttagggtttgaaaacttgtcttagaatgcgaatctgtgttaagaatctagtctttgtaatagaagtttcccagtggcattcactagtgagagttttagacaaattatgttacgagtaaagtttggctggtagaataaactacctcaacttaatttcattctgttcatagtagagcaaattaatcttttcctccttccctcctttcctatctctcattctcacctcaacccactttaccccacttctcattgggggaaaaatgtctttcgttcgtggaacgtatcttgtaagatattttgttttccacttgaattacaccaccctagtgtgaaatcggggacttcaaagtgcttgattccttcctaaattgaattttatgcaatgtcaaatttctaatcaatttaatatacagtacttcatttttaattgttttctaaaaaaaaggttttttttttccttttggaatatggctgtaagaagcagcattttgtcttattaacacatgtataaaggtatcctttggttttaagtcgagaacaggaatttcttctagaaacttcctgtatggaacgtttatatgcaattaacatgcatatgaaaaacatcacttacgttctcccacccatagacataaaaaagggtgacctgtgattttttttcttatacctgctggaagtcagtacaatgcgtcaaaagttgctgaaagatgctgtgcctatggggttctagagagtgttgagtgtggtacattaactctccattttagccagaagatacctgataagagaaggtgtaaggtttttatcttatatgccagaggcaccaggccagatgtgccgcacagtcatgtaattcaatcatgtttaatatgtcagtcaaaaccaaattcagaattgttttgtgtaccagtcagctgttgtctgcacattttcgtagtgacagtgtggagatctttttaatgaaagcaaactatgtggcctctgcaaagaaaggaagatttttctttttacaactagatattagttttagaggaaggaaatagctgaaaaactaaatttgctttggtgaaatgtcctgtacagancagttccttggcattcagcagctgtaattggggaacattaaaacagtaactgacatccagttaaagccacgatcgtcagcaattctccttttttaatttctgatatttaaagttttttttccagtctacaccaggcctctccaaggagacagttcattatttaggagtgaatgtgttcctcttgcaatattatcagtacctgcatgacttggtaaattcattttataaaaatagtgttttttttttttaatttcagttcattgactctataactgcagaaattagataatgttttataaaataaatttgccacataatatgggatgcaataaccaacaaagctgctaagtgccaaactgttattttactatatataaatattaaaatattgtgttgaagtatagggatgtatttaattttactatgctccaacattaatcatgactcttttgtaaattacagttatttcagtattgtaaaataaatgttgactcatttcatgcaggtttgtgttttaacattccacttatgccttgaaacatcatttcttgataactttttgatacttctttcttgataaggcacttttaccaggtgtgtgttggaattgntggctcaggataggtcttaaattttaaatacaaatatctttggg

SEQ ID NO: 23508 - DNA, 2034 bp, Homo Sapiens
ggcgcgtcacctcctcacgctgcggctgtcgcccgtgtcccgccggcccgttccgtgtcgccccgcagtgctgcggccgccgcggcaccatggctgtgtttgtcgtgctcctggcgttggtggcgggtgttttggggaacgagtttagtatattaaaatcaccagggtctgttgttttccgaaatggaaattggcctataccaggagagcggatcccagacgtggctgcattgtccatgggcttctctgtgaaagaagacctttcttggccaggactcgcagtgggtaacctgtttcatcgtcctcgggctaccgtcatggtgatggtgaagggagtgaacaaactggctctacccccaggcagtgtcatttcgtaccctttggagaatgcagttccttttagtcttgacagtgttgcaaattccattcactccttattttctgaggaaactcctgttgttttgcagttggctcccagtgaggaaagagtgtatatggtagggaaggcaaactcagtgtttgaagacctttcagtcaccttgcgccagctccgtaatcgcctgtttcaagaaaactctgttctcagttcactccccctcaattctctgagtaggaacaatgaagttgacctgctctttctttctgaactgcaagtgctacatgatatttcaagcttgctgtctcgtcataagcatctagccaaggatcattctcctgatttatattcactggagctggcaggtttggatgaaattgggaagcgttatggggaagactctgaacaattcagagatgcttctaagatccttgttgacgctctgcaaaagtttgcagatgacatgtacagtctttatggtgggaatgcagtggtagagttagtcactgtcaagtcatttgacacctccctcattaggaagacaaggactatccttgaggcaaaacaagcgaagaacccagcaagtccctataaccttgcatataagtataattttgaatattccgtggttttcaacatggtactttggataatgatcgccttggccttggctgtgattatcacctcttacaatatttggaacatggatcctggatatgatagcatcatttataggatgacaaaccagaagattcgaatggattgaatgttacctgtgccagaattagaaaagggggttggaaattggctgttttgttaaaatatatcttttagtgtgctttaaagtagatagtatactttacatttataaaaaaaaatcaaattttgttctttattttgtgtgtgcctgtgatgtttttctagagtgaattatagtattgacgtgaatcccactgtggtatagattccataatatgcttgaatattatgatatagccatttaataacattgatttcattctgtttaatgattttggaaatatgcactgaaagaaatgtaaaacatttagaatagctcgtgttatggaaaaaagtgcactgaatttattagacaaacttacgaatgcttaacttctttacacagcataggtgaaaatcatatttgggctattgtatactatgaacaatttgtaaatgtcttaatttgatgtaaataactctgaaacaagagaaaaggtttttaacttagagtagccctaaaatatggatgtgcttatataatcgcttagttttggaactgtatctgagtaacagaggacagctgttttttaaccctcttctgcaagtttgttgacctacatgggctaatatggatactaaaaatactacattgatctaagaagaaactagccttgtggagtatatagatgcttttcattatacacacaaaaatccctgagggacattttgaggcatgaatataaaacatttttatttcagtaacttttccccctgtgtaagttactgtggtttgtggtacaacttcattctatagaatattaagtggaagtgggcgaattctactttttatgttggagtggaccaatgtctatcaagagtgacaaataaagttaatgatgattccaaaaaaaaaaaaa

SEQ ID NO: 23509 - DNA, 6313 bp, Homo Sapiens
ggcatcccaggatttggaattcagctgtgagctcatgagctgatggatgtttccaggagtaccctgaagaccacccaggtgggagtgtaagataaccttccagataaagagttgctgctaccaaaagagtgctgacaccatcacagtatgttcccttctcaaccctggacatggttcagaaacagctaaagcagacaagaatctggggcagccaatattgtaccacctgccaaagcttggcacaaacaatctggaagccaaaaattgcacatactgtggaacagagcaagtggttctggcctccctgggatttggatcctggtttccagagctaagaacacaaagtcatgaaggtgaaggaggagaaggctggggtaggaaagctggaccacactaaccacaggaggagatttccggatcagaaagaatgccctcctatccacattgggcttccagtacccacttaccctcaaagaaaaactgaccagaagggacatctttcaggcctgcaaaaagtccactggggcctgcggccagaccagccacagcaggaactgactggcccagggagtggggcaagcagccaggacagcagcatggatcttatcagcaggactcggtccccagctgctgagcagctccaggacatcctgggggaggaagatgaggctcccaaccccaccctctttacagagatggatactctgcagcatgacggagaccagatggagtggaaggagtcagccaggtggataaagtttgaagaaaaggtagaggaaggcggcgaacgctggagcaagccccacgtgtccacactatccctgcacagcctcttcgagctccgtacctgcctgcagacggggacggtgctgctggatttggacagtggctccttaccacagatcatagatgatgtcattgagaagcagattgaggatggtctcctgcggccagagctccgggagagggtcagttacgtcctcctgaggaggcaccgccaccaaaccaagaagcccatccaccgctccttagctgacattgggaagtcagtctccaccacaaatcgcagtcctgcccggagccctggtgctggcccgagtctacaccactccacggaagacctgcggatgcggcagagtgcaaattacggacgtctgtgtcatgcccagagcagaagcatgaatgacatttctctcaccccaaacacagaccagcggaaaaacaaattcatgaagaagatccccaaggactcagaagcgtccaacgtgctcgtgggcgaggtggacttcctagaccagccattcatcgcgttcgtgcgcctcatccagtcggccatgctgggaggagtgaccgaggtgcctgtccccaccagatttctgtttatactactgggaccttctgggagagcaaaatcctacaatgaaattggccgtgccattgcaaccctcatggtagatgatctcttcagtgacgtggcctacaaagcccgcaatcgggaagatctgatcgcaggaattgatgaatttctggatgaggtcatcgtccttcctcctggagaatgggacccaaatatccggattgagccccccaagaaggtgccctctgctgacaagaggaaatctgtgttctccctagcagagctgggccagatgaatggctctgtgggaggaggcggcggagctcctggaggaggcaatggaggtggtggtggtggtggcagtggcggcggggctggcagtggcggggccggcggaacaagcagcggggatgatggagagatgccagccatgcatgaaatcggggaggaacttatctggacaggaaggttcttcggtggcctgtgtctggatatcaagaggaagttgccctggttcccaagtgacttctatgatggcttccacattcagtccatctctgccatcctattcatctacctcggctgtatcaccaacgcgatcacctttggtgggcttctgggggatgccaccgacaattatcagggagtgatggagagcttcctgggcactgccatggctggctccttgttctgcctcttctcgggacagcctctcatcattctcagcagcacggggcccatcctcatctttgagaagctcctcttcgacttcagcaaaggcaatggcctggactacatggagttccgcctctggattggcctacactcagctgtccagtgccttatcctagtggccacagatgccagctttatcatcaaatatatcacccgcttcaccgaggagggcttctccacccttatcagcttcatcttcatctacgatgccatcaagaagatgatcggtgccttcaagtactaccctatcaatatggacttcaagccaaacttcatcactacctacaagtgcgagtgtgtcgcccctgacacagtgaatacaaccgtgttcaatgcttcagccccattggcaccagacaccaacgcttctctgtacaacctccttaacctcacagcgttggactggtccctgctgagcaagaaggagtgtctgagctacggcgggcgcctgcttgggaattcctgcaagtttatcccagacctggcgctcatgtccttcatccttttctttgggacatactccatgaccctgaccctgaagaagttcaaattcagccgctattttcctaccaaggtccgggccctggtggctgacttttccattgttttctccatcctgatgttctgtggaatcgatgcctgttttggcctagaaactcccaagctgcatgtgcccagtgtcatcaagccaacgcggcctgaccgaggctggttcgtggccccctttgggaagaacccgtggtgggtatacccagcaagcatcctgcccgccctgctggtgaccatcctgatcttcatggaccagcagatcactgccgtcattgtcaaccggaaggagaacaaactgaagaaggctgccggctaccatctggacctgttctgggtgggcatcctcatggctttgtgctcctttatggggctcccctggtacgtggctgccacggtcatctccatcgcccacatcgacagcctcaagatggagacagagaccagtgcccctggggagcagccccagtttctgggagtcagggaacagagagtaaccggcatcatcgtcttcatcctgacgggaatctctgtcttcctggctcccatcctaaagtgtatccccctgccggtgctgtacggagtcttcctctacatgggcgtggcctccctgaatggcatccagttctgggaacgctgcaagctcttcctgatgccagccaagcaccagccggaccatgccttcctgcggcacgtgccgctgcgccggatccacctcttcaccctggtgcagatcctctgcctggcggtgctctggatcctcaaatccacggtggctgccatcatcttcccggtcatgatcctgggcctcatcatcgttcgaaggcttctggatttcatcttttcccagcacgacctggcctggattgacaacatcctcccagagaaggaaaaaaaggagacagacaagaagaggaagagaaaaaaaggggcccacgaggactgtgatgaggagccccagttccctcctccctcggttataaagattcccatggaaagtgtccaatcagatccccaaaacggtatccactgcattgccagaaaaagatcttccagttggagttactcactctgattcttccttcagtgacacagaacttgaccgaagcatcaccttgcacttcaaaatatcctgtccagcttcacctgctttcagctactcacggaacccagtgttcatggtgccacaggtgaagatagagatggagtcagactatgacttcacagacatggataaataccgaagagaaactgacagtgagaccaccctctaggatgaagcagcttctcccagatgggagatggagagcctggcttagtcttcactgggagggtcttaacttctctgtgcctgtttccttctttatcaaacagagggagtccgtctgcctatagaaaactggagatctattgatgaaaagtattgcttagatgcaaagctctcccctttgtagtaattaaaatacctaaagctaaatattatattttattttaaaatgcagttcagcatagaaattctaacatttctttggaaataaaaaaatgcttgtttccccaaaccatagctaagataaaggggcaatagtcaattcatatttaaaacaaatatcaatttaaaattgtttaaaggttagatttaaatatagatgttctcaaacaaacttgtaatatacttttatgtcactagaccatctttggaatatttggcaattctgcatattaagaaatgctgaaaaggtcctatcttttctccctgtcacatccaatttcctaagggttatatgaaaagtttgaaccagccgggcacagtggcacacgcctgtaatcctagcactttgggaggccgaggcaggtgaattgcctgagctcaggagttcgagaccagcctaggcaacacggtgaaaccccgtctctactaaactacaaaaaattagccgggtgtggtggcatgcacctgtagtcccagctattcgggaggctgaggcaggagaatcgcttgaacccaggaggcagaagttgcagtgagctgagatggcaccactgcactccagcctaggcaacagagtgagactccgtatccaaacaaaaaaaaagtttgaaccatctgcattatgggccttgctccagaagtgtgactggggctttcccagattgaaaagccagttccaaaactctgttaatgaaagaaccaatgcatctgagtggataaatgtttctaaaataaaatagttcttgttaaagtgaaatttgaaaccacatgttaaatcaaaatgatcctttaaattagtatcactggtttttcatacctggaatcacatttcatgatacatttgggtgggtcctccctgcaaattttcaatgtttattcccaaagtcaaactcccattcatgtgaacaatacaggttagacagaggtaaggtcacattttacattacaactttgcaatattaatcaacctagtactttaaaggaatgattgaaaactatttgggaagataaaaaccagtttcaatgaagcaaacctattcctcatgaaacttaagatcagtcattttatcttcaatccacatttaatgaacaccaaccatgttgatttaatgcctactatgaccctgacagccacagtgcatctgacacttactttctccaaaacaactatgatttaaaccttgagtaaatcacttgaaccttgaggttagagttactatatttgctcaagatgacaaatgcaggtgctttcttttttaaagaaaaatgacactagatcattaacaccttgagtataggacaggtaattgcctctgtaattcccagcgtctagtgtagtgcctggtccatagaaagctctcaataagtgtttgattacatttaatctcagagctcccttccaagggatactgccaagaggtaaagctccaaacctctactcttactgagagcagaatttcttagaatttccagaaccatctcctatgcttaagtataaattcttgtcagacacagtggctcacacctgtaatcccgctacttgggaggcagaggtggggggaatcagcagaggtcaggaggtcaagaccagcctgggcaacatagtgagacccatctctaaacaaatgtttaaaaattagctaggcatgctggcacacacctgtagtcccagccatttcagaggctgatgcaggaggatcgtttaagtccaggagttcaaggctgcagtgagctataatcatgccactgcactccagccagggagacagctggaatccatgtcttataaacaataataattaatttttaaaaaaagtatttatcatccacaccaatcctggggaagctaacaatccacccttaacacatttcagttttaaaacctggctgatctggaatagaactttgtccaaattaaattgtagaaatgctatggattcaagagtaaacctgcttgattaatcaaacaagctggaaaactactgttaatttctttgttgtaaattgatcactgtaattttaccttacatgtcatttatattttgtatatacatgaacattttaatttccatagcttttaacaggttgacataatacttctccatgcagtaagtcagtcattttttccacttgtaactgtaattcaataaaatttaatcctgtctggtcaaaaaaaaaaaaaaaaa

SEQ ID NO: 23510 - DNA, 1875 bp, Homo Sapiens
atggctgagaatggcgagagcagcggccccccgcgcccctcccgcggccctgctgcggcccaaggctcggctgctgccccggctgagcctaaaatcatcaaagtcacggtgaagactcccaaagagaaagaggagttcgcggtgcccgagaacagctcggttcagcagtttaaggaagcgatttcgaaacgcttcaaatcccaaaccgatcagctagtgctgatttttgccggaaaaatcttaaaagatcaagataccttgatccagcatggcatccatgatgggctgactgttcaccttgtcatcaaaagccagaaccgacctcagggccagtccacgcagcctagcaatgccgcgggaactaacactacctcggcgtcgactcccaggagtaactccacacctatttccacaaatagcaacccgtttgggttggggagcctgggaggacttgcaggccttagcagcctgggcttgagctcgaccaacttctctgagctccagagccagatgcagcagcagcttatggccagccctgagatgatgatccaaataatggaaaatccctttgttcagagcatgctttcgaatcccgatctgatgaggcagctcattatggctaatccacagatgcagcaattgattcagagaaacccagaaatcagtcacctgctcaacaacccagacataatgaggcagacactcgaaattgccaggaatccagccatgatgcaagagatgatgagaaatcaagacctggctcttagcaatctagaaagcatcccaggtggctataatgctttacggcgcatgtacactgacattcaagagccgatgctgaatgccgcacaagagcagtttgggggtaatccatttgcctccgtggggagtagttcctcctctggggaaggtacgcagccttcccgcacagaaaatcgcgatccactacccaatccatgggcaccaccgccagctacccagagttctgcaactaccagcacgaccacaagcactggtagtgggtctggcaatagttccagcaatgctactgggaacaccgttgctgccgctaattatgtcgccagcatctttagtaccccaggcatgcagagcctgctgcaacagataactgaaaacccccagctgattcagaatatgctgtcggcgccctacatgagaagcatgatgcagtcgctgagccagaatccagatttggctgcacagatgatgctgaatagcccgctgtttactgcaaatcctcagctgcaggagcagatgcggccacagctcccagccttcctgcagcagatgcagaatccagacacactatcagccatgtcaaacccaagagcaatgcaggctttaatgcagatccagcaggggctacagacattagccactgaagcacctggcctgattccgagcttcactccaggtgtgggggtgggggtgctgggaaccgctataggccctgtaggcccagtcacccccataggccccataggccctatagtcccttttacccccataggccccattgggcccataggacccactggccctgcagccccccctggctccaccggctctggtggccccacggggcctactgtgtccagcgctgcacctagtgaaaccacgagtcctacatcagaatctggacccaaccagcagttcattcagcaaatggtgcaggccctggctggagcaaatgctccacagctgccgaatccagaagtcagatttcagcaacaactggaacagctcaacgcaatggggttcttaaaccgtgaagcaaacttgcaggccctaatagcaacaggaggcgacatcaatgcagccattgaaaggctgctgggctcccagccatcgtaa

SEQ ID NO: 23511 - DNA, 4376 bp, Homo Sapiens
gaagatagtgtgtggctgcttctggactcaaggaggaggagagagattccgcgagccgacaccatgcgatccaaggcgagggcgaggaagctagccaaaagtgacggtgacgttgtaaataatatgtatgagcccaaccgggacctgctggccagccacagcgcggaggacgaggccgaggacagtgccatgtcgcccatccccgtggggtcaccgccccccttccccaccagcgaggacttcacccccaaggagggctcgccgtacgaggcccctgtctacattcctgaagacattccgatcccagcagacttcgagctccgagagtcctccatcccaggggctggcctgggggtctgggccaagaggaagatggaagccggggagaggctgggcccctgcgtggtggtgccccgggcggcggcaaaggagacagacttcggatgggagcaaatactgacggacgtggaagtgtcgccccaggaaggctgcatcacaaagatctccgaagacctgggcagtgagaagttctgcgtggatgcaaatcaggcgggggctggcagctggctcaagtacatccgtgtggcgtgctcctgcgatgaccagaacctcaccatgtgtcagatcagtgagcaggtaatttactataaagtcattaaggacattgagccaggtgaggagctgctggtgcacgtgaaggaaggcgtctaccccctgggcacagtgccgcccggcctggacgaggagcccacgttccgctgtgacgagtgtgacgaactcttccagtccaagctggacctgcggcgccataagaagtacacgtgtggctcagtgggggctgcgctctacgagggcctggctgaggagctcaagcccgagggccttggcggtggcagcggccaagcccacgagtgcaaggactgcgagcggatgttccccaacaagtacagcctggagcagcacatggtcatccacacggaggagcgcgagtacaaatgcgaccagtgtcccaaggccttcaactggaagtccaacttcatccgccaccagatgtcccacgacagcggcaaacgcttcgaatgtgaaaactgcgtgaaggtgttcacggaccccagcaaccttcagcggcacatccgctcgcagcacgtgggcgctcgggcccacgcctgccccgactgcgggaagaccttcgccacgtcctccggcctcaagcagcacaagcatatccacagcacggtgaagcctttcatatgtgaggtctgccacaagtcctacacgcagttctccaacctgtgccggcacaagcggatgcacgccgactgccgcacgcagatcaagtgcaaggactgtggccagatgttcagcactacctcctccctcaacaagcaccggcgcttctgcgagggcaagaaccattacacgccgggcggcatctttgccccgggcctgcccttgacccccagccccatgatggacaaggcaaaaccctcccccagcctcaatcacgccagcctgggcttcaacgagtactttccctacaggccgcacccggggagcctgcccttctccacggcgcctcccacgttccccgcactcacccccggcttcccgggcatcttccctccatccttgtacccccggccgcctctgctacctcccacatcgctgctcaagagccccctgaaccacacccaggacgccaagctccccagtcccctggggaacccagccctgcccctggtctccgccgtcagcaacagcagccagggcacgacggcagctgcggggcccgaggagaagttcgagagccgcctggaggactcctgtgtggagaagctgaagaccaggagcagcgacatgtcggacggcagtgactttgaggacgtcaacaccaccacggggaccgacctggacacgaccacggggacgggctcggacctggacagcgacgtggacagcgaccctgacaaggacaagggcaagggcaagtccgccgagggccagcccaagtttgggggcggcttggcgcccccgggggccccgaacagcgtggccgaggtgcctgtcttctattcccagcactcattcttcccgccacccgacgagcagctgctgactgcaacgggcgccgccggggactccatcaaggccatcgcatccattgccgagaagtactttggccccggcttcatggggatgcaggagaagaagctgggctcgctcccctaccactcggcgttccccttccagttcctgcccaacttcccccactccctttaccccttcacggaccgagccctcgcccacaacttgctggtcaaggccgagccaaagtcaccccgggacgccctcaaggtgggcggccccagtgccgagtgcccctttgatctcaccaccaagcccaaagacgtgaagcccatcctgcccatgcccaagggcccctcggcccccgcatccggcgaggagcagccgctggacctgagcatcggcagccgggcccgtgccagccaaaacggcggcgggcgggagccccgcaagaaccacgtctatggggaacgcaagctgggcgccggcgaggggctgccccaggtgtgcccggcgcggatgccccagcagcccccgctccactacgccaagccctcgcccttcttcatggaccccatctacagggtagaaaagcggaaggtcacagaccccgtgggagccctgaaggagaagtacctgcggccgtccccgctgctcttccacccccagatgtcagccatagagaccatgacagagaagctggagagctttgcagccatgaaggcggactcgggcagctccctgcagcccctcccccaccaccccttcaacttccggtccccacccccaacgctctccgaccccatcctcaggaagggcaaggagcgatacacgtgcaggtactgtgggaagatcttccccagatcagccaatctcaccagacacctgaggacgcacactggggagcagccgtacaggtgtaagtactgcgaccgctccttcagcatctcttcgaacctccagcggcacgtccggaacatccacaacaaggagaagcctttcaagtgccacctgtgcaaccgctgcttcgggcagcagaccaacctggaccggcacctcaagaagcacgagcacgagaacgcaccagtgagccagcaccccggggtcctcacgaaccacctggggaccagcgcgtcctctcccacctcagagtcggacaaccacgcacttttagacgagaaagaagactcttatttctcggaaatcagaaactttattgccaatagtgagatgaaccaagcatcaacgcgaacagagaaacgggcggacatgcagatcgtggacggcagtgcccagtgtccaggcctagccagtgagaagcaggaggacgtggaggaggaggacgacgatgacctggaggaggacgatgaggacagcctggccgggaagtcgcaggatgacaccgtgtcccccgcacccgagccccaggccgcctacgaggatgaggaggatgaggagccagccgcctccctggccgtgggctttgaccacacccgaaggtgtgctgaggaccacgaaggcggtctgttagctttggagccgatgccgacttttgggaaggggctggacctccgcagagcagctgaggaagcatttgaagttaaagatgtgcttaattccaccttagattctgaggctttaaaacatacactgtgcaggcaggctaagaaccaggcatatgcaatgatgctgtccctttccgaagacactcctctccacaccccctcccagggttctctggacgcttggttgaaggtcactggagccacgtcggagtctggagcatttcaccccatcaaccacctctgacgggctgggcagccgggggccggtggccagagcgagggcaccagccacgaaggacggaggcgggcggggccccggagaaccctgtccctgcgtgtggccactcctcagcatcctccccacccaccatggttcattccgacttttccaatggaaactcagatcccaaaagtccctaaagcagtcgtagagtctcaccatctccaaggattggtcttgagaacactgttcagtgacggccatgcaggtggccgtccaaagacagccaacggagctgcctcgcagaatcagccagtgggcaggtggacgctctgctgagacagaagctggtggccactgccgggtgcccgcgtggggtcgcggaagggaatggatagactggtgtgctcaaaagagagagatcactcaaatgatttttataatgaaatgacaagaataacccttttggtaaccgtattgactgcagagtctatttaagcatgtgg

SEQ ID NO: 23512 - DNA, 5826 bp, Homo Sapiens
  misc_feature (2472)..(2472): n is a, c, g, or t
  misc_feature (2568)..(2568): n is a, c, g, or t
  misc_feature (2587)..(2587): n is a, c, g, or t
ataacgcccgcgcggattcttccacccccgtggtgaagactcatttctatttttttcataattttcatgagtcacacatttattctagttaaagtccctcttttaaaatataaatcgctttaaaaggtaaatacaaatattttacaaataaaactattaaggtgcagccatttctattcagtcattcttgtgttcatcaaatatgaaatttgaactccctatggacacattttagggttcacacttgaatccagagagagaagttcaatggcaatagcaataacaaaaataaaaggtgacattcattgagctcttaacgttgtgccaaagtaatttgctttcatcatcttatttaatctgcacaacaacccttcaaggtggggttcagttaatgctgccattcactgtcaagaaatagattaacaggcttagaacccataccagttcagcttccagtaaaatgtagtttcttctgaaatacctcgttttgagggactgagtttaccttgaagcccttcctccagctgctgccacatctcaccatgtcttggcagctatgtcatagaagctgccagtccacaaggccctactgtggccagtcagcactgaaatctctcctcttttccacttatctctacagcatggcaggaaggccttgggctgagaatactggttagcgagggagaagcgcaggctctgccagggagaactacggggtgggattcaggctcctttctgggtatgtggtctctaggaagagcaattgcatcagagagaactgaaggagaggtggccttggaggagagggctggagagcccagctcccacccaggcaggtgaccttgcacagggtcgtctgctctcatcatgtgtcctgacgatttgatgagcctgctcttgtttggaaactgtagaagtgtgaggcctgttgctgaaagtaactttctcttccctccacaggcatgaatgctttacagttgcagaacctggcgacgctggctgctgctgcagctgcggcccagacctcagccaccagcaccaatgcaaaccctctctctaccacgagcagcgccctgggagccctcacgagtcccggtgagtgtggggggtgctcttcccttgcaggtgatgcagcaggagtggcaggtaggtttccgtgcctccaggtgcgagggtgaggctagacgtgtccaggatggagccgggatactatactgggctgctttatgtcattgggttattttatttttaaaaatggtcaaagttcgaatttgtcttttattttccatggataatatgcaaaaaagttttcagtgagaatccactgtgcaagccgttctcacacattcactctgttttaaacactagtccattcaacactagttaagttgttaccactgtgaagagcctccgtctcttagtctttctttgtcctgcccttttccaaaaaataagacaatgtaagaattctgtttcaaaattcctagtcattcccatgtcacatttcacagcaactccatccatcacatttgattttaaaatccacggtccagtaaggaacatgtttgctcatttctggtcaggctctggggtgtgtcatttaaagtctttttttcttcacaaattttgttgccttgttgttcaaaagcagatgccagttgtcttttcatacaagccagatagaatgtggttgcttagataccgtgatttgaggttttgttttgtttttttttaatttaaaaaagtcgaacgtttcactggctttccatctctgagttttccagacctcaatagatggtctcacctccttttctgttacatgaaggagatggcctggacagtttccaagcttccttctaactttcaaaatcccatgaccccctatcagctgcgccccaaggattagctaagtgttggaaaaacgttaatgaaaaaatagcttcaggaaacacacatcgaaaactacagcccactccacgctggctgttttagggcttttgacttgagggaggaatgaggcaggttcctagagctggcagttctcaaaagagcagttgccctttgtctctgcataaaacattgtgtatctaagacatttcacctgggggattgtttcgagggagaagtctgagagatgtttaggagaagctggtggatttccctgtaatgtgctgagatcgcatggcaggtgtattgacttcactgtgtacagtgtcttcaaaaacataccgttactgtatgagggccttatctaatataataaacactattcctgaaaaatcaactttgtcacccttaatttcaggaagttaagtgatagcttcagtgcaacacatcaacttacttaagtaaatcctgtaacgatcccttttgagaaataaacatttttaacatgatagatttccccttcataaaaataagtcatttttttaaaaacatgaaaattagaccctcccaacttagatttcacanatcagattaaaatgtattttcttaagagggattttttttctcccctgtgagcactttgattaccccaaaatagcactgagtattgtgaatgcattntggagcatcttcagtccanaggaggcttgacagtttaagaagccaaatgcagaagcagctgtcggctgattggtgtagctaagataactcaaaaatcatatcccaaaagcgctttgtggtgtgagcaggacagatgtgctgcctaccttcgggagtccttcagtccttcagggacttggacaagaagcaaagcaatgagtgtcagatctgtgacagaatcccactgaacaaggggaaaggggactggaggaggtgacccctctctcaaaaggtgacctttgagcagagacctgagttccgtgacggaagccatggcgcgtgttgaggcagaggacagagccagtgggtgggggagagcggagtgggggctctgtggtggaccgcgtccgttccagcccacgttgggaggagtgtgagcttgttgcaaccttcttaaaatgtgggctactggagatcatgccactgcactccagcctgggcgacgagcgagactccgtctaattttaaaaaaaataaatgtgggccactcagacggtctagggcgacggcctaggtgttagtcggaaaggaattttaaatgtatgtgactattttcaatttcttcctgagactgcagtggaggaaaatgtgttgtgggatgagccttcctccctgctggagtcaaaaccacaccagcgcagcgtccttgccttgactgctctgtaagaggcttcttgcccttcagaacacgccgctcgcttaggtgtcactgagagcgatttttctcttctctactgaggaatgctttgcataataactgaaagtattttattagaatcctaaagtgtagcagcagcaatgattgaaatctacatttcaattatttttcttaagtgtaactaaaaaatctgatgtttaagtgaaagtaaattatttgtctaatttccatcagggactttttgaaagtcacagaaaatgtggttagtagaattcatgaatctccacttcatcaaggcagtttcctagaagataaaaggggttgaaagccattcccaaggccattgccattatttactttttaaataataataaactgggcatactatttggaccatgagccagttcacttgccctgtgagttgaagggaagcctcatcccatctctcctccacaggcctggggtttaccctgtttttaagcgtgtctcttaagcttcagacaaattcatctggaaagcaaagggacaattcaatcccccaaactgttaatttttttaataattgtaaatttatcatttcaattttgcatacccaggaaaagtctccctacagcattattataaatgattttaaacagtcttggctttaaaacatgaaagattaagtcttaatttttgttaaaaaaaaatcccctcaggcaataaataggttcctttgtctcatggccttgaaataaaaattaaaatagtttaaattgcccatggttaaaataagtgtttcgtgcaattatcagatggtagtgaataaaattagaaattaaatcatgaaagaataaaatccaggtaagtgcatattatgccttttatgagtttctcacgggtcttttgaagcctaatttaatcatgtttcttgtcttttattttgatatgatcattttacctgtgtttaccccagtctcctatttagttaattaattcttgggtcatttattgttacccagtttttaacctgtttttgacgactgtgtctctgtttatgcaagaggcaaattgtctagaaggggtgtagctaggtattaaagaagataatgtttgtcttccattcagcttgcaaatgagttagttttgtctggtaattttgagcgcttgaagagactgttactgttaccacacatgaatattttttggtattttttggtctaaaatgtattgcattcacgtaccatgttattccactgaacttcttctgtcttcttctttaaagaaaaggatgctttaaaattctccaaatgcttctgtaagtgcagacttgaccaagtacacatccaggatcatagactggttcttcccatggtacaaggcattctaaaatgctaggaagcattttttcattcccaccattgacccttcaaagagttatcactttgaattctgggtggtattttccccatcttcaaggtatccccagcttccttgaaggctgtgacaaacaccaagcttcaaggaaatggtgacacttcctctttgactatctgagggtaacagagattggagtgtttggacgttgttcaggcattccctgctcgcctcacatagtcatgactgatagacggtgactgttgttcttgcacacctgtgtcaccaaagcagctgaatgagcagtgggaaatgagaattcacccttgaagttatcctgtggcctttccattgacagggggctttgtcgccaccttcaatagatgtctgcatttgcatcagaggagaacttgcattaggcaaagaggtgtgatgcataagctggtttaacccacatttctgagccttctagttcatgcagggcaaatacataaaaatgagttggggcctgcactgccccctccaagtggtgacatgcacgaggcagtatcaccagatgggaaagagtggggcaggagagagggacagacaggtggacaaagaggctgtctccccaagactactgcagtggtcccacatcctcagagtcgagaattaaacttgccccacagacctgcccttcccgctgcctgccccaccctgctaaatggattgtcccaatggctggtgtgacttggtcgctgatctttgcagctggcccctggctcagctgcgtgcctcatcagcccctcagttctccctgtgaagcatcatttccctcccaggcaacaggagcctggaagagacccttgtcttctctctccttgtactactggaacagcctccaacttggccccttccctctgtctgtcttacacactgttggcaactgcggtctagactggagtgaaacaaactcctgagtgtggcattcagggtccacctggaccacctccgcccttccatccagaatccagccagcacacactcgcccagatcaggccaccccccgtagcccagccacgccgtcggcctttacgccattattcttgcaagcttctctacctagaacatctcccccatttcctcccacaaaaatctaatacatcactaatacttgttgcagtgctcattcttgagaatagtgtgggtgggtataaaagcgt

SEQ ID NO: 23513 - DNA, 2446 bp, Homo Sapiens
gaatgtaaagagatccagggctcttggagagggacaagtgagagccagccaaaaaggaaaaagcaaaggcagaaacggcatcaggagagacagagatgtgaaggagggaaggagcaggagagcaggaaggaaacgcaggaggagggagcagcatctcctgtgaacacagaggagcacctgtttgctgttaaaatcgatctccctcggcaccctgagcaatggatataatatttggcaggaataggaaagaacagctggagcctgtgagggccaaagtgacaggcaagattccagcatggctgcagggaaccctgctccgcaacgggcctgggatgcacacagttggggagtccagatacaaccattggttcgacggccttgccctgctccacagcttcaccatcagagacggtgaagtctattacaggagcaaatacctgagaagcgatacctacaacaccaatattgaggcaaacaggattgtggtgtctgagtttggaacaatggcctatccggacccctgcaaaaacatattttccaaagctttctcctacttgtctcacaccatccccgatttcaccgacaactgcctgatcaacatcatgaagtgcggagaagacttctacgcgacctcagagaccaattacatcaggaaaatcaacccacagactctggaaaccctggagaaggttgattatcgtaaatacgtggcggtaaatctggcaacgtcacatccccattatgatgaggctggaaatgttctaaacatgggcacatccattgtggaaaaggggaagacaaagtatgtgatttttaagatccctgccacagtaccagagggcaagaagcaggggaagagcccctggaagcacacagaggtgttctgctccatcccatcccgctccctgctctccccaagctactaccacagctttggagtcaccgagaactatgtcatcttccttgagcagcctttcaggttggatattctcaagatggcaaccgcatacatccggagaatgagctgggcctcctgcctggctttccacagggaggagaagacttatatccacatcatcgaccaaaggaccaggcagcctgtgcagaccaagttttacacagacgccatggtggtcttccatcacgtcaacgcctacgaagaggacggctgcatcgtgtttgacgtcattgcctacgaggacaacagcctctaccagctcttctacctggccaacctgaaccaggacttcaaggagaactccaggctcacctcggtccccaccctcaggaggtttgccgtgcccctccacgtggacaagaatgcagaagtgggcacaaatttaatcaaagtggcatctacaacagccacggccctgaaggaagaagatggccaagtctactgccagccggaatttctttatgaaggcttagagcttccacgggtcaattatgctcacaatggaaagcaataccgatatgtctttgctacaggagttcagtggagtccaatcccaaccaagataataaaatatgacattctcacaaagtcatccttaaaatggagagaggacgactgctggccagcggaacccctgtttgtgcccgcgccaggtgccaaggatgaggatgacggagtaatcttatcagccattgtctctactgatccccaaaagctgccttttctgctcattctggatgccaaaagctttacggaattggcccgtgcctctgttgatgtcgatatgcacatggatctccatggattattcattacagacatggactgggacacaaaaaagcaggccgcttctgaggaacagcgggacagggcttccgactgccacggggctcctctgacctgatggtgttggggtttgggtaggggaggggagctcggctgtcagaactccatggatatgtttctttggatggaggggagggcctttgttaccttttgcacttattctttctgtgggtgctttgacaagggcatggcaagagagcttgtcagtatcatttctttcattttattttggctgtaaaaattttgtttgaaagtcaaacatttgaacatcaaatatgtattgattagatccagtccttctaagaaacctcctttcctttaacaaaaagaccttgaccatgaatcagagattgtattcaatgacattatcatcatttttagaacgagccactaacctattagagaagaggcagataattatttatcattgtgccttcctctgtctctttctctttcctttgctccctcccatgtttctggtggactaaattgtgtatctgggagttctcactttctagccaggcctgatgagttaagttacatgaccaggaaggttatgccactttgtggtcattccatgcaagtcatggcgtaatataaaataataaaaactttaaagtctgaaaaaaaaaaaaaaaaaaa

SEQ ID NO: 23514 - DNA, 5826 bp, Homo Sapiens; identical to SEQ ID NO: 23512
  misc_feature (2472)..(2472): n is a, c, g, or t
  misc_feature (2568)..(2568): n is a, c, g, or t
  misc_feature (2587)..(2587): n is a, c, g, or t

SEQ ID NO: 23515 - DNA, 2857 bp, Homo Sapiens
aacagtattttccttttcaacacatctattgaaagtgttggataaatgcaggatgttaatatgctataaacataaagtctgtttttaaaaaatagcatttgaaaatcatgaagggctttttgttttcttttgtttgtatatatgtttattggtaacaggtgacactggaagcaatgaacaccacagtgatgcaaggcttcaacagatctgagcggtgccccagagacactcggatagtacagctggtattcccagccctctacacagtggttttcttgaccggcatcctgctgaatactttggctctgtgggtgtttgttcacatccccagctcctccaccttcatcatctacctcaaaaacactttggtggccgacttgataatgacactcatgcttcctttcaaaatcctctctgactcacacctggcaccctggcagctcagagcttttgtgtgtcgtttttcttcggtgatattttatgagaccatgtatgtgggcatcgtgctgttagggctcatagcctttgacagattcctcaagatcatcagacctttgagaaatatttttctaaaaaaacctgtttttgcaaaaacggtctcaatcttcatctggttctttttgttcttcatctccctgccaaatatgatcttgagcaacaaggaagcaacaccatcgtctgtgaaaaagtgtgcttccttaaaggggcctctggggctgaaatggcatcaaatggtaaataacatatgccagtttattttctggactgtttttatcctaatgcttgtgttttatgtggttattgcaaaaaaagtatatgattcttatagaaagtccaaaagtaaggacagaaaaaacaacaaaaagctggaaggcaaagtatttgttgtcgtggctgtcttctttgtgtgttttgctccatttcattttgccagagttccatatactcacagtcaaaccaacaataagactgactgtagactgcaaaatcaactgtttattgctaaagaaacaactctctttttggcagcaactaacatttgtatggatcccttaatatacatattcttatgtaaaaaattcacagaaaagctaccatgtatgcaagggagaaagaccacagcatcaagccaagaaaatcatagcagtcagacagacaacataaccttaggctgacaactgtacatagggttaacttctatttattgatgagacttccgtagataatgtggaaatcaaatttaaccaagaaaaaaagattggaacaaatgctctcttacattttattatcctggtgtacagaaaagattatataaaatttaaatccacatagatctattcataagctgaatgaaccattactaagagaatgcaacaggatacaaatggccactagaggtcattatttctttctttcttttttttttttttaatttcaagagcatttcactttaacattttggaaaagactaaggagaaacgtatatccctacaaacctcccctccaaacaccttctcacattcttttccacaattcacataacactactgcttttgtgccccttaaatgtagatatgtgctgaaagaaaaaaaaaacgcccaactcttgaagtccattgctgaaaactgcagccaggggttgaaagggatgcagacttgaagagtctgaggaactgaagtgggtcagcaagacctctgaaatcctgggtaaaggattttctccttacaattacaaacagcctctttcacattacaataatataccataggaggcacaagcaccattattaagccactttgcttacaccttaagtgtgtacaattcaagtgtgagaatgctgtgttaactattctttggaattctccttctgtccagcaaatactctaatgatggttaaacatggcacctactcagcaatgccttcctggaccacaacccctatccccctgccccaccctcctcattaaaaacaaatacttctactgtttgggtgtgtgatagggttctcaatgcagatctcccttttctagttagctatattcttgactgcatccgctaaaaatgttaaagcttcttgagagacagacatgccagattttcttggtatctcccataatacgacctacagtccatggtctacagatgttttaaatagaattgctattctcgatacatacaaagacgtaattgctgacccacaatcagtaacatccatattgggagatttttcaaaggatggtgaccctgcttgtatttatttaccttggtattttttcttgcatccttctgtgattcaaaaaagtaaaatgtggctttctgaaatgatggataagagtctacatcttctagaaaaaatacataaaggagtagttaagctctgtaaatgtgccacgagctccaacacgaccatcgtagggtgaagcccacgttttcttccatggcctcaaaggccctagaacttgcctacctttctggccttacctcctagctacttatccatctcttgaactttatactcttgtataaatttctaactttcagaaaatgccatactctgttttggcaccacacatgtatatttccccctggtacacttggaagactcttatccatctgtgaaaccctatgttgtcatcacttggtccatgaaatattacctggccaatatcccaccatcacctcaaacccaatcaccccctcctctgtatgctgtcacacctatattattaaacttatcacattgcattgtaattacttcctgacctttgtatctactcttttagtaactgatgtatatatctgaaaggagagattgtttcattgtgcaatcaataaatgtttgataaaataaagccc

SEQ ID NO: 23516 - DNA, 3002 bp, Homo Sapiens
gtggcttggtattcactggcaggtttcagacatttagatctttcttttaatgactaacaccatgcctatctgtggagaagctggcaacatgtcacacctggaaattgtttttcaacattaatactattatttggcagtaatccagattgcttttgccaccaacctgaagacatatagaggcagaaggacaggaataattctatttgtttcctgttttgaaacttccatctgtaaggctatcaaaaggagatgtgagagagggtattgagtctggcctgacaatgcagttcttaaaccaaaggtccattatgcttctcctctctgagaatcctgacttacctcaacaacggagacatggcacagtagccagcttggagacttctcagccaatgctctgagatcaagtcgaagacccaatatacagggttttgagctcatcttcatcattcatatgaggaaataagtggtaaaatccttggaaatacaatgagactcatcagaaacatttacatattttgtagtattgttatgacagcagagggtgatgctccagagctgccagaagaaagggaactgatgaccaactgctccaacatgtctctaagaaaggttcccgcagacttgaccccagccacaacgacactggatttatcctataacctcctttttcaactccagagttcagattttcattctgtctccaaactgagagttttgattctatgccataacagaattcaacagctggatctcaaaacctttgaattcaacaaggagttaagatatttagatttgtctaataacagactgaagagtgtaacttggtatttactggcaggtctcaggtatttagatctttcttttaatgactttgacaccatgcctatctgtgaggaagctggcaacatgtcacacctggaaatcctaggtttgagtggggcaaaaatacaaaaatcagatttccagaaaattgctcatctgcatctaaatactgtcttcttaggattcagaactcttcctcattatgaagaaggtagcctgcccatcttaaacacaacaaaactgcacattgttttaccaatggacacaaatttctgggttcttttgcgtgatggaatcaagacttcaaaaatattagaaatgacaaatatagatggcaaaagccaatttgtaagttatgaaatgcaacgaaatcttagtttagaaaatgctaagacatcggttctattgcttaataaagttgatttactctgggacgaccttttccttatcttacaatttgtttggcatacatcagtggaacactttcagatccgaaatgtgacttttggtggtaaggcttatcttgaccacaattcatttgactactcaaatactgtaatgagaactataaaattggagcatgtacatttcagagtgttttacattcaacaggataaaatctatttgcttttgaccaaaatggacatagaaaacctgacaatatcaaatgcacaaatgccacacatgcttttcccgaattatcctacgaaattccaatatttaaattttgccaataatatcttaacagacgagttgtttaaaagaactatccaactgcctcacttgaaaactctcattttgaatggcaataaactggagacactttctttagtaagttgctttgctaacaacacacccttggaacacttggatctgagtcaaaatctattacaacataaaaatgatgaaaattgctcatggccagaaactgtggtcaatatgaatctgtcatacaataaattgtctgattctgtcttcaggtgcttgcccaaaagtattcaaatacttgacctaaataataaccaaatccaaactgtacctaaagagactattcatctgatggccttacgagaactaaatattgcatttaattttctaactgatctccctggatgcagtcatttcagtagactttcagttctgaacattgaaatgaacttcattctcagcccatctctggattttgttcagagctgccaggaagttaaaactctaaatgcgggaagaaatccattccggtgtacctgtgaattaaaaaatttcattcagcttgaaacatattcagaggtcatgatggttggatggtcagattcatacacctgtgaataccctttaaacctaaggggaattaggttaaaagacgttcatctccacgaattatcttgcaacacagctctgttgattgtcaccattgtggttattatgctagttctggggttggctgtggccttctgctgtctccactttgatctgccctggtatctcaggatgctaggtcaatgcacacaaacatggcacagggttaggaaaacaacccaagaacaactcaagagaaatgtccgattccacgcatttatttcatacagtgaacatgattctctgtgggtgaagaatgaattgatccccaatctagagaaggaagatggttctatcttgatttgcctttatgaaagctactttgaccctggcaaaagcattagtgaaaatattgtaagcttcattgagaaaagctataagtccatctttgttttgtctcccaactttgtccagaatgagtggtgccattatgaattttactttgcccaccacaatctcttccatgaaaattctgatcatataattcttatcttactggaacccattccattctattgcattcccaccaggtatcataaactgaaagctctcctggaaaaaaaagcatacttggaatggcccaaggataggcgtaaatgtgggcttttctgggcaaaccttcgagctgctattaatgttaatgtattagccaccagagaaatgtatgaactgcagacattcacagagttaaatgaagagtctcgaggttctacaatctctctgatgagaacagattgtctataaaatcccacagtccttgggaagttggggaccacatacactgttgggatgtacattgatacaacctttatgatggcaatttg

SEQ ID NO: 23517 - DNA, 4756 bp, Homo Sapiens
gacggcgggagccgctgctctccggctgagggaatcagagacagctccgtccctagtggagcgcaggggaggcagaagtcatgacaggcgaggtgggttctgaggttcacctagaaatcaatgacccaaacgtcatttcacaagaggaagcagatagtccttcagatagtggacagggcagctatgaaacaattggacccttgagtgaaggagattcagatgaagagatatttgtaagtaagaagttgaaaaacaggaaggttctacaagacagtgattccgaaacagaggacacaaatgcctctccagagaaaactacctatgacagtgccgaggaggaaaataaagagaatttatatgctgggaaaaatacaaaaatcaaaaggatttacaaaactgtggcagacagtgatgaaagttacatggaaaagtctttgtatcaggaaaatcttgaagcgcaagtgaaaccttgcttagagctgagtcttcagtctggaaactctacagactttaccactgacagaaagagttccaaaaagcacatacatgataaagaaggaactgcaggaaaagcaaaagtaaaatcaaaaagaagacttgagaaagaggagagaaaaatggaaaaaattagacagctaaaaaagaaggaaacaaaaaaccaggaagatgatgtagaacagccatttaatgacagtggctgtcttcttgtggataaagacctttttgaaactgggttggaggatgaaaataactctccattggaagatgaagagtcattagaatcaataagagcagctgtaaaaaacaaagtaaaaaagcacaagaaaaaagaaccatctttggagagtggggtccattcatttgaggaaggaagtgagttatcaaaaggaaccacgaggaaggaaagaaaggcagccagattaagtaaagaagcattaaaacaactgcatagtgagactcagcgccttattcgagagtctgcactgaaccttccatatcatatgcctgagaataaaaccattcatgatttcttcaaacgtaaaccccggcccacttgccacggaaatgccatggcactattgaagtcatctaaatatcagtcaagccatcacaaagaaatcatagacactgcaaatactactgaaatgaacagtgatcaccatagtaaaggttctgagcagacaacaggtgcagaaaatgaagtggaaactaatgcactccctgtagtttcaaaggaaacccagatcattactggatcagatgagtcttgcaggaaggatttggtaaaaaatgaagagctagaaattcaggagaaacagaagcagagtgacattagaccttcacctggggacagctcagtgttgcaacaggaatccaacttcctcgggaacaatcacagtgaggaatgtcaggttggagggcttgtagcatttgaacctcatgccctggagggtgaaggcccccaaaatccagaagaaacagatgagaaagtggaagagcctgagcagcaaaataaatcatcagcagttgggccacctgaaaaagtgagacggtttactctggatagacttaagcaactgggagtagatgtttccattaaaccacggctaggtgctgatgaagattcctttgtgatacttgaacctgaaaccaacagagaactggaagccttgaagcagcgtttctggaagcatgctaatccagcagccaaacccagggctggtcagacagtgaatgtgaacgtcatagtgaaagacatgggcactgatggaaaggaagagctaaaagcagatgtggtacctgtgactttagcacctaagaagttggatggagcaagccacacaaaaccaggtgaaaagcttcaggtgttaaaagctaaactgcaagaagcaatgaaactccgaaggtttgaggagcgccagaagcgccaagcactgtttaaattagataatgaagatgggtctgaggaagaggaggaggaagaggaagaaatgacagatgagtctgaggaagatggagaagagaaggtagagaaagaagagaaagaggaagaactagaggaagaggaggggaaagaagaggaggaggaagaagaaggaaatcaggagactgcagaattccttcttagtagtgaagaaatagaaacaaaagatgaaaaagaaatggataaagaaaataatgatggcagtagtgaaattggcaaggcagttggcttcctctctgttcccaagtctctctcatcagattctactttacttctgtttaaggacagctcttccaagatgggttactctcctactgaagaaaaatcagaaacagatgaaaactcaggcaagcagcctagcaaactggatgaggatgattcatgttcattgctaacaaaggagagcagccacaatagcagctttgagctgattggctccacgattccatcctatcagccttgcaacagacaaacaggccgtgggaccagttttttccctacagcaggaggattcagatctccttcccctgggctatttcgagccagtttggtcagctcagcttctaagagttcagggaaactgtctgagccttcacttcccatagaggattcccaggatctgtataacgcctccccagagcctaagacacttttcctaggagcaggagacttccagttctgtttagaagatgacactcagagccaactgttggatgcagatgggttcttaaatgttagaaaccacaggaatcagtaccaagctttgaagcctcgattgccattggccagtatggatgagaatgccatggatgccaacatggatgagctgttggatttgtgtactggaaagttcacatctcaggctgaaaaacatctacccaggaagagtgacaagaaagagaacatggaggaacttctgaacctttgttcaggaaaattcacttctcaggatgcctccactccagcctcatcagagttaaataaacaggagaaggagagcagcatgggtgatccaatggaagaagcacttgctctttgctcaggctcttttcccacagacaaggaagaggaagacgaggaggaggaatttggagactttcggcttgtttcaaatgataatgagtttgatagtgatgaggatgaacacagtgactctggtaatgatctggcactggaagaccatgaagatgatgatgaagaagaactcctgaagcgatctgagaagttgaaaaggcaaatgaggttgaggaaatacctggaggatgaggcagaggtgtcaggaagtgatgtgggaagcgaagatgagtatgatggggaagaaattgatgaatatgaagaggacgtaattgatgaagtacttccttctgatgaggaactgcagagtcaaatcaagaaaatacacatgaaaactatgttggatgatgataagcgacagctacgtttataccaagagaggtaccttgctgatggggatctgcacagcgatggtcctgggcgaatgaggaagtttcgatggaaaaacatagatgatgcttcccagatggacttgttccacagagactctgatgatgatcagactgaagaacagcttgatgagtcagaagccaggtggaggaaggagcgaattgaacgagagcagtggcttcgggacatggcacagcaggggaaaattacagctgaagaagaagaagaaattggggaggacagtcagtttatgatactggccaagaaagttacagccaaagcactgcagaagaatgccagtcgccctatggttattcaggaatcaaagtctttgctcagaaatccttttgaagccatcagaccaggaagtgctcaacaggtgaagacaggctcactgctaaaccagcccaaagctgtgcttcagaaactggctgctctctctgaccataaccccagtgctcctcgaaattcaagaaactttgtctttcatacactttctcctgtcaaggctgaggcggcaaaggaatcgtctaagtctcagaagatcccagagaaggactctgactggctcacctggagtggagctcctatccctggattcttcaggctttcatttgacccacatggttaagctgggagagacagagtccaaagagaggcggagaagggctattctgggcagaacaaacaattgatgactttatggctctgtggtctgggcagaactgcataaccctagatcaccaaagctgagagcctttaggagtgaggatttgggccgggcatggtggctcacgcctgtaatcccagcactttgggaggccgaggtgggtggatcacaaggtcaggagatcaagaccaacctgaccaacatggtgaggccccatctctactaaaaatacaaaaattagctgacgtgatgcatgcacctgtaatcccagctactcgggaggctgaggcgggagaatcgcttgaacccgggaggttggaggttgcggtgggccgagattgcgccactgcactccagcctgggcgacagagcgggactccatctcaaaaaaaaaaaaaaaaaagtgaggatttgggtcaccccaggctgaaggccaggggaacctgaatgataagggaagggaaaacttaggccacagtctgattagaaatggggctgaattccaccctgtttttcctttactggagattcaatttgaattactctgcctcccttcttattccttttcccttttaaaatagtcatcataatcataaaaatttcttttccaaaaaaaaaaaaaaaaaaaaaaaaaaaaa

SEQ ID NO: 23518 - DNA, 4272 bp, Homo Sapiens
gtagttcctaatcccctttccgggcagccgccggggctcggggctgtgagcggccgtgaggctgcctccccgggccccctgcctccgccatgttccgcagggcacgccttagcgtgaagccgaatgtcaggcctggtgtaggcgccaggggctccacagcttccaatccccagcgtggacgggagtctcccaggccgccggagcctgccacggactctgcttccaagcccgcggagcccacagatgtgcccacggtcgatttcggtggagcggagccccaagaaaaggctcctaggagcagtactgaaaagactggtggtgacaatgatgttgaagaatccagtagatcttcctctactgtttcacagagaagaaagcgaatatcaagtacttctagcctggttaagtctagtgtcagtgttccttcagaatctcatcccttatctacaattaatcaagaggctccacagccaactgccacttcaacaaaagagaaacagccatgctcagacagataccgaatatacaaagcccagaaactgagggaaatgttaaaagaagaattgagaaaagagaagaaacaatggaaaaacaaatatgctataaatgaaagtcagaggccaccagatcgttcaaaaatgactatgagagacttcatatattatctaccagataataatccaatgacttcttcactggaacaagaaaagaaaactgaaaagccatcgactccagtccagacaagagagcaagaaggtaagagtactcctaatgctgaagataatggaatggaagaagagacagatgatgggccattactggttcctcgagtaaaagtggcagaagatggttccattattttggatgaagaaagtttaactgtagaagttttaagaacaaaaggcccttgtgttgttgaagaaaatgaccccatatttgagcgcggttctacaactacatactccagctttaggaaaaactattactctaaaccatggtcaaataaagaaacagatatgttttttttagccatcagcatggtaggaactgacttttctatgatcggacaactttttcctcacagagcaaggatagaaattaagaataaatttaaacgggaagagaaaacaaatggatggagaatagacaaagcattccaggaaaagcgcccttttgacttcgatttttttgctcatttgcttcagaaagttcttgctgaagaagagaaaagaaaacaaaaatctgttaaaaatcacagtttaaaggagaagaaatccaccaaaccacggaaaaatgtaaaagtgaaaaaagttgcctgtgaaggagtgaataatgatccagatgagtctatgagttctagaatttcagacacggaaagatctcagaaggatgctcagacagttgaagaagagtctctgaccttatcaagggaggatgcagagcaggttgcattagaagtagacctaaatcaaaagaaaagaaggaggaagaagcaagatggagctaatgaactgggagtaaacaatcttttagaaaatgccactgttcaggcgggtccttctaaaggagaaaaacacaagaataaatgtcaggctataaggccagagctaaaggaaggtgaatgcagtaaggagcagatgctttcctgcacacaaaacatagatggcattgtgggttttgcctccactgaaaaagttgagaaaagaactgaccccatcctttcattaagtaatcaacaagatgccacatcagtagcaactgagtcttcagaatcaagcacttcagatttgccttcattcgaagttggaattagagcattgtgtgaggtgaataatgctgagggtagttgtatagaagaaagaaatgttgacctaaaaaataattcactggaaattgatcaaacagaaaatgttaaaccaatgttgagaggtcgcttccaaagacctaaacccaatttgtcaagggctgggaagaaatcagttctttcrcaaggcaaaacagagtcagagagcaagaattcacattcaaaaacttcagttgaaaagaaccacgtggaaaaagataaaatgaatacattggacattttgagaatggagactacagagagagagaatccagaagctgaaactgtatctgttttgggtgaaaaaaattgtctgcaggaagggagtcaactaaaggctttaagacctgtacaagtgaggggccgattgcaaaagccaaagccaaatgcaggtaaagctgctgaaagaaaagaaattctcatatcacaggaagaaattggggccaatgtagagaagaatgaaaatgaatcctgtgctgatagagatactcctcaacacatggaagatcaatcgcgtaaagattttgaagaggaagatgtcatattacagcctgagaaaaatgattcttttcaaaatgtgcagccagatgagcccaaggttcttaatgaatgtctaagcgttcaagagaataataaggcaaataaacttaaccaagtcccaattctaaggactcgatttcagaaaccaaagccaaatataggaagaggaactggaaggagagaaatttcctcaaaggaagaggtactagagaagattcttgtctctggggaaatggcggcagcattgagagaaactgtaagactagacacctcaccaaaggagatggtaccagcagagattaatactaaagaaatgcagtcagatttaaaagaaactggaagaagagccatttctcccagggagaagattctagatgtgattgatgacaccatagaaatggagacaggtctgaaagcaatgggaagagagatttgtctaagggagaagacgccagaggtgattgatgccactgaggaaatagacaaagatttggaagaagctggaaggagagaaatatccccacagaaaaatggcccagaggaggttaagcctctaggtgaagtggagacagatttgaaagcaactggaaatgagagttccccaagggagaagacaccagaggtgactgatgccactgaggaaatagacaaaaatttggaagaaactggaagaagaaaaatatccccaagggaaaatggcccagaggaggtcaagcctgtagatgaaatggggacagatttgaacgcaactggaagagagagttctccaagggagaagacaccagaggtgattgatgctactgaggaaatagatttggaagaaactgaaagagaagtatccccacaggaaaatggactagaggaggtcaagcctctaggtgaaatggagacggatttgaaagcaactggaagagacagtttcccaagggggaagacaccagaggtgattgatgccattgaggaaatagagatagatttggaagaaactgaaagagaaatatccccacaggaaaatggcctagaggaggttaagcctctaggcgaaatgcaaacagatttgaaagcaaccggaagggagatttccccaagggagaagacaccagaggtgattgatgccactgaggaaatagacaaagatctggaagaaactggaagaagagaaatatccccagaggaaaatggcccagaggaggtcaagcctgtagatgaaatggagacagacttgaaaacaactggaagagagggttcctcaagggagaagacacgagaggtgattgatgctgctgaggtaatagagacagatttggaagaaactgaaagagaaatatcgccacaggaaaatggcccagaggaggtcaagcctgtaggtaaaatggagacagatttgaaagaaattagagaagaaatttcccaaagggaaaaggtgctagcagagttcagtgctataagggaaaaggagattgatttgaaagaaactggaaaaagagacattcccatcatggagaaagtatcaggaaagatggctgttgttgaagaaatggaggcagatttgaaagaaactggaaaagaaaattttagagagagaggatctgaagagatctgtgttactgaggagaaggtggcagaattgaaacaaactggaaaaacagacatttctccaagggaaaacgagctagaggagaccagtacctcaagacaaactgacacacatttaatgcagagcggtagcaatgacttcagtgctatgccttcactagatattcaggtatgtatttttctgtcctttaaaagttttttgaatgctttttcagaggaaataaataattccatgattattttgtccttaagtccaacaacacttaaaaatctctaaaagtctaaagtctttt

SEQ ID NO: 23519 - DNA, 3113 bp, Homo Sapiens
ccggaatgaaaacaaacggcggccgctgccgcatccgggcactctgctggtcgcggcgggagtggcgtggcgcagggatggcacaaaagaaatatcttcaagcaaaattgacccagtttttaagggaagacaggattcaactttggaaacctccatatacagatgaaaataaaaaagttggtttggcattaaaggaccttgctaagcagtactctgacagactagaatgctgtgaaaatgaagtagaaaaggtaatagaagaaatacgttgcaaggcaattgagcgtggaacaggaaatgacaattatagaacaacgggaattgctacaatcgaggtgtttttaccaccaagactaaaaaaagataggaaaaacttgttggagacccgattgcacatcactggcagagaactgaggtccaaaatagctgaaacctttggacttcaagaaaattatatcaaaattgtcataaataagaagcaactacaactagggaaaacccttgaagaacaaggcgtggctcacaatgtgaaagcgatggtgcttgaactaaaacaatctgaagaggacgcgaggaaaaacttccagttagaggaagaggagcaaaatgaggccaaactcaaagaaaaacaaattcagaggaccaagagaggactagaaatactggcaaagagagcagcagagacagtggtggatccagaaatgacaccgtacttagacatagctaaccagacaggcagatcaatcagaattcccccatcagaaagaaaagcccttatgttagctatgggatatcatgagaagggcagagctttcctgaaaagaaaagaatatggaatagccttgccatgtctgttggacgctgacaaatatttctgtgagtgttgcagagagctgctggacacagtggataactatgccgtcctccagctggatatagtgtggtgttacttccgcctggaacagctggaatgccttgatgatgcagaaaaaaaattaaacttggcccagaaatgctttaaaaattgttacggagaaaatcatcagagactggtccacataaaaggaaattgtgggaaagagaaggtactgtttctaagactctacttacttcaagggatccgaaactatcacagtggaaatgatgtagaggcttatgagtatcttaacaaggcacgtcagctctttaaagagctatatattgatccatcaaaagtggacaatttgttgcagttggggtttactgcccaggaagcccggcttggcctgagggcgtgtgatgggaacgtggatcatgcggccactcatattaccaaccgcagagaggaactggcccaaataaggaaggaggaaaaagagaagaaaagacgccgcctcgagaacatcaggtttctgaaagggatgggctactccacgcacgcggcccagcagattctgctcagcaatcctcagatgtggtggttaaatgattccaatcctgaaaccgacaaccgtcaagaaagtccttcccaggaaaacattgaccgattggtgtacatgggttttgatgcactcgtggccgaagctgcgctgagagtgttcagaggcaacgtccagctggccgcccagacccttgctcacaacggaggaagcctgcctcccgagctgccgctgtcgccagaagactctttgtccccgccagccacgtccccttctgactccgcaggaacctctagtgcctcaacagacgaagacatggagacagaggccgtcaatgagatactggaagacattccagagcatgaggaagactatcttgactcaactctggaagatgaagaaattattattgcagagtacctatcctatgtagaaaataggaagtcagcaacaaagaaaaactaaataatgaacagaaatagcgctaattttctgcttataaatgctatcattatgaaaaggctaatgcagctctttctgttcttactttttatctgaattacaagtcctctttgggtgtaggagggggtgggcaggggacaagtccaggaggggtcccagggccttcatgcatggtctcggggaagaagcttcctctggcctggcgcaggccgttccatctgcctcccaggtctgcgtcccataaccctttccccagcttggtgttttaccccgaaacaggaaggaacaggggtcctgtagaacaggggtcctggggaaggtgtccagggcagggtcctgggaagggtgtcccgactgcttcctctccagctgtggctccatctgcccagcttgcctgcctcctgcacccactgccctgaccttcctgcttcccacgctgccatctctgccagggtgccacatgggttcctgtgccaccctttccccgcccctcaaatcgtcctttaagtcttccttccaagtgctgtggggcataacgatgaggcgctggccttgggggccacaccaggtcgcagcaaatggcttcagcctgggacgccagtgttttatgctcttagttcagtaaaatacgcccccgaaattcaagattgagtgtcaggctttatatatattcagcattcctcattacagaaatcttctattgaatgggaaaggtttaaatgctaaccaaagcaatttatttttaattaatatttttagactctgtgctgtcatactgaactcactgctagctaagagacctatcagagatttagatatattttctccaggttttttgtgggttttctttgttgttgttgttgttctagccatgtgacagaggctctttctaaaagtatgtagttcgctgtgtgtcggctccagcagtaaccgtcctcactgcgccacgcactcctctgtagatgtgtgcccagtgggagttccttccagccccaggaccgcagcagcagccaggtgccgagtggattgagtgccaggtgcatccaagactttccctcccttccagaaggcactgactgaagacaggatggatcatgcggagccggctgaaatgctccaactttttcaaagtgtgggtggtccagtttggactgatgggaatcttcttgtcattctttttaaacggatgataccgatggaaataaaaggtgggaaatatattcaaaaaaaaaa

SEQ ID NO: 23520 - DNA, 1483 bp, Homo Sapiens
ctgggggcgtggctgcgcgatgtaatcggtctctggacgctgcgcggcgctcctaggagcaggcgttcccgactccggcaagagggtggcgcctggactctcgccctcagagggaggcccgtcccacggtctgtggctacggatcccaggaccctcttcgcgggcgattcgcgtagcctcaggtaactgcatcctgcccagcatgacggccccctgcccgccgccacctccagacccccagtttgtcctccgaggcacccagtcaccggtgcatgcgctgcacttctgcgaaggagcccaggctcaggggcgcccgctcctcttctcagggtctcagagtggcctggtacacatctggagcctgcagacgcggagagcggttaccaccctggatggccacggcggccagtgtgtgacctggctgcagacgctgccccaggggcgccagctcctcagtcagggccgggacctgaagctgtgcctgtgggacctcgcggagggcaggagcgctgtcgtggactccgtgtgcttggagagtgtgggcttctgccggagcagcatcctggccgggggccagccacgctggacgcttgccgtgccagggaggggcagcgacgaggttcagattctggagatgccctccaagacgtcagtgtgcgccctgaagccgaaggcagatgccaagctgggcatgcccatgtgcctgcggctgtggcaggccgactgcagctcccgcccactccttctggccggctatgaggatggatcggtggtcctgtgggacgtctctgagcagaaggtgtgcagccgcatcgcctgccatgaggagcccgtcatggaccttgactttgactcccagaaggccaggggcatctcaggctccgcggggaaggcgctggctgtctggagcctggactggcagcaggccctgcaggtgcgtgggactcatgaactcaccaatcccgggatcgccgaggtcacgatccggccagatcgcaagatcctggccaccgcaggctgggaccaccgcatccgcgtgttccactggcggacgatgcagccactggccgtgctggccttccacagcgccgctgtccagtgcgtggccttcaccgccgatggcttgctggccgcgggctccaaggatcagcggatcagcctctggtcactctacccacgcgcatgactcacccactcccttcccgggagacgaggagggcgggcagggaggtgggcatcaggccccagccttggcctgaaacctcaagggcctctgaggaccagcaagtcatggcccaaggaccatggagtccccgctgtcttcatgaggttggtatttccttttgtggagtgcctcatcacaggacggtgactctgggggccagccagagccctggccgtccgaggcctgcaggagacgttggcttgggcctgctgtgttgccagctgagggtattttataataaatttccattgccaagtt

SEQ ID NO: 23521 - DNA, 1398 bp, Homo Sapiens
agccaccatcgaggaaggggcatgtgctggacgcggacacatgatccgagggaccctgctgggtggaactaagaaagtccagcagactgtgcacgctcctgtccccactcacaggcccacgcagcgaggggggcccctcttctgtgtgcgtctggaaggtcgctgcccagggaggaaatgcctttaaccggcgtggggccgggcagctgcaggaggcagatcatccgggctctgtgcctcttgctacttctcctccacgccggctctgccaagaatatctggaaacgggcattgcctgcgaggctggccgagaaatcccgtgccgaggaggcgggcgcgcccggcggcccccggcagccccgagcagaccgctgcccgccgcctccgcggacgctgccccccggcgcctgccaggccgcgcgctgtcaggcggactccgagtgcccgcggcaccggcgctgctgctacaacggatgcgcctacgcctgcctagaagctgtgccgcccccgccagtcttagactggctggtgcagccgaaacctcgatggcttggtggcaatggctggctcctggatggccctgaggaggtgttacaagcagaggcgtgcagcaccacggaggatggggccgaacccctgctctgtccctcgggctatgagtgccacatccttgagcccaggtgacgtggccgaagggtatccccaaccgtgggcagtgcgtcaagcagcgccggcaagcagatgggcgaatcctacgacacaaactttacaaagaatatccagaaggtgactcaaagaatgtggcagaacctggaaggggacaacagaagcactttcagtaaagcaacggcaagcagctaggttgcaagaacattcctctactttctgctaagccttggaaacagttgggaaaagtagtttgaccctcacagttcacattcagctcagcagagcaagaccccagagatgcttagagacaggacacctggccatcaaacccagtttggcccagcctggttgggtgactttgtgggagccacttaacagctctgggtccctgttttaccatcctgggagcaaggccctgcagctccacgagacctttaccccgggaagaagccgccacccatgaaagcatttctgaagcccctttctaagacaaggctcagcatcttgatatttttgacagattcctcccaagtctggctctgggaggtatgtacccatctcaaatgttcccaagataaattcatccttcaggaaatggaaatgaacttgcttactaatgtgtgattcctagttgtagccaccggatgtgctgaggcctaaatgttagcaggtgggaggaggccacagaacaataaaaacaaccaaataagaaaaaaaaaaaaaaaaaaa

SEQ ID NO: 23522 - DNA, 4253 bp, Homo Sapiens
tcagacatggcggcggatctaaacctggagtggatctccctgccccggtcctggacttacgggatcaccaggggcggccgagtcttcttcatcaacgaggaggccaagagcaccacctggctgcaccccgtcaccggcgaggcggtggtcaccggacaccggcggcagagcacagatttgcctactggctgggaagaagcatatacttttgaaggtgcaagatactatataaaccataatgaaaggaaagtgacctgcaaacatccagtcacaggacaaccatcacaggacaattgtatttttgtagtgaatgaacagactgttgcaaccatgacatctgaagaaaagaaggaacggccaataagtatgataaatgaagcttctaactataacgtgacttcagattatgcagtgcatccaatgagccctgtaggcagaacttcacgagcttcaaaaaaagttcataattttggaaagaggtcaaattcaattaaaaggaatcctaatgcaccggttgtcagacgaggttggctttataaacaggacagtactggcatgaaattgtggaagaaacgctggtttgtgctttctgacctttgcctcttttattatagagatgagaaagaagagggtatcctgggaagcatactgttacctagttttcagatagctttgcttacctctgaagatcacattaatcgcaaatatgcttttaaggcagcccatccaaacatgcggacctattatttctgcactgatacaggaaaggaaatggagttgtggatgaaagccatgttagatgctgccctagtacagacagaacctgtgaaaagagtggacaagattacatctgaaaatgcaccaactaaagaaaccaataacattcccaaccatagagtgctaattaaaccagagatccaaaacaatcaaaaaaacaaggaaatgagcaaaattgaagaaaaaaaggcattagaagctgaaaaatatggatttcagaaggatggtcaagatagacccttaacaaaaattaatagtgtaaagctgaattctctgccatctgaatatgagagtgggtcagcatgccctgctcagactgtgcactacagaccaatcaacttgagcagttcagagaacaaaatagtcaatgttagcctggcagatcttagaggtggaaatcgccccaatacagggcccttatacacagaggccgatcgagtcatacagagaacaaattcaatgcagcagttggaacagtggattaaaatccagaaggggaggggtcatgaagaagaaaccaggggagtaatttcttaccaaacattaccaagaaatatgccaagtcacagagcccagattatggcccgctaccctgaaggttatagaacactcccaagaaacagcaagacaaggcctgaaagtatctgcagtgtaaccccttccactcatgacaagacattaggacccggagcggaggagaaacggaggtccatgagagatgacacaatgtggcagctctacgaatggcagcagcgtcagttttataacaaacagagcaccctccctcgacacagtactttgagtagtcccaaaaccatggtaaatatttctgaccagacaatgcactctattcccacatcaccttcccacgggtcaatagctgcttatcagggatactcccctcaacgaacttacagatcggaagtgtcttcaccaattcagagaggagatgtgacaatagaccgcagacacagggcccatcaccctaagcatgtctatgtgcctgacagaaggtcagtgccagctggcctgactttacagtctgttagtccccagagcctccaagggaaaacgctgtcacaagatgaaggtagaggcacattatacaaatacagacctgaagaagtagatattgatgccaagttaagccgattatgtgaacaagataaagtggtgcatgctctggaagagaaacttcagcaactccacaaggagaaatacacgcttgagcaagctttgctatcagccagccaagagatagaaatgcatgcagataacccagcagccattcagacagtggtgttacaaagggatgatttacaaaatggactgcttagtacgtgtcgagaactttctcgagccactgccgaattggaacgagcatggagagaatatgataagttagaatacgatgtaactgttaccaggaaccagatgcaagagcagctggatcaccttggtgaagttcagacggaatcagcaggaattcagcgtgcacagattcagaaagaactttggcgaattcaggatgtcatggaagggctgagtaaacataagcagcaaagaggtactacagaaataggtatgataggatcaaagcctttctcaacagttaagtacaaaaatgagggtccagattatagactctacaagagtgaaccagagttaacaacagtggcagaagttgatgaatctaatggagaagaaaaatcagaacctgtttcagagatagaaacttcagttgttaaaggttcccactttcctgttggagtagtccctccaagagcaaaatcaccaacacccgaatcttcgacaatagcttcctatgtaaccttgaggaaaactaagaagatgatggatctaagaacggaaagaccaagaagtgcagtggaacagctctgtttggctgaaagtactcgaccaaggatgactgtggaagagcaaatggaaagaataagaagacatcaacaagcgtgcctgagggagaagaaaaaagggttaaatgttatcggtgcttcagaccagtcacccttacaaagcccttcaaatttaagggataatccatttaggactactcagactcgaaggagggatgataaggaactggacactgccattagagaaaatgatgtaaagccagaccatgaaactcctgcaacagaaattgttcaactaaaagaaaccgaaccccaaaatgtggacttcagcaaagagttaaaaaaaactgaaaacatttcatatgaaatgctttttgaacctgagccaaatggagtaaattctgtggaaatgatggataaagaaagaaacaaagacaaaatgcctgaggatgttacattcagccctcaagatgaaacacagaccgcaaatcataaaccagaagagcatcctgaagaaaatacaaagaacagtgttgacgaacaggaagaaactgttatttcttacgaatcaactcctgaggtttctagaggaaatcaaacaatggcagtgaaaagtctgtccccatctcctgagtcctcggcatcgccagttccatccactcagccgcagctcacagaaggatcacatttcatgtgtgtgtagtcttagaagaactatactgacttctgttgaaaccattcaaagctaaagacatggaccttcagcagtgtaagaagatattgtacagtatattttaaatctatgaaattcatagttctgatgcttttggtcacagagcatcattttatcacttctggaaaatgtttattccaaaacagctttaatggcccatatgtacacttcgtaatctcaaggttattattctgacaccagcttgctgctatgatttcagagcacataagtaaaggtgctttttaatgtgcagtctatttccagagcttacttagttgctgatttccagatttcgatgtttcttaagtctaggtgaatttatatatatatttttttgcttttcattttctaaagttagttattatttccattgaagcttgttttctttttttcttcccattttagctactgcagtgcttttgtttcacacttgatttgtaaaaattttatatatatgtatttaaaatgtgccattttattgctaagtgaagtatgtcctgttttctgctataattctttctcggtcagattgcaatgtcagcagttactgccacactcctgtcagcttaaacacaaatgttactgcttatcttttcttaaaaaaaaaaaaaacaaagtgtaggtattttgaagtactgggcttatatttcattggaatacatgtgtacagcaataagcaggtttccaaatccggtacttagtttgtgtacaaatgtaattatgttcattgtgtatatattatacaatgagcacatgtaatgtattaaaggctacttactattgtttaaatgcaaatgttcatatctcatttctttttttatcatgttaaataaatgttgatgttcttaaaaaaaaaaaaaaaaaaa

SEQ ID NO: 23523 - DNA, 5597 bp, Homo Sapiens
cagccacgacggagcagcagcgggactggccgccccgcgcccccttcgccgccgtgcccttccccggcgcgctcaccccgttctcgggatgggattgtagcggcggcgcggactcggcggggatcgcggcggaggcggcggcgtcggcggcggcgtcggcggccgagcggggctccatgttttcccctggccaggaggaacactgcgcccccaataaggagccagtgaaatacggggagctggtggtgctcgggtacaatggtgctttacccaatggagatagaggacggaggaaaagtagatttgccctctacaagcggcccaaggcaaatggtgtcaaacccagcaccgtccatgtgatatccacgccccaggcatccaaggctatcagctgcaaaggtcaacacagtatatcctacactttgtcaaggaatcagactgtggtggtggagtacacacatgataaggatacggatatgtttcaggtgggcagatcaacagaaagccctatcgacttcgttgtcacagacacgatttctggcagccagaacacggacgaagcccagatcacacagagcaccatatccaggttcgcctgcaggatcgtgtgcgacaggaatgaaccttacacagcacggatattcgccgccggatttgactcttccaaaaacatatttcttggagaaaaggcagcaaagtggaaaaaccccgacggccacatggatgggctcactactaatggcgtcctggtgatgcatccacgagggggcttcaccgaggagtcccagcccggggtctggcgcgagatctctgtctgtggagatgtgtacaccttgcgagaaaccaggtcggcccagcaacgaggaaagctggtggaaagtgagaccaacgtcctgcaggacggctccctcattgacctgtgtggggccactctcctctggagaacagcagatgggctttttcatactccaactcagaagcacatagaagccctccggcaggagattaacgccgcccggcctcagtgtcctgtggggctcaacaccctggccttccccagcatcaacaggaaagaggtggtggaggagaagcagccctgggcatatctcagttgtggccacgtgcacgggtaccacaactggggccatcggagtgacacggaggccaacgagagggagtgtcccatgtgcaggactgtgggcccctatgtgcctctctggcttggctgtgaggcaggattttatgtagacgcaggaccgccaactcatgctttcactccctgtggacacgtgtgctcggagaagtctgcaaaatactggtctcagatcccgttgcctcatggaactcatgcatttcacgctgcttgccctttctgtgctacacagctggttggggagcaaaactgcatcaaattaattttccaaggtccaattgactgacgcccttgacagccatctacgactttattaacaggttactgtgaagattttgccactaactctagattttacctttttgtaatgctgtttatcagaggagggtgacaggggctggaaataaagagaggggacatggtgatgaaacatggcaggagtgtaacagataccagtggtgtgttgcatgctcaaaacagcagcgtcgtcattgaagtctgcttgatccaaccataatatctttgtaataattggatttaaaatgctatgcttctatttttaaccttgggtttttaaccaagtttttttttttttttgtaatcttggacaagactttaaatcatattttacagatgtagaagaaatttattcaaaagtgtgggctcatgaagttcacttcagtgcagtgtggtgtaggtgttacgcgaagggcgcacagtgtctagaaatacttgatcgtggctcaaacctgaccagacagcagaggggcggctctgtacagtgtgactggtggacagatggccttaggcacaggtggttttgaaatctggggctttttctgatttatttttctgacttgttgggggagagaatattcataacttgtgggctttttttttttttaacttcagtggaatttactttagatattcattcatcaaatacatgggacttcacaaacaattttccataactttttagcctgtcttttgttatttctgcctaatatgatttgccccgatactcatcttgcacggccagaactgtttggttgattaaaatacatcagctcttaaaaactcattaactgagggtaattacagtagtagacatggtctgggtactatactaccatgtttatttgctgactgaattaagatttaagaatgattaaaaataagcttttactttttaaaaccacttgaggtttcataaagcttggggtttttttttttcctttgttaagaaagccaaccaatcacaatgatatagtcattgttgtgcactcccttttcaccatctgtcaccttcccttgcagcttaaggagcccagtaagttttgaaaatgtttgcgaatcaaactaaatttaagtgggatgattagatatacacaacaccaagtggtacatctgcagagataattcaaaattcctgcttttgagagagcaaatgagtgtttgctgaggaataattaaatgagaatttcataggagctccaccattcctgttactttcatttcattttgattaataattcttggatgcttggcatcgatcgtatcactgctcctagaaggtaaagatcctttaggacatgagactggtagaagctggctgagataaaataagtatttatttaaactaatgttctcttaatttgaccattgcagatttgggtgacttttttttaacctttgtacatatacgtaatttatatgattctaatgtactatatccatacttgaattggttttttcgtattttgcctactggcaaatattttgcctattttcagtcgttctaacctatttgaatacgcttttccttaaagtgatacgataatattactcttgattgctgctgcttaatttgatgtaatatgtttaaagttcagcctctcagttttaatatagctttatttttcagtggagatcattgtttaggatgagacatttttggttttggttttgtttgggtaaattttaaatggtgtgaaaatcgatgacaacagtcctcttacagatagcttgctgtattctgtatagcttactctacctgcagacagaaaatgaaagaaaaaaatggacttgcctagaataatatattgaatgccttttgatttagccagagtctctgatgattagctttcgctgatagagtatgtcttttcagcctgtaattctttgggccccaaagaatgacaaaggaggcactcgttctcttttcttgctgtatgcctagaaagtggttgaaggattcttgatgccctaaaaccatcttgtaagctaaatggtcttgcatccagaaaggccagattttacctaccaagaaaaaaagatatttttccagagagttaggtatatcataattttccatttcaagtcctgtttataagtctagtcattctgcaacgtgacatatcccccaaaatgaagttaccttccaagttggacacgtcccgtagttgggcatatgtctaactaaaagtttctgacttttagtaaattcagcttaaatataagttgaaatttgggaaataatttccaagctcttggaaggggtaacagtgaaccgccctccatgggctccacatcttttcctttggcttccaaagtcaggtcccgcccaccctgcctaaggaactgcagagaggtggcaaatcagcaaaaaggacaccaggctcttcttggccacttgtaggaagatccctttacaattttgactaaggagattttttttttcacagttgagttagtttgtgaaaataaagaactctgtagctcaccaaggtggagaaacgcaattcagaaaagtaatttctccaaggtcacttctttttttatgtcttgccatcactttaaaggactagccccactcccccatgtgtatacacaaggaaattgcagaccaattagttgtcttggcctgactctaatgccttttgcaagtagctttccagaagtaaaagtcccagtgatgtattcccatagaaatatttttcagttgtttatgtcgtttactacaaaaaaaaagattcagagtggatggagtacaactctgagtatttttctagtccggaattttttattaataatcggtgctgccgggtcatgcatgctgcaactctcaacatttcccttatttggttcagcttttagcaaaaagggctacagttcaccctgcagagtattaaggtttctggatttttttctcccaactgtggcccaaaagaattaaaatctgttaatataaatagagaacatatttatcattcctcgatagttaattatagactttggtacctttgtgcctcagggaagccacgtgatataactggttatagaatttcagggttagggtttaaagaaaggagaaagccattggaaaaatgatgggctccattaaggagactaatgaatctggatgcagaaatatgtcagaaactggcataaacatgattgtagtagaatttattttccagtaccaatagggaaattattttaagttattacatttactgtattgggaaacttgaggagaactctttagttcataaagcttcaatgtctttttttttttttttcatggaaaaactcaaacctctgttatttgggagctcagtattgtgtggacacttacgagagttttctgcttaattgaagtgtaatataggttgtagaattgttacctgcagttctatggttttgtttcacttcttttcttttttaaagccattctgttctttggatgtgcttgaaagggtgtgtgattacaccattgttaatgctgggtaaaaactatcttcttgcagccttgcctcataacagtggaatttctgatagacaaaccacaggactttgattttaagccaaatccatctccatccctttactgtcaatcttctgtcccagtagtttagcctttgtggcttaggttatgatgcgcctccttctgtgcgaccaatgagacgacttcagcatctttttaaaataatctaagcatcattgaagcagtaacacaaaaaaaaggttcagtattttctttttagtataacttacatcctttcaaataagtctttgccctcatgaagaatccctagaggaagataaggaaaataagtattttccagttttgcttgacagtttctaaacaaacaaaaataaactcaatgaaaggaaagatgtttctttttagctgagatgacagattgcttctctgtattaaatagtctagaagttaaggggatggtcacatttaccatgtattgtgttattagcagttaaattttatgaatatgtttgtaaaattgttgttttatatttcatgtcaaattgaaaagtttatttcttcactattgtacctgtggaaatacaagccattttacaggaaaaaatcttcaaaaactattaaatggatatcagcctgaaaaaaaaaaaaaaaaag

SEQ ID NO: 23524 - DNA, 3997 bp, Homo Sapiens
tttaaagaagagtattgaattttatttttaatgttacataaggtggtaaaatactggtgctatgatccaaaaggtgacagtactctccaaatctcagtttctactagttgtttacattttcatatgttgtttacattttcatattttgcaatattgaatgttaaatgttgagtggaaagagaagatccaaatacatgaatatagtctttatttgaatggttgagaaatggacaaatattatcatacttgcaagtttcttaagaacttgtggcattggctctttttttccagttacaatttcttctaacaagtctaccaatcatgaaaggaaatcgacactgacccctacccagagggaaagtatcccagcgaagtctccagtgcctggggtggaccctgtcgtgagccacagtccgtttgatccccatcacagaggcagcactgcaggcgaggtttatcggagccacctgcccacgcacttggatccagccatgccttttcacagggctttggatcctgcggctgcttacctgtttcagagacagctttcaccaactccaggttacccaagtcagtatcagctttacgcaatggagaacacaagacagacaatcttaaatgattacattacctcacaacagatgcaagtgaacttgcgtccagatgtggccagaggactctccccaagagagcagccactgggtctcccatacccagcaacgagaggaatcattgacctgaccaatatgcctccaacaattttagtgcctcatccagggggaacaagcactcctcccatggacagaatcacttatattcctggtacacagattactttccctcccaggccgtacaactctgcttccatgtctccaggacacccaacacaccttgcagctgctgcaagtgctgagagggaacgggaacgggagcgggagaaggagcgggagcgggaacggattgctgcagcttcctccgacctctacctgcggccaggctcagaacagcctggccgacctggcagtcatggatatgttcgctccccttccccttcagtaagaactcaggagaccatgttgcaacagagacccagtgttttccaaggaaccaatggaaccagtgtaatcacacctttggatccaactgctcagctacgaatcatgccactgcctgctgggggcccttcaataagccaaggcctgccagcctcccgttacaacactgctgcggatgccctggctgctcttgtggatgctgcagcttctgcaccccagatggatgtgtccaaaacaaaagagagtaagcatgaagctgccaggttagaagaaaatttgagaagcaggtcagcagcagttagtgaacagcagcagctagagcagaaaaccctggaggtggagaagagatctgttcagtgtttatacacttcttcagcctttccaagtggcaagccccagcctcattcttcagtagtttattctgaggctgggaaagataaagggcctcctccaaaatccagatatgaggaagagctaaggaccagagggaagactaccattactgcagctaacttcatagacgtgatcatcacccggcaaattgcctcggacaaggatgcgagggaacgtggctctcaaagttcagactcttctagtagcttatcttctcacaggtatgaaacacctagcgatgctattgaggtgataagtcctgccagctcacctgcgccaccccaggagaaactgcagacctatcagccagaggttgttaaggcaaatcaagcggaaaatgatcctaccagacaatatgaaggaccattacatcactatcgaccacagcaggaatcaccatctccccaacaacagctgcccccttcttcacaggcagagggaatggggcaagtgcccaggacccatcggctgatcacacttgctgatcacatctgtcaaattatcacacaagattttgctagaaatcaagtttcctcgcagactccccagcagcctcctacttctacattccagaactcaccttctgctttggtatctacacctgtgaggactaaaacatcaaaccgttacagcccagaatcccaggctcagtctgtccatcatcaaagaccaggttcaagggtctctccagaaaatcttgtggacaaatccaggggaagtaggcctggaaaatccccagagaggagtcacgtctcttcggagccctacgagcccatctccccaccccaggttccggttgtgcatgagaaacaggacagcttgctgctcttgtctcagaggggcgcagagcctgcagagcagaggaatgatgcccgctcaccagggagtataagctacttgccttcattcttcaccaagcttgaaaatacatcacccatggttaaatcaaagaagcaggagatttttcgtaagttgaactcctctggtggaggtgactctgatatggcagctgctcagccaggaactgagatctttaatctgccagcagttactacgtcaggctcagttagctctagaggccattcttttgctgatcctgccagtaatcttgggctggaagacattatcaggaaggctctcatgggaagctttgatgacaaagttgaggatcatggagttgtcatgtcccagcctatgggagtagtgcctggtactgccaacacctcagttgtgaccagtggtgagacacgaagagaggaaggggacccatcacctcattcaggagtttgcaaaccaaagctgatcagcaagtcaaacagcaggaaatctaagtctcctatacctgggcaaggctacttaggaacggaacggccctcttcagtctcctctgtacattcagaaggggattaccataggcagacgccagggtgggcctgggaagacaggccctcttcaacaggctcaactcagtttccttataaccctctgactatgcggatgctcagcagtactccaccaacaccgattgcatgtgctccctctgcggtgaaccaagcagctcctcaccaacagaacaggatctgggagcgagagcctgccccactgctctcagcacagtacgagaccctgtcggatagtgatgactgaactgcacaaagtgaggggaacagggtgcaggagagggatctctagtttttgtggtttaatttttagtagcaggtcaaaaacctgccctcctgtgacttattccctgagacttttcaggagagccagcccacagatgatgaagaaatgatggaagttcatttggagagtcaaatgggaaaaaaacaaacaaaaaactgcctttgatacaggcaattcagtggactataataatagtggagggttgagatgtagagtttttaaaaagtgaacagttgctgttcttacatctgtaaagaaaaccataatgtctttaaatcactcttctgtaaatagatgacctttttgcagtgtatatccccttgctgtagtatctggtgtacttatgttcaaatcagcgcatcaactttgggggtgatttttaaaaatctttttgtctatctatctttttaaccctagccttctaaacaacctcatacagcccagttacataatgttggctgtcacgggcattgtacttttatctgatattgtttcctctaaattcagctttccagtgatgtttaaaatcttgtgaaaatgtttagatttttaacacagaccctgtcataaaatctgtacattagggtcaaaaggtaaaagtaacaaattctgccatattgtaaatttccagtgcaggctttaatttttttttttcattagtagcactgaaaaaatattactgcatgggtatgttctagttcagtttataaagttttaaaggcttatttgaggcatacctcactgttacgcacactggtaatttaaccatgcccctaagtattccttttctcctgcatttgatgcagcccaacaaagcttttgttttgaaataaatttgactaccctgtccataaaaaaaaaaa

SEQ ID NO: 23525 - DNA, 2533 bp, Homo Sapiens
cggacgcgtgggcggagccccagccccacccagtgcggagcgcgccgcgagccccgccgcaagctgagcgcctccgcccgccaggcgcgccggcgccgggccatgtactcggggaaccgcagcggcggccacggctactgggacggcggcggggccgcgggcgctgaggggccggcgccggcggggacactgagccccgcgcccctcttcagccccggcacctacgagcgcctggcgctgctgctgggctccattgggctgctgggcgtcggcaacaacctgctggtgctcgtcctctactacaagttccagcggctccgcactcccactcacctcctcctggtcaacatcagcctcagcgacctgctggtgtccctcttcggggtcacctttaccttcgtgtcctgcctgaggaacggctgggtgtgggacaccgtgggctgcgtgtgggacgggtttagcggcagcctcttcgggattgtttccattgccaccctaaccgtgctggcctatgaacgttacattcgcgtggtccatgccagagtgatcaatttttcctgggcctggagggccattacctacatctggctctactcactggcgtgggcaggagcacctctcctgggatggaacaggtacatcctggacgtacacggactaggctgcactgtggactggaaatccaaggatgccaacgattcctcctttgtgcttttcttatttcttggctgcctggtggtgcccctgggtgtcatagcccattgctatggccatattctatattccattcgaatgcttcgttgtgtggaagatcttcagacaattcaagtgatcaagattttaaaatatgaaaagaaactggccaaaatgtgctttttaatgatattcaccttcctggtctgttggatgccttatatcgtgatctgcttcttggtggttaatggtcatggtcacctggtcactccaacaatatctattgtttcgtacctctttgctaaatcgaacactgtatacaatccagtgatttatgtcttcatgatcagaaagtttcgaagatcccttttgcagcttctgtgcctccgactgctgaggtgccagaggcctgctaaagacctaccagcagctggaagtgaaatgcagatcagacccattgtgatgtcacagaaagatggggacaggccaaagaaaaaagtgactttcaactcttcttccatcatttttatcatcaccagtgatgaatcactgtcagttgacgacagcgacaaaaccaatgggtccaaagttgatgtaatccaagttcgtcctttgtaggaatgaagaatggcaacgaaagatggggccttaaattggatgccacttttggactttcatcataagaagtgtctggaatacccgttctatgtaatatcaacagaaccttgtggtccagcaggaaatccgaattgcccatatgctcttgggcctcaggaagaggttgaacaaaaacaaattcttttaattcaacgggtgctttacataatgaaaaaaccacttgtggcacacgatgggcatctaacatcatcatcttctaatgtgttggagattttcatttcaaatatattttttaaattactctattttccaaaacacgtaatgcatttttctcgaaaataccttactgtaaaaataactgtcgcgtacacatgtgtgaagtagctagaacatactgaattttttttgtactgttggactctattcagtgtcatgtcctatatctgatcaagttatcaaggagataattctagaatgaaaaagaaaatcctcttgttggaaacaaaagacgttttatatgtgcagtatgacaaagaggagtttcagagacaactttgaatccttgtcagcctggagaccagcaccagaggaatctacaaggcaaactcccatatatttgcttcccccaaattgctgcccctacagactcaaagctctttttctttgttttgttgtttctctaaaaatttactgttctttgtcgatgctatataagccagggagttctaagacgccagctctttgagatttgctcattcccctgtatttcccacatatatattacatatacccgctaataaatttatgtttgtttttctcttgtcaatctgtcttttgttataggggccccagccaaggaacctaaagtgggtagaaggaaaaattattttttctttccctacaaactgaacatggattattagaactcaaggttttcattgacaatatagaaaagaaacactgaatcattttattttattgcccaatttttatttcttatatgactctagtgtttcatcttcataattaatcatgtttgaaggatttctgagtgactcagcagcctgttaaagaaggatgaaccaaagaaaacatttcactaaatgtgcttttaaaaatcaagtgtattgctggttctgctgcagtatgtagtcgaagaataaattagtaaattgcttctgagggtctgaaattgaataaagtaatggctttgtatttctat

SEQ ID NO: 23526 - DNA, 2421 bp, Homo Sapiens
gtgtacactatgtgcactgagggtgacacttctgagtgtgggggccctggctagggagtgggactggcaggcttgggtggggttcccaagctttaatcttcctaccccacagaatgttttctctgcccttcaggcagcctgagccgggcagggcccctgcctctgctacggcagcccccgatcatgcagcccccactggacctcaagcagatcctgcccttcccactcgagccagcccctacccttggcctcttcagcaactacagcaccatggaccctgtgcagaaggctgtgctctcccacacttttgggggacccttgctcaagaccaagcggcccgtcatttcctgtaatatctgtcaaatccgcttcaattctcagagccaggctgaggcgcactacaaaggtaatcgccacgcccgacgagtcaaaggcattgaggctgccaagaccagaggcagggagcctggcgtccgagaacctggagacccagctcccccaggcagcaccccaacaaatggggatggtgtagcaccccgtccagtttccatggagaatggactggggccagccccaggatccccagagaaacagcctggctccccatcccctcccagcattccggagactggtcagggtgtaaccaagggtgaaggggggactccagccccggcttccttgcctgggggtagcaaggaagaggaggagaaagccaagcggctgctctactgtgctctgtgcaaggtggctgtgaactccctgtcccagcttgaggcacataacaaaggtactaagcacaagacaattctggaggcccgaagtgggctcgggcccatcaaagcttaccctcggctggggcctcccaccccgggggaaccagaggctcctgcccaggaccgaactttccactgtgagatctgcaatgtcaaggtcaactcggaggtccaactgaaacagcacatctccagccggcggcaccgagacggcgtggccgggaagcccaacccactactgagccgtcacaagaagtctaggggcgccggggagctggcgggcacgctgactttctccaaggagctgcccaagtccctggcgggcggcctgctccccagccccctggcggtggctgcagtgatggcagcggcagcaggctcgccgctgtccctgcgcccggctccagccgcacctcttctccagggaccgccgatcactcaccctctgcttcacccggcccccggacccatccgaactgcgcacggacccatcctcttctccccgtactgacctcaaccctgaacccctcccattcaactccccacctccagccgggacccaggcgtccgggctcccagcccgcccctcctcccggcactccctaaatgatctctccttccccccccccaccccgagatacggggttccaggaaaggggaggggtagcgggggaggggggcttcagaagggggggaacaccccagatctcagggaaccccgccccctgcctttccctctcccctagaaaagggggggccgtctcacccccgagcccccttggagacaccccccctcccaaaagccatgtccatccagcccttccccccaaacctagcacaaaacggggttcacaagccatggtcggggtccgggggggacagaaatggattttcttggcaataagcggactctgggactccggctccctaccccaaactgaagcgcttccgtgaacacccccgtcctccgtagggggaggggagcaggcgggatcctgggtccctcataagcactttggttttaccgcctgcaacctcactgtgcccgccccgcaccatgccctagccccaggtctagccgggcccattgcagggggcagcacttgggggcatctccggcacttgggtgggaccaaggagatgccaccatagacctttccctcgccttcttcctccctagtccgggttccattcttttcaccagcacccatcgcccaaggggtaccgaggggggcaaggggtgtccagtccaagcccacccccgcctcgccttccgcaaaactgtgagcaaaaagcaatagaagcctcgcccccgcccttccccttcgcaggattcgccgagtctgtagcctccccgatccaagttcctagacctcatggctgtcccctcccaccagtcacctccactgcacaactcgggcgggggtgtgacacctctcccccacccccgactccgtggtttccgtatcgtcaacccttcagccgccgacccgggaggggtctggcctacactggtcttccccttcccatcaactctttctgcttgacaatgtagcaacccaggccccccacccacggtcctcccctttttcctctccctgacaataaagtctgaatttgttctgccctccaaaaaaaaaaaaaaaaa

SEQ ID NO: 23527 - DNA, 2908 bp, Homo Sapiens
atgtgggcgctttgctcgctgctgcggtccgcggccggacgcaccatgtcgcagggacgcaccatatcgcaggcacccgcccgccgcgagcggccgcgcaaggacccgctgcggcacctgcgcacgcgagagaagcgcggaccgtcggggtgctccggcggcccaaacaccgtgtacctgcaggtggtggcagcgggtagccgggactcgggcgccgcgctctacgtcttctccgagttcaaccggtatctcttcaactgtggagaaggcgttcagagactcatgcaggagcacaagttaaaggttgctcgcctggacaacatattcctgacacgaatgcactggtctaatgttgggggcttaagtggaatgattcttactttaaaggaaaccgggcttccaaagtgtgtactttctggacctccacaactggaaaaatacctcgaagcaatcaaaatattttctggtccattgaaaggaatagaactggctgtgcggccccactctgccccagaatacgaggatgaaaccatgacagtttaccagatccccatacacagtgaacagaggaggggaaagcaccaaccatggcagagtccagaaaggcctctcagcaggctcagtccagagcgatcttcagactccgagtcgaatgaaaatgagccacaccttccacatggtgttagccagagaagaggggtcagggactcttccctggtcgtagctttcatctgtaagcttcacttaaagagaggaaacttcttggtgctcaaagcaaaggagatgggcctcccagttgggacagctgccatcgctcccatcattgctgctgtcaaggacgggaaaagcatcactcatgaaggaagagagattttggctgaagagctgtgtactcctccagatcctggtgctgcttttgtggtggtagaatgtccagatgaaagcttcattcaacccatctgtgagaatgccacctttcagaggtaccaaggaaaggcagatgcccccgtggccttggtggttcacatggccccagcatctgtgcttgtggacagcaggtaccagcagtggatggagaggtttgggcctgacacccagcacttggtcctgaatgagaactgtgcctcagttcacaaccttcgcagccacaagattcaaacccagctcaacctcatccacccggacatcttccccctgctcaccagtttccgctgtaagaaggagggccccaccctcagtgtgcccatggttcagggtgaatgcctcctcaagtaccagctccgtcccaggagggagtggcagagggatgccattattacttgcaatcctgaggaattcatagttgaggcgctgcagcttcccaacttccagcagagcgtgcaggagtacaggaggagtgcgcaggacggcccagccccagcagagaaaagaagtcagtacccagaaatcatcttccttggaacagggtctgccatcccgatgaagattcgaaatgtcagtgccacacttgtcaacataagccccgacacgtctctgctactggactgtggtgagggcacatttgggcagctgtgccgtcattacggagaccaggtggacagggtcctgggcaccctggctgctgtgtttgtgtcccacctgcacgcagatcaccacacgggcttgccaagtatcttgctgcagagagaacgcgccttggcatctttgggaaagccgcttcaccctttgctggtggttgcccccaaccagctcaaagcctggctccagcagtaccacaaccagtgccaggaggtcctgcaccacatcagtatgattcctgccaaatgccttcaggaaggggctgagatctccagtcctgcagtggaaagattgatcagttcgctgttgcgaacatgtgatttggaagagtttcagacctgtctggtgcggcactgcaagcatgcgtttggctgtgcgctggtgcacacctctggctggaaagtggtctattccggggacaccatgccctgcgaggctctggtccggatggggaaagatgccaccctcctgatacatgaagccaccctggaagatggtttggaagaggaagcagtggaaaagacacacagcacaacgtcccaagccatcagcgtggggatgcggatgaacgcggagttcattatgctgaaccacttcagccagcgctatgccaaggtccccctcttcagccccaacttcagcgagaaagtgggagttgcctttgaccacatgaaggtctgctttggagactttccaacaatgcccaagctgattcccccactgaaagccctgtttgctggcgacatcgaggagatggaggagcgcagggagaagcgggagctgcggcaggtgcgggcggccctcctgtccagggagctggcaggcggcctggaggatggggagcctcagcagaagcgggcccacacagaggagccacaggccaagaaggtcagagcccagtgaagatctgggagaccctgaactcagaaggctgtgtgtcttctgccccacgcacgcacccgtatctgccctccttgctggtagaagctgaagagcacggtcccccaggaggcagctcaggataggtggtatggagctgtgccgaggcttgggctcccacataagcactagtctatagatgcctcttaggactggtgcctggcacagccgcgggccaggaggctgccacacggaagcaagcagatgaactaatttcatttcaaggcagtttttaaagaagtcttggaaacagacggcggcacctttcctctaatccagcaaagtgattccctgcacaccagagacaagcagagtaacaggatcagtgggtctaagtgtccgagacttaacgaaaatagtatttcagctgcaataaagattgagtttgcaa

SEQ ID NO: 23528 - DNA, 7984 bp, Homo Sapiens
cggcccggcggtaggcggtggcgactctgcccgctcccgtttcggcgcggtgaccgagcgcccgggaggctcgaggaccgcatcgtgtgccgttgcgccaagcccggtcctgcgccgccatggccccagtgcagctggagaaccaccagctggtcccgcccggaggcggcggcgggggcagcggcggacccccgtcagccccagcccctcctcccccgggagccgccgtggcggcggccgctgcagctgcggctagcccgggctaccggctgagcaccctcattgaatttctgctgcaccgggcctactcggagcttatggtgttgacggacctactgccaaggaaatctgatgtggaaaggaaaatagaaatagtgcagtttgctagccggacacgccaactcttcgttcgattattagctttagtgaaatgggctaataatgctggcaaagtggaaaaatgtgcgatgatttcaagctttttagatcagcaagccatcctgtttgtggacactgctgatcgcctggcctcgttagctagagatgctctggtccatgcacgcctgcctagttttgccatcccatatgccattgatgtactaactactggatcttacccacggctgccaacctgcattagggataaaattattcctccagacccaattaccaaaattgaaaaacaagccacactccatcagctgaatcagattcttagacatcggcttgtaaccacagatcttcctcctcagttagcaaatcttacagttgcaaatggccgggtgaagtttcgtgttgaaggagaatttgaagccaccttgactgtgatgggagatgaccctgatgttccatggcgtcttctcaagctagaaattctagttgaggataaggaaacaggagatgggcgagctttggttcatagcatgcaaatcagcttcatccatcaactggtgcagtctaggctctttgctgatgagaaacctcttcaggatatgtacaactgcctacattctttctgtttatcacttcagttagaagtgttacattcccaaactctaatgttaatccgagaacggtggggagaccttgtgcaggtggaaaggtatcatgctggaaagtgcctctccctttcagtttggaatcaacaggttcttgggagaaaaactggaacagcatctgttcacaaagttacaattaaaattgatgagaatgatgtctccaagcctttacagatttttcacgatcctcctttgccagcttctgattccaaattagtagaaagagccatgaagatcgaccacttatcaatagaaaaactcctgattgacagtgtccatgcaagagctcatcagaagctccaagaactgaaggccattcttagaggcttcaatgccaatgaaaactcttccatagagactgcactcccagctcttgttgttcccatcttggagccctgtggtaattcagagtgtctgcacatttttgtagatttacattctggaatgtttcaattgatgctttatggacttgaccaggccactctggatgacatggagaagtctgtgaatgatgatatgaaacgaatcataccctggattcagcaacttaagttttggcttggacaacagcgttgcaagcagtctataaaacatctgcctacgataagcagtgaaacattgcagctttccaattactcaactcatcctattggaaacctttctaagaataaactgttcattaaacttacccgccttccacaatactacattgttgtggagatgttggaggttcccaataaacccacacaactgtcgtacaagtactactttatgtctgtgaatgctgcagatcgtgaagacagccctgcaatggcattgctgctgcagcagttcaaggaaaacattcaggacttggtttttcgtacaaaaaccgggaaacagaccagaaccaatgccaagcgcaagttgtctgatgatccatgtccagtagaatccaagaaaacaaaacgagcaggagaaatgtgtgccttcaataaagttttagcccacttcgtcgctatgtgtgatacaaatatgccatttgtaggacttcggttggagttgtccaatctggagattccacatcaaggagtgcaagtggaaggtgatggcttcagccatgcaattcgcttattaaaaattcctccctgtaagggtataactgaggaaacccaaaaggctctggaccgctctcttcttgattgcactttccgattacaaggtagaaataaccgcacttgggtagcagagttagtgtttgcaaattgtccacttaatggcacttctactagggagcaaggaccatcccggcacgtttacctgacatatgaaaatctgttgtctgagcctgttggtggtagaaaggtggttgaaatgtttcttaatgactggaatagcattgcacgattatatgagtgtgtgttggaatttgcacgttctctaccagacatacctgctcatctaaatattttctcagaagttcgtgtttataattaccgaaaacttatcttgtgttatggaaccaccaagggaagctcaattagtatccaatggaattcgatccatcaaaaattccacatttctttgggaactgttggcccaaactcaggttgcagtaactgtcacaataccattctccatcagcttcaagaaatgttcaacaaaacaccaaatgtggttcagttattacaggtactgtttgatactcaggctccattaaatgccatcaacaaactccccactgtgccgatgttgggcttgacccagagaaccaatactgcctaccagtgcttctccattctgccacagtcgtccacccacatcagactggccttcaggaacatgtattgcattgatatatactgccggagtcgaggtgttgtggcaatacgggatggtgcctatagtctttttgataacagcaaactagttgaaggtttctatcctgcaccaggactaaagacgttcctgaatatgtttgttgacagcaatcaggatgctcgaagaaggtctgtaaatgaggacgataatcccccttctcctataggaggagatatgatggattctttaatatcgcagctccagccaccaccccagcaacagccatttccaaagcagccaggaacatcaggtgcttatcctcttacttcaccccctacatcttatcatagcacagtcaatcagtctccctcaatgatgcacacacagtctccaggaaatctgcatgctgccagctcccccagtggggctttgagagccccatcaccagcgtcatttgttccaactcctcccccatcctcgcatggaatctcaataggaccaggggccagttttgctagtccacatggaactcttgaccctagttccccatacactatggtgtcaccaagtggacgagcagggaactggccaggatctcctcaagtgtctggcccctcaccagcagcacgcatgcctggaatgtcaccagccaacccctcactacattctccggttccagatgcttctcattcccctcgagctggaacaagttctcaaacaatgccaacaaacatgcctccacctcgtaaactacctcagcgctcttgggcggcatccatacctaccatcctcactcacagtgccttgaacattttactgctgccctctccaactccaggccttgtgcccggcctggcaggtagttacctttgttctccacttgagagattccttggatcagtcatcatgagacgacatcttcaaagaattattcaacaagaaacgctgcagctgataaattctaatgaacccggagtgatcatgtttaagactgatgcactgaaatgcagagtagctcttagtcccaaaaccaaccaaacgcttcagctaaaattgacacctgaaaatgcaggacagtggaaacctgatgaacttcaagttttggagaaattctttgaaacaagagttgcaggaccaccatttaaagctaatacgttaatagccttcaccaagctattaggagctcctacacacatcctcagggattgtgtgcacattatgaagctggagctgttccctgaccaagcaacacagctaaaatggaatgttcagttttgcctgacgatccctcccagcgcgccgccgattgcacctcctgggacgcctgctgtggtgctgaaatccaaaatgctattttttcttcaactaactcagaaaacatcggtccctccccaagaacctgttagtattatagttccaatcatttatgacatggcttcaggtacaacccagcaggcagacattcccagacagcagaactcttctgttgctgctcccatgatggtcagcaacattctgaagaggtttgcagagatgaatccaccacgacaaggtgaatgcacaatatttgcagctgttcgtgatttaatggctaatcttacactgccccctgttgggcgtccatagacactattgtttttaaaccaggaaggctgacagatgagacaacaaaaaaaatctgaattcagccttcagtttaaaaaaggaaaaggactttttttttaaactttaagagctaaatattctaaactggcaaaaattttcagggtgcacttctttcatcaaaatgatcatccatcttttgtataatgaacttgtatagtgtgtttaaatgggacacatttcaaaggaaataaatcagtgtccgtttgccagtaataaatttaatattctgttttatactataaagttatgaaaatgccaaacttgtttatttaattgttttcttatgttttgggtgtaatagtccttttttggtttttgttttgttttttaaggcaggtctgtcatttttgaatactgtaaaactgtgataaactttatattgaagctgtattttaatatgaccgctttgaatccttacatgaaatgttctgggagttgttataaacacaccccaaggaagcaatatttaataaaactaggtcaaaaacaaaacaaaacagtgacactcacttgtgtgtatataaactctagagacatcttaggccctcccttcatctttaacctggtggatggagccagttattaatttataataatacatgtctgaaatttgaccaaaaacatcttctttatgtcaaggttaatatattttcttcagacattcctaacttgactagtggttaacatttagcaccttggttgtctttcaatatataggatttgggtgaaaaataaggaacttagtctttgagaagggacagtatgtggttcgtattgatcaaggatcccaaataatgcaatcattctcatctgttgaggatgtgggaacttttctgtcaggaaaatttagtttacagaatacttctgcatacaacattaattaggaaacaaagaactttaatgctgtacctctgcatgaagtttctgtgagctttctttatcttgcttaacttatcctcctttccttccccaccaaaattgggattgttctaaacaatttcaatttaattcattgtcaacaaaacgatagaatgttttgcttggaagaaacctggtccattcccctcattgtgaagaatcccgaatcctgggcctgtccagggtcaaatggagtttttggtattaatacatctctgcagggtttctttttggagcactgtgctgtctttcctagtcagtcagggacttttttaagcttcaaagaacatggtctgatgcaaaggtcttctaccgacttcatggtatttaggaaaaatttttaagtgataataccatgccgagttacctggtcactgtaatactggttctccattaaaatgtagatgctttgtctaattccacttcaagatgatttaattgagcttctataactatcaactatcaaattctagtttcaagtatctcactgtacctatatcatatctgttctcaactttgtttgattctccactcattttcaatcagagttgaagccttctttgcctttcttctttgtcttatttctgccttcatctcccacttctcacccaactctgccactgttcaggagcagttgactaaacttttatccttcctttaacttaatctttttatccttctgtttttagttcttacagtggtaatcacatcagtttggcaatctaagatgtctttatcaagggtcagcccttttctatttggagctgaatcttttctttcatgtagaaatctacatgtatatacaagaaatgtatttttatctgcaggataatattgtttcaaataattttattaagagttaactttttaggtattttcccttttaatgtggttttgaaatgttaattgcatttttacacatgatgcattcagtggacactcttttttcctaattataactcatctctgaatgcattgtgccaatcaagagtaagataggattcagtgcgcaaaatttgcttttgatgcttattaagagtaaacccatgaatttgaatttttatattatgcttggtacttggaattgatatataccttattaaagcttgaaaacatttagcatttgaatagtaagtttcatcacaaatcatgtcttttgcctcttttgttacccaggttcgatcaaggggactggatgcccaagtgattttctctaataatcgggttgggacttaactttaaggtgttttcaatgtgattttagtatttacagtaataaataaaatttatacaaagtttcagagaactaccaactctctagttaattttgatgaagatgttttcattaatagtctggtttagtattaatttaaccttgaaataagaaattggtcctgatttgccaccttcatttttccatctgctgaaatgccatttcagaatgtataaaagtactttcagaattagaagaaaagtgagagcttcagcagaacgtgtcaagtcgctaataacaggagtcgaaccttatgtttgaaaattaactgagtgagttaagtgcaagcataaactaaaatttatatgactttgaatttaagaaccactaataactgtgttctaattaacacagtaatctgttcagccaaaggatactaacagccattctttggactgtggttaatttgataacttcaagaagttataactttgctaccctggattctgatgcaatttcaatataaaaagttgttcctttcatagtttttccccccaaaagaagtgcctattacattttaccttaatgtttatttatcatccaagtgttcttgatataaaatcagtatacagaaaattttaagagaacttacattcaagggacatagagggaaaatgttaatgtgtatttcattgtttcttgtggaatttttttttcattcggtttgagaatggacagtgtgtctaaggatgtgatttaaatttacttaggatggatttagcattgaggttattaagacaaagttagcagaggccagccagcactgtgctgcacaactccaggaactccatggtatgctcacaattttctgcaagttgcctccacttccaagtggccagtgatttgttaaaataccttgcccaagaatataactgattgatgaaagggcatatttaggtcaatataaaataatagcaagtatttactgagagcttactgtgtgctaggcattttcttaatatttcaatgtgtatttaatcctcacaacaacccaatgtggtaggttattgatatcctcttcttaaaaatgagtaaatggaggcccagagaaatgtaatttgcctgagatcaaattaaggttgcttaagatcaaactgctaagaaggggcagtttgagtctgagctagtgctcctaaacactggacatttttgctgtgaaccacagtcgggaaggtttaatgtttagactctttcctcagaggcttttaactacacacaattttgacatgttttccaagctcagaaagctcattaaaaacaactaaaactg

SEQ ID NO: 23529 - DNA, 43507 bp, Homo Sapiens
agacggagtctcgctttgtcgcccagcctggagggcagtggcgcgatctcagctcaccgcaacctccgcctcccgggttcaaatgattctcctgcctcagcctcccgagtagctgggactacaggcgcgtgctaccacgcctggctaattttttgtatttttactatttcaagacctcttctgttccattgatctacttgtctgtctttatgtcaatttcacattgactcgattagtgtatagcaagtcttaaaaccaagtagtttaagttcttcagccttgttcttttttaggattattttggctattcaaatttccatataaattttagaatcaacttgtcaatttcttcaaaaaaatcctgctagtgatttagattagattgcattgaatttgtagttcgatttgggaagaactgctattttaacaatattgagtcttccaatccaagaatatgaatttctctacatttctacatttctttagatctttttttctcagcaatgttttatagttcagtgtgcaaatcttgcatatttttgttaaacttgtcctgttttatattttcaatgcaattgttttaagagatactgttttctaatttgtttccaattttttattactagcacatcaactatagattttaaattgaccttgtatcctacaaacttgctaagctcaatattagttccagtagcttttttcgttaagtccaatgaagacagttttcaacaaagatgaataatcatgtcatccaagaataaacaggtttacttccttttcaatctgccttttatttcttttcttattatattaccctaactagaacctgcagtactatgttgaatagaagtggtggaagcagacatcctttccttgttccaaatcttaaggagaaagcatcaatcattcaccataaagtcagtttgtggctgtttctatcttctgaaatagattatagagaattgttgtaatttcttccttaaatgtttggtgtaaaattcaccagtgaaaccatggacctggtgctttttgtttttggaaggctattatttattcaagttatttaatagatataggcctattcagattgtccatttcttctcgtgtgaattttggcagattgtgtctttcaaggaattggtttatttcatccaggttatcaaatttgtggacatagaattcatagtattcctttattatcattttaatgtccgtcggatctgtagtaatgttccttatttcacttttgatattagttatttgcgttctcttttcttgcctggttagaggcttattgattttatcaatgttttcaaagaaccagcttttgttttcattgatttttctttgttgctttcctgttttcaatttcacaggtttctgctttaatttttattatttcttctcttctgcttactttggattttctttttatttctttttatttatttatttttgagacacagtctcactctgtcgcccaggctggagtgcagtggtgcgatctcggctcactgcaacctccgcctcctgggttgaagcgattctcctgcctcagcctcccgagtagctgggactgcaggcgcccgccaccacgcccggctaattttttgtatttttagtagagacggggtttcaccgtgttagccaggatggtctcgatctcctgactcgccatctgcccgccttggcctcccaaactgctgggattacaggcgtgagccgcccagcatctttttttttttgagtcggagtcttgctctgtcgcccgggctgcagtgcagtggcgcgatctcagttcactgcaagctccacctcccgggttcaggcagttctgcctcagcctcccgagtagccgggactacgggcgcgcaccaccacgccctgctaatttttgtttttagtagaggcgggatttcgccgtattggccaggctgatttcaaacgcctgacctcaggtgatccgcccgcctcggcctcccgaagtgctgggattacaggctgaggcacggtacggggacctcatctgcatcagtacgggtgtaatcaatgatgacctgcctcttaatttatcaggtggcaaactgaggctgtgggcactgaaagagacctagcattttctagggcaccgctctcctgggtacgctggcgacaaccagcggcctcggcttgggagctgagccactggccggaatctgccgctgagcgaatgcactcgctcagacccgacttctccctctagggcgcggctcccgggcaggtcccttcacgagtcttccatccgagcagagcagggtcccgcggaggcgccgaccgggcgcgaggcctcctgcctgcccaggttccccggcgaccctgagcgaaccctctcggggtcagctccgtctaggctgagaagggaacggcggaaggcggagtgcgcccccgggagcccggagctgggactgcagctcccatggggccaagttcacggggtgcggccgcgcggccaatgagcgccctctatgccctgacggtgccccgcctcgcggcgctgccgcgctcccgccctcccgccctcccgccgcgcgctcgggatcccgaccagtcctgaccgcacgggggccgcggccacggggcgcaggggccatggtgcgcggcaggatctcccggctctcggtccgggacgtgcgcttccccacgtcgcttgggggccacggcgcggacgccatggtaagcgcggacgccatggtaagcgcggacgccatggtaagcgcggacgccatggtaagcgcggacgccatggtaagcgcggacgccatggtaagcgcggacgccatggtaagcgcggacgccatggtaagcgcggacgccatggtaagcgcggacgccatggtaagcgcggacgccatggtaagcgcggacgccatggtaagcgcggacgccatggtaagcgcggacgccatggtaagcgcggacgccatggtaagcgcggacgccatggtaagcgcggacgccatggtaagcgcggacgccatggtaagcgcggacgccatggtaagcgcggacgccatggtaagcgcggacgccatggtaagcgcggacgccatggtaagcgcggacgccatggtaagcgcggacgccatggtaagcgcggacgccatggtaagcgcggacgccatggtaagcgcggacgccatggtaagcgcggcttgcggcccgggtccctcccgccccgactgcagctctgcgggccccgggcagcttcccgacttcgaacccattgcttctgtaaagtgggaggcgcgcctgggggagacactcgcttttcatgccttggagcaattgtataagtatccagaaactttccactctcctgggttttttctttgctggagtttagaatatcctggttttacttttacgactcacattttgctggaaatggtagaatgcataataggcaatagcagcaaaatgattttgttgggttcccgccagtggaaaccctagagcacagtgctcgctggcttcctctgtaccctgaacgcgacggggttggcgctgagggagaacgggaagcccggggctgggagttttgagtggtgatcccgcttccacaacttgctgtgtgacttggagaagttccagacctctctgggtctcttggacccgtctgtgtaatgaaggtgtcacagtcgggttgagaaaccaagcgcgtgctaactgcgtcacatgagagggcgctctcgtgaaattacccgcaaacacgcttagaaaggactgatgcaaatgtcagttcgtcttaagagatgtaataaagtaagggcaggaactctgactcctacctaaatattgaaggtcttttttgcttactgagggtgttagaatgtcaggccttccctcccctgcccccgtctagagcggtgtttcccaaatacagtgggttctgtgcagggttttcagggagcctgttccccactgggtcctcactgcccgtcgtagtccactgatgagattggccgcgctagaaaagcagagttgtatgggtatgtagtgaatgtgtgaaagtatgctgggaagtgaggaacggcaatgttaggaaaatggttaccagtagggagggaaggaaatggggtcacggaggggaccacgaggtctctaattcccattgtaatgttttacttcctaaattgggtggatggcaagctggtgtccattacattatctatactctttttgtacctgaaatgttttataaaaatagatctctcgttaaagttattaaatgcaaaacaatgtcctttttgagattaagttcatcctgcatttttaaatttttattttattctattttatgttttaaatttatttatttatttattttgaggcagggtctcttatctgttgcccaagctggagtgcagtggtactatcatggctcacagcagccttgacctccctgactcaaccaatcctcccacctcagcctcccaagtagctgggactacaggtgtgcaccatgatgcccagctactttctgtattttttgtagagacagggcccaggctgtcatcctctttaaaatcttcatgtttcctttcttacatgatgttggtaaataacttaaacacccagcaggcaatcctttatggaactcaaaataaatgttggaaattttactggcttatagaatccaaacactcgatctcatgcaactgcctttgcctctgtgaagctttagcagctgtggctaagtcacacaatctttctaagcctaggtttctcatctgtaaaatgggtataataatattcactttatacatgtaaatgagatacctgtaaagagcctggctcagagaaggccgtcagtaaagttggctataggccaggcatgagggctcacacctctaatcctaagtggaggcctaggcagggggatcacttgagcccaggaattcaattacatgagctatgatcatgccactgcattccagcctgggcactggatgacacagtgagaccctgtttctaaagaaaaaaggaggggtggctgtaattactattcactctgaggaaactgaagcagaaggaatccctaatctagacttgactttgaatttgtgaaatgttaagacagcctggtttggctgagcgtggtggttcaagcctataatcccagcactttggaaggccaaggcaggtggatcgcttgagcccaggagttcgagaccagcctgagcaacatagtgagacctcgtctcaacaaaaaaatacaaaaattagctgggcgtagttgcatgcacctgtggtcccagccactcaggaggctgaggtgggaggatctcttgagtccaggaggtcgaggctgcagtgagctgtaattgtgtcactgcactccagcctgggtgagagagagagaccctgtctcaaaagacagcctggtttactgtagaataattcaagaaatggaatttgcctctgggcctgagtgatgtctaacacagggtaaggagacattatctaacacctgtattgcaagctcataaatacttaagcattttatcttggggagatagggtgtatgttgtgtgccagctctcaagtgccttcttattagaatgagctgttttgcagttcaccatggagatggcttcacatgccctcgaggcatgctggaccatcagcacttagcaaagtgagcctccctgatcagaagtaggatattttcaagaaagagcaataaagctgtcctcaaaatctgctaaagactcctgctttttttttttagacagagtctcgcttgttgcccagcctggagtgcagtggtgcaatctcatctcactgcaacctctgcctcccatatgcaaatgattctcgtacctcagcctctggagtagctgtgattacaggtgtgcaccaccacacctggctaatttttgtatttttggtagagacggggtttcaacatgttgtccaggctggtctcgaactcctgagctcaggtgatccacctgcctcggcctcccaaagtgccggattacaggcatgagccactactccgggcttacctccttcttaatctgaaatctacttctgttcctttcttctctgtgaattgcccttgttatttctccttcagctgtccttaccctcagatacgttttccgctgtcggccgcctcttcttcgtgtgctctctcccctcgtggcctcctgcctttctgacagctccttcttcctccactggccccttcttccctctctgaggctcaggcctcagtgtctttccggtctccctacacactcccatgaagaccctctccacattctgacttcggtgccaccctttatgccggagactcccagatctcatttccggatctgcctccttaacttataggtctggatacttcctgtttggtttttcaccttcatgctaaacgcagtttgtctaaatcggaagtcaacttccattctctgccgcccctccctcctgacccatgttggatcattccgctaatcacagggacccaaaagcttcgagtcacttttggctcatctcgtcctgttgaccctcatctgaggcttcagtgcaaggtttcctttttccattgcttcctcttcttggaacccagaaactgccgatgggtctttaattcttggagtctccttctcagcctcatcgctcaactccttcaggaacccaatggctcagccaacccaggtgggcaccaacacttgaatacactccagtctctccctcttctgacccctttactttctgcactgctgctgctgctaccttgcctgagatattcctccctcccagactcttcactccccttcccactgctgaggagctccccttccttgaccggccagctcacattctgtcttcatcataaagcgctctccctcttcaagaagcacattcagctaacagcgctctctgccagtcgttcatagtttgcatccctcccaggccttagcattttctgccttatattattaaggtttttttttaaccatgtctttttatttatttattttagagatggggtctcgctttgttgcccaggctagtctcgaactcctgggctcaaacaaatcctcctgtcttggcctcccaaagtgttgggattacaggtatgagccagcatgcccgttctataagcaggtcttctcaaatgtaacctcctcaagggcagacgtatctgtaaccccctagcaagctgcaccagctctgacacgtacttggtgctcagcgatgcatcacactgatttcctgccactggactgtgataccagactcagggctcccagccatcacatacagctccctcagccacgacaccccaatacagggatttaaaatctgccttcataatttacttgtggccgggcgtggtggctcacacctgtaatcctagcactttgggaggccgaggcaagtggatcacctgaggtcaggagttcaagaccagcctggccaacatggcaaaatcccatctttactaaaaaaaaaaaaaaaagctggtcatagtggtgggtgcctgtaatcccagctacttgggaggctgaggcagaagaatcgcttgaatccaggaggcagaggttgcagtgagccaagatcatgccactgcactccagcctggagaacagagtgagagtcagtctcaaaaataataataataataataaaacattatttacttgtggtgtgaccttttgtaaattactaaagctccttaaaacttcatttcctctttaataaggataagagcacctactttataatattgttataagattaaattaaaccatgtggagctcttagaatatagtgtgtctggcacaataaatattatagaataataacagtaataaattttcatagccttatgcacaattcttctttatgaatgcattcacatcttctgcctggctttttggagtctccattattccatgacatagaacaaaacaaaaaatgagtgaattaatctcgaagctttacttcttcattttcccccactggtgtgtgaacttttgccagtgtattttcagccctgctataaactgctataagtgagatcactccaattttatgcaacagttttctgaacctttggcttgttcaatttgaagctgcttgtgaatgtaactttgttcaaaaagctgacagagatagctgcgagtgaaaactccttggcttaaaattgagccccttccgggcatgatggctcatgcctgtaatcccagcactttaagaggcccaagcgggtggatcactagagctctggagtttgagaccagcctgggtaacatgcaagactccatctctatttttttatttaaaaaataaataagtaaataaaattgagcctcattttttaacctaattgaaaatgggtgataaaaatgtatacattgcgaccaggtgcggtggctcacacttgtaatcccagcactttgggaggccaaggcaggtggatcacctgaggtcaggagttcaagaccagcctggccaacatggtgaaacttcgtctctattaaaaatacaaaaatcagccaagtgtggtggcacatgcctgtaatcccagctacccgggaggctgaggcaggagaatcgcttgaacttgggaggctgcagttgcagtgagctgagatcgcaccattgcactcctgcctaggtgacagagcaagactctgtctcaaaaaagaaaaaaaaatatatatatatatatatatatatatacatacattgctcttgttgaaacattttggatctttcaggaggacattccttttctccattcagagccctttgttttctttggggtatagcaacagttccttctatgggagctcttgtggcacggcccctgtggcattgtctgtcctcatgtgacatcattctcatggttcttttcgggtttctcacactggcattgtttcggcggggaactcctctcctgcagcacacggaccctgactactcggctgcctatgtcgtcatagaaactgatgcagaagatggaatcaaggggtgtggaattaccttcactctgggaaaaggcactgaagttggtgagttgaagattctctcgaggttccagaatgcttaattttcagatgagattctaatttagattcttagattcattagaatcttgatttagattgagttctgatcttgtttttatctgtatttacactgctcaaagtgagtaaaaacagtgtttcatggtttgttacttgtttcactgggagaaatttaaaagtgacagaatttggcctctctccttgcaatcatctctagcctgttagaaaatccttggctgttagtctgtttctctgtgtcaaatgacagctacaagagtgcttttcacctgcctttcacccggggccactgtcgagctttgacaacctgtagtgggcgagtaaccaagggcaatgagagggaggagacatgagttcccatagcaaaaaaggctcattgtgatgtgcacagcaagtctactcgcttttcaatatatatatgtatatatttttgagacagagtctcactctgtcgcccaggctggagtgcagtggcacaatctcagctcactgcaacctctgcctcctgggttcaagcaattctcctgcctcagcctcccgagaagctaggattacaggctcccaccaccatgcccagccaatttttgtatttttagtagagacagggtttcaccatgttggccaggctggtctcgaactcctgacctcaaatgatccgcctgtctcagcctcgcaaagtgctgggattacaggtgtgagccatcacacccggccttttcaaaatatttcacaccaaatcggtttcaagttcactattttcatggcgaaaagggctttggccccgcccaatctcggaggtctcccttggggaagagcagattctttaagatgcatactgagccgtgtatacgtcattctttttttatttgcattttctattttcttaaacagaagacacagaacataacttttttcagagctggatgtgatctcaaatggtgatcttgagccgtctcattttttagagagaagaaaactgaggcacagacagctacccagcaagtcatggcagaaccacctgactgcccagagcactttctcttcagaacttttaaatgcaactctttttgaatacataatacttacacatggtacaaaattcaagaagtccaaaacagtggccttcgccagatcaatttcagtggattattagagcctgaagccaaattatgatagattgaagggtaagggtctagaaggagggaaaagagtttctctaacttcggtggtagtgtgatacctctcccttggatatttgcaccatcagcgctctcagtagttgtagaaaaaaatcttggcccattgagagattttaaattgttaagcatataaaagaagtgtgtgagtttgtgaatgtgtgtatgtgcgaatggcaagggaaccttccttgaactttcaatggacactgcccaggtggctgctgttactgctcttcacagggctggcggtcagttgtccagcaagtcagtccttctgcagacttctcctgagtgctgccatgtatcaggcaccaaagtaattttaaaaagagaaagataggccgggcgtggtgattcaggcctgtaatcccagcactttgggaggctgaggcgggcagattgcttgagtcaagcagttcgagaccagcctggtcaacatgctgaaaccctgtctttactaaaaatacaaaaattacctggccgtggtgatgcatggctgtaatctcagctactcaggaggctgaagcacgagaattgcttgaacctgggagttggagtttgcagtgagccgagattgcgccgctgcactccagcctgggtgaaaaagcgagactccatcccaaaaaaaaaaaaaaaaaaagatacagaagacagaatcccacatacaaggagcacacgaacttattggggaagtagacataaaagaaatgatcatagtgcagtctgagaattactgttttttaaaactatgtacaagtttacagagagaggatatattaggctgttctttttttttttttcttttctttttggaaacaagagtcttgctctgtcgcccagcctggagtgcagtggcgcaatctcgctcactacaacctccacctcccgggttcaagcaattcttatgcctcagcctcccgagtagctgggattacaggcacacaccaccacgcccggctagtttttatatttttagtaaagatgaggtttcaccgtgtttggtcaggctggtctcctgacttcaaatgatctgcccaccttggcctctcaaagtgctaagattataggcatgaaccaccactctgagccaggctatttttgcattgctataaaggagtacgagagactggataatttataaagaaaaagaggtttaattgcctcatggttctgcaggttttacagaaagcatgatgccagctactcagcttctagggaggcttcaggacacttacaatcatggtagaaggtgaagggggagcaggcacgtcctatgtcgaaaggatcaagagaaagggaatggggaggtgctacacacttttaagtcaccagatctcacgagaactcactcactatctcaaagacagtaccaatgggatagtgctaaaccattcaggagaaatccacctccaagatctaataatcacctcccaccaggccccacctccaacactggggattacacttcaacatgaaatttgtgcagaatgtctaaaccatctcagggggtaacttcactctgtccaaaaggctcagggaaggcttcagagcagaagtaatgctttgaggtgagtctcgaagagcaaacaggaatttgccaggcagagaaagaccatgctgtgagtcagtcccgcttttctccattaagtaaacaatttactgttaaagttttccccagagtagtaaccacttactaagacagagctgtgagctgtttctgcttcttctgcaactctaattgtcccttgtttgtaagttgagtactttatgaagccgctgcctttctccatactgcaaatcctacagcacagcccccaaaggttgcataaaactcagcgagcttacaagatatgttaggccattggacccactctctgttaacagcccagactttaaactttgctgacttgggcacacgtggaggggccctgggcactaagatagataagaagcccttctgggatgggtgctgagctcagtgtttagggccttcacttcccctctcctcctccattcccagccccacaccgctgtcttggtggatgtctcaggcacggataaatcaacttccatctctccatgactttaattaatgactcttttgtgctaagggttttggcttcctcctttttcagaccacaacatgacagaacccattttaactttaaccttgctacatatttcaggtgactcactgcagtctcactaaatgtgttacacagcactcacactaaagatgaaaaattccattagctcatcctggttcttctgcttacttacctaatcatctgtttatgatttaaaaaaatagggttactgtgaagagagtgcttgtgtgtgagacagagagggagggttgtttttcaaatgtatagaatataccaatgtagtttttggttgggtatttttttaaatcatgactttattaaatttacttaattaatattcatttttatcctttttttatgtttttaaagtttttattatttattaatttatttgagataaggtcttgctctgtcacccaggctggagtgcagtggtgcaatcacggctcatacagccttgaccttccagactcaaatgattgtcccacctcaccttcccgagtagctgggcccacaggcacaagccaccatgcctagctaatgtttcttttttttgagagacagagtctcgctctgttgcccaggctggagtggagtggcacattcttggctcactgcaacctccacctccaaggttcaaacgattctcctgcctcagtttcccaagtagctgggactacagatgtgtgccaccatgcccagctaatttttgtatttttaggagagacagggtttcactatatgttggccaggctggtctcaaactcctgacctcaggtgatccacccactttggcctcccaaagtggtaggattgcagatgtaagccaccacacctgacctgggtttttttttttttttttttttttgagatgtagtttcgctcttgttgcccaggctggagtgcagtagcacagtctctgctcactgcaacaaccacctcccaggttcaagcgattctcctgcctcagcctcccaggtagctgggactataggtgcctgccaccatgctgggctgatttttgtattttttgtggagacaggatttcatcattttgcccagactggtcttgaactcctgagctcaagcaatccgcctgcctcagcctcccaaagtgatgggattgcaggcataagctataagccaccatgcctggcctgtttctgtttttatttatttatttatttatttatctatgtatttatttatttttgagatagagtcccactctgttgcccaggctggagtgcagtggtgtgatctcggctcactgcaacctctgcctcctaggttcaagcaattctcctgcctcagcctcccgagtagctgggattacaggtgcccactatcacgccagctaatttttttttttttttttgagacggagtctcgctctgtcacccaggctggagtacagtggcgcgatctcagctcactgcaagctctgcttcctgggttcacgccattctcctgcctcagcctctccagtagctggactacaggcacctgccaccacgcccggctaattttttttttatttttagtagagatggggtttcaccgtgttagccaggatggtctcgaactcctgacctcaggtgatccacccgccttgacctcccaaagtgctgggattacaggcgtgagccaccgtggccagccttttttttttttaagactttatttttttagagtagttttaggttcacagcaaaactgaatggaagttacaaagatttcccacatacccctgtccccacacaggcacagcctccttcattatcaacattctgcccagagtggcccacttggtacaactgatgaacctgcattggcacatcatgatcacccaaagtctgtagtttacaataggggtcactcttaggtttggacacatgtataataatatgtacaatgtagactaagttagttttttaaaaaatagaaaaagatgtacaaagaaagaatttttaaatagacaaaatttttaaaaatccagccttaagagtttatgacaccactcttacttcagacacccacaagtcacccacagactttactcaatgtccttccagtgctagaggctccagagaattgaagtccctgagcagatagaatcacaagagaaaaccccccgggtttagttgccaagaagctgctttcaagggccttttttttcttttccaagtcaatttcctgccacagccaaaatttctctcgtttttttttttttttttttttttttgaggcagagttttgctcttgtcgcccaaactggagtgcgatggcgtgatcttggctggctcactgcaacctctgcctcccaggttcaagcgattctcatacctcagcccccacaagtagctgggattacaggcatgtgccaccacacccagctaatttttgtatttttagtagagacagggtttcaccatgttgatcaggttggtctcatactcctgacctcaggtgatccgcccgcctcagcctcccaaagtgctgggattacaggcatgagccaccgtgcctggcctcacaacccaaatttctattgaatgcgacaaattctagtctcctgttgagcaagaaaaatccatacactgtagatgaatacataagtgctgcttgtgcactctgagagtcataaaaatgagatcatccttagcttttgttaagtgcatttggtattgtgacatgaaccagaggtatgcttcagtcaatgatttatagcaacaatcaaatccttgagacggtggtttggtgtcgataataacgtacctcactgtgagtcactgacttacttcagattttctttaattcaagagcatcaaccttcaagaagtgaggaggactctgtcttctcacaattctagggaatgaatgtctgaaccagaatgattgtgtatcccattaacaaaagccctagagaacctggaatggctggttcagccctaaatgctacatctgacctaaagtgtgcaatcatccgagagctgtttcacccttagccaggcatgtgctaaaagcttggggcatcactttctttctttttcttgagatggagtttcgctcttgttgcccaggctggagtgcaatggcatggtcttggctcactgcaacctccacctcctgggttcaagtgattctcctccctccgcttcccaagtagctgggattacaggcacctgccaccatgcccagctaatttttgtatttttagtagagatggggtttcaccatgttggccaagctggcctcaaactcttgacctcaggcaatccaccggccttggcctcccaaagtgctaggattacagacgtgagccaccgcgcccagcctggggcaccactttcaaactgtccttctcaagatcttattgacagtaaaactgtacccctacaactgtcctattaaatgactaaaaacttttactattgaatccacggcagcaccaaacaaattaatcaaaacgttttggaatacattcctttctttgaagctaagttgatggcttgattcaattattgtgtccatttacacaacgtaggctaaatgtttcctagaattggcaaaggatcaaagggttactttacttattcatcatcttaaataacccaagaaagcctttatattattattattattattattatttgagacagggcccagctctgtcacctaggctggagtgcagtggcacaatctcagctcactgcaacctctgcctccaaagctaaagtgatcctcctacctcaagtgatcctcctacctcagcctcccgagaggcggggaccacaggcgcaccaccgcaaccggctaatttttgtattttttgtagagatgatgtcttgccacactgcccaggctggtctcaaattcctgagctcaagtgatccacccacctcagcctcccaaagtgctggcattacaggagtgagcgccaggtccaagaaatcctttcaaagtaaaataccacaggacatggtggctcacacctgtaatcccaacacttaaggaggccgaggtgggaggattgcttgagcccagagttccagaacctccccacccactgccccatgcaacatagcaagaccttgtcactacaaaaaatttaaaaattagctggtgtggtgttgcgtgtaggtcctagctactcaggaggctgagacaaaaagattgcttgaggctaggcattcaagattacagtgaggtgctgggtgcagtgtctcaggcctgtaatcccagcaattttggtggccgaggcaggtgtatcacttgagctcaggagctcgagaccagcctgggaagcatggtgaaaccctgtctctaccaaaaatacaagaaattagctgggcatggcagctcaagcctgtggtctcagctactcaggaggcggaggtggaaggatcacttgagcccaggacgcagagattgcaatgagcctagatcccgccactgcactccaggctgggtgacagagtgaaaccctgtctctaaaaaataataataataattaaaggtaccaaaaataaataattgatggtaatgctgacccaaattaaatttaaccttcaaattacttatgaaaaatgtagtatatcataagaaagtcaatagtaagaaatttcatgttaagacagtgttttcatatattttaacattttacatataaatagtatgctaattgcaaattcattttatttaatgtttaatagtttatgttatgaattcaaggcattttctatacttgtcaataatgaaaaggcatttctccttttaaaaattctatgaagtcagccttcttattccttaggaacatgaactagcgtggtttggttttgaatctgattgttcaaacactttacaaagtgaataggaaaataatttgggaacatttatatttaaacttgtcaatctatgattctgtttttcatgtgacagccaatcacaatgtgttctctactcaggaagtttagctcagtatatggattaacacgtgttctacttgtgtgatatttcttatgacaaccacagaaaacatatggggctgggcacagtggcttatgcctgtaatcccagaactttgggaggccaaggcgggtggatcacttgagcgcagtaatttgacaccagcctgggcagcatgtcgaaactgcgtctctacaaaaaataccaaaattaaccaggtgtggcggcacatgcctgtaatcccagctcctcgagaagttgaggtgggaggattacctgagccggggaggtcaaggttgcggtgagccgtgatagtgccactgcactcaagcctgggtgacagagtgagaccctgcctaaaaaagaaaagaaaagaaaagaaaacatatttgatgcaattttaaaaagaatatacctttgagatagagtctcactcttgttgcccaggctggagtgcagtggtgcaatctcggctcactgcaacctctgcctcctgggttcaagcgattctcctgcctcagcctcctgagtagctgggattacaggtgcgcaccactgtgccctgctaatttttgtattttcagtagagacagggttttgccattttggccagactggtctggagctcctcatctcaagtggtcctcctgccgtggcctcccaaagtgttgagattacaggcatgagccaccgcgcctggcctagatttaattttttcataaaactttcacatttgtttgtttgtgatgttttcaggtgctaatttcttgacctagtatagaagcataaacgagttcaatcctttttaaatagttgtctgtgctgtgaatgccctcgcccaccatgtgctcaacaaggacctcaaggacattgttggtgacttcagaggcttctataggcagctcacaagtgatgggcagctcagatgggtaagggacctattttgtaaaatgcttacataagtaatattaccaaggtctgagatgtcctttgagtgcaacgaatgtgaaaatagagatgggtttatttatttgtttatttatttattttttgagatggagtctcactctgtcacccacgttggagtgcagtgatgcaatctcggctcactgcaacctccgcctcctgggttcaaacagttctcctgcttcagcctcctgagtagctgggactacaggcatgcactagcacacctggctaatgtttgtaattttagtagagatggggtttgaccacgttggccaggctggtctcgaactcctgacctcaagtgatccgccttcctcagcctcccaaagtgctgggattacaggtgtgagccaccatgcccatcctagagatgtgtttataattttaaagtaaaacattttattcagttaaattcaggcttgagtcatttagatcatcagtattttgaggtgaacaactcatttctgtaagactgatgatctaaatgactcaagaccgaatttagctgaataaaatgttctactaaggagatgaggtcctgagatttgggtcctgagagctatctcttctctaaggacctcatctcctcctccctgaattggaaagtgctctagaggataaagtactaaatgggcaatctctttatggagaaataatgtgagtagtattagagatgtaagagaaggtcaggccgggcatggtggctcactcctgtaatcccagcactttgggaggccaaggcaggcagatcacgaggtcaggaggtcgagaccatcctggctaacatggtgaaaccccgtctctactaaaaatacaaaaaattagccgggcatggtggcgggcgcctatagtcccagttactcaggaggctgaggcaggagaacggcgtgaacctgggaggcggagcttgcagtgagccgagatcgcaccactgcactccagcctgggcaacagagtgagactctgtctcaaaacaaaaaaaaaaaaaaaaaagagagagatgtaaaagaaggtcattaaagagaaaacattaagagaagagcaaatttaaaaagatggaagaccatggtaccttttatgtgtttggtatttgaactataaattcaaggcatgaaaaagttaggctctggagaaaggattccaacacaataaggtgaattcaataccctgacctttgcctttgtcccgtgatactggattttgtcttttcctaacccggcttagtctcccatccatgcactgagaagggcacaagagaatgtactttcaatagtgcctgggatttcatcttttactttatacagagaatattaaacttaccttgaaagatgtcaccttgaagaagttcccattggctgaatctgggacaatttgaacatccaaataaatatgatagtaatggcttataacccattgaataaaatccatgagtccattcagataatgaacaatcagctgggcacagtagctcacgcctataatcccagcaccttggggctgaagcaggagaatcacttaaggccaggagttcaagaccagcctgggcagcatagttgagacccccgtctgtactttttaaaaataaaaataataaaataaaaaatttttaaggaggtaataaacaacaaggtcaagcccaccattacagctgattaaaatctaataaatataaaaggaatgataacatcagaaaatcaccataactgtcatagctacaattaattgaggcaagagtcatcaagggatgcccaaattttgggacaataataacctccttacttggaaaatgaaatggtaacttcacagtggagaaagcaaatggacactaagttatccaagtggtaaaagttaacaatcctaataataaaacaaaatgacataatcacttatgtagtattgatgccaaaaaatgtattacctgaatctagtcatgaaggaactccagatcagcccagattgaggaatgctgtacaaatcaagtggcctgtactcttttaaaatgctaataacatttaaaaaagaagaagaaaaattattccaggtaaaaagagactaaagaggcatggcgactaaatgtaatacgtgatcccagatgggatatggattagggtaaaataaaatacattattggaaaaaactggtgacatttgattatggactggcctttagatagcaatattctatcaatgttatattccctgagtgtgattattgtactacggttatgtaagaaaatatccttgttttcaggaactatacactgatgtatttagggttaagagagcatgatatttgcaactttattcaaatggttcagaaaaaagaagtacatatgtgtgtgtgttcatatgtatatacatacatatacttaacatatatatagagagagagagagaaagaagagaggaaaacacaggtgtttttcctgctattcttaaaactcttcaataggttagcaactgttttttttaaacttaacctttaggtgggtttctattgctgccttttaattcttgagatgtgtccttggacggaagacctaaatatctttctctctctctctttttttttttttttgagacagagtcttgctctgttgcccaggctggagtgtagtggtgcgatcttggctcactgcaacctccgccttctgggttcgagagatcttcttgcctcagcctcctgagtagggactacaggcacaaaccaccacacctggctcatttctctgttttcagtagagacggggtttcaccatgttggccaggctggtcttggtcccaaagtcctgggtttacaggcatgagccatcacacccagccctctttttcatttctaaaaagtgcttttgtactttgcttcctaaccagattggtccagaaaagggcgtggtgcacctggcgacagcggccgtcctaaacgcggtgtgggacttgtgggccaagcaggagggaaaggtaacccctctcacaaacgctcaggaggctcctgggagctgcacgacactgactttccctacgcacagaggaaagacagacacactgcagcccccaaaaggaaatacagataattgctttggtgtttttttctcctctgagaggttttggcagtaggtagggaactgcaggaggaggagaaagaggagacaggatggcggaaggcgcaggcagcagtagaggggggtgtggggacctggtggctgacagccagcattagctgccaacgcgtttactgtcaggaaaaaatggggactttacacatatgtcttacaaatcctttcttttttacttcaagcctgtctggaagttacttgtggacatggtgagtagcattgttaatgttacaattgtttctgtaaatgaaatggatatcatggatgacatgccttttgatgatcagtaaatatattcaggactatctgttgatcactatagcaatgataaagcaaaaagccaataaaatatgacattccttttctgatatctgacgtaacagatggctgtgctcatgcaggcagggtggcatgaggggaagcagtgagggggtcctgcctcccccactgtgcatgtgtaacacacggtgccagttctctgagcctccattgcctgactatgacaagaggatcatcctaacttctctaggaacctcacaaaattaaagatcaatgagaaaagcacctcataaactctgaaaagccagatgttataatattatgaagatattatccaggccaggcatggtggctcaagcctgtaatcccaatactttggaaggctggaggatggcttgagcccaggagtttcaggctgcagtgagctataattgcaccactgcactcaggtgacagagcaagaccctgtctcaaaaaaagaaaaaagaaaagatactatccagtcactttgacaccaagaataagaacaggccattgtagccgctactgtacaattccagcagggaaggagctcaacactgaattctaaagctatgcacttgactgttttctttctccttgaccttttcatagcaggggtgaacaactggatgctgaggaggaaaaaactgggcaaattaaaggggaatgagcttcagaccccatgcagagctggctgtgagtccgggtttcactgctcaccagctgcatgaccttgagcatgtgacttccccactctgagctgcggtggcctcagtgcaacacctgggtggcggttaaaaacctcgtgatccacaaatgaaggcccttgttattagttggcaaaaaattaaggaaaaacaaagaacaccatggccttgaagagtgttgggcaggagactgctcctcctccggaggaaagtgaagacaggaggctgtcacatcgtctctgacatggagagtggcttccgggccatccgtaggggaaggacacagagctcttgagcccccttctagattcaaggttggcgttttacggggatggaggaggtagccaccaaaagggaatgatttgcaggccaccagaaatgtgcctgaggtcccacctgtggaccctccatttttggatcctgttccctttcaatgccagtactcttttttctttttttctttctttcttttttttttttttagacggagttttcttcttgttgcccaggctacagtacagtggcatgatctcagctcactgcaactgattcaagcgattctcctgtctcagcctcctgagtagctgggattacaggcacccgccaccatgcccagctaattttttgtatttttagtgaaaacggggtttcaccatgttggtcagtctgagctcgaactccggacctcaggtgatccacccatctcagcctcccaaagtgctgggattacagatgtgagccaccgaacctggcccagaactcttagaagtagaatctcagggttgaaagagtttttaggattttcgacagttatggtagagtattattggtcactataagttgttagtgggaatggaactactggctgttttccaactgactgttccgtcagggtggggagaggtctcagcacgaggccccgccgagatgttggtaagtggtcagccaagtgggccgctcgctcccggttcacccactgtgttcctgtcagtgaagtaaacatccccatttgtcaggagaagaagctgccggaggtcacactgctagtgattggtggcccaggggtagggcagccttctttcctctgcagttcactgctccagaaccatctccagcctcatagctcaccgtggacagccctgcggtgtggcgctgatgtacagagtgatgccaggcgttcatctccccgctgagctcctgctgagtgtttgcctggggccaggtcctccttccgggaagtcattttagctggaaagaacagggtgggggcgggtggcaagggatcagagcatgagcgtctgagggcttcgtcaggggcagtgaggagcctctaaaggactctacatttaggaatgacagagtcaaacaatttaacaaagccctaaaggtccctgccaggaaagaatgagccccatgtatcaccataagcaacttcttagaaacataacccacccctgtcatcccagcactttgggaggccaaggagggaggattgcttgaagccaggagctcaagatcaacctggtcaacatagtgagaccccatctctacaaaaataaaaataaattagctgggcatagtggcacatacctggagtcccagctactcaggaggctgaggcaggaggatcacataagccggggagactgaggctgcagtgagctatgatggcatcactgcactccagcctgggcaacagagtgagaccttgtctctaaaaaaagaataataaattttaaaaaacaaaatataacccaccttataattgattcaggcctcttcccctcctgtcacgttgccaggatcccaggacgctggtatcctgcatagatttcaggtacatcactgatgtcctgactgaggaggatgccctaggtgagtttggaagctttctgggatacacgatgtgcacacacagtagtggcatgctttgtttcctaaaagagtgagtgatgctttttatttcttccagaaatactgcagaaaggtcaaattggtaaaaaagaaagaggtgggttgtaagaaaattttcttcattgtttttgctaacattgtccacttttgagtgcccctgtccttttggggtacacattgtcttcccaaatgccctgtgctgagcagctaggccctcaaatcaacattcaagtctgcatggtgaagcctgctgggtatgacctctgactgcagagtttgcttcagccactgctgaaaggaagtttggctttaggattacactgtagggagagccctgggggagcagggcagtccatgagagtatcctgatcacctgggtttgacatcctagtaatttgtggctgggtgtgtgtgtgcagggccggatcaggagaacagctggactctccaggggaaacagcttagctacaggcacttccaattccgaagggccctggaaagtgcaaaatgttgacggcgctgtgttttcacagagaagcaaatgctggcacaaggataccctgcttacacgacatcgtgcgcctggctggggtactcagatgacacgttgaagcaggtgggcattttaacctggctttgtagacagctgaatggggagaaaccaacctgtttttccttctgtcctcataccactactctcagtacctcacttctgacaccagatgtgtatggttttccttctcacgccaaccagttctccacttctctgtggacaccaactgggtgtcctgctattttactcaattctgacagcacatacctggaactagcctcagaccccacaggttaagggctcagtcttacagggctgccctatggcagatgccagtcacaagtccacgttgtcacctgtgcttctgactggctttgcctccgattagaggttcccacaaaccccgctttgagttgaatcatttggtggaatggctcacggaattcagggaaacactacttatgtttactcatttattataaaggatgcaacttaagaacagccaaactgaagagacacacagggcaaggtgtgaggagggggtacagagcttccatgtcccctccaggtgagccacactcccagtacctccacgtgttcaccaacctggaagctctctgaaccctgttccttgggggttttatggaggcttcagtatttagatgtgattcattatttggccattggccatcaattcagccttcagccccctcgcctccccagctatctgggaataggctaaagtttccaaccccacaatcatgcctttcaggtctttctggtccccagccccgtcctgaagctacgtaggggacctcagcagggctctctcattcacgtacaaaagacactcctatcactcaggagatgccaagggttttaggggctgtgtgttgtgtgttaggaaataggggggcagcgatgggggcagagacaaaatatatattccttcttatgtcacatgggcttttgattccagcctctctgggagaaatttaatactttcctgttcacctctctaaatcattttggctgagggcagtggctcacgcctataatcctagcattttgggaggctgaggtgggtggatcacctgaggtcagaagttcaaaaccagcctggccaacatggtgaaaccccgtctctactaaaaatacaaaaaattatctgggcatggtaatgcgtatctgtagtcccagccactcaggaggctgaggcaggagaatcacttgaacccaggaggcaggggttgcaatgagccgagatcacgccactgcactccaacctgggtgacagaacaagagtccgtctcaaaaaacaacaaaaaaattattttggatccaagccctcgttctgaaagtacacaagcaaatgcaaagccattcattttgtggaccgcaggactctgtgacttagtgagtcaccttgggctctggaaggtgacagcctagggtaagattcctgggcagcaccagcggtagacccactgcgagattgagaagtaatgcctatttcatggggtggttttgaggattcagatacatgctgtaagttgcgtcatgctcaaggcaccatggctggcacatggcatgcagtcggcacatggtggatttattactgtttctccttacactgtgcccacttctagagagtggagagagaggctggcttctgcatgttactcttatatccactcattctatggatgccacagaatattctagctttaaaaagagagagatcagtgctatcttccccttccgggaaggttgtgaccattaaaaaaatggttcccatagagatgaggaaagaaagtcaccctacaagtaaaaagtgatctctgtcagccaggctgtttctgctgttaatttcaacaacacatgggtgttactctggtctatgctataaccgtaatgcttgtgaaacagatcagcaatgactgacttcctggtcagaccaaggggctctctccagtgtgtgaccctgtgctcctttcccacagctctgtgcccaggcgctgaaggatggctggaccaggtgagtgtgatgatggacctgactttcccagttggcggcaggagagactcaggcagtaagtctctcctggcagggagccaaggagtaaaaggcacccacgggctaggatcaccctggctcatagggatgcataagagaagtttcctcttaggccaggctctttctctaaaggcaggatgtgagtcctcattagaattataggccatcagagttgaaagaggcttgggagattgtttatttcgggcactaacctagagtagaaatccagtctttactgtcagtaacagcgttgattcagtttctgcatgaacatctccagaggcagcgagcttaacttggtgaggcactttccattctttgagggctttgagtattaggtgggtcttttcttctcttttttttttttttgagatgaagtttcactctcgtcacccaggctggagtgcagtggcgcaatctcggctcagtgcaacctccacctcccggattcaagccattctcctgcctcagcctccctagcagctgggattacagacacccgccaccacacctggctaatttttgtatttttaatagagacagggtttcgctatgttgatcaggctggtcctgaactcctgacctcaggtgatccgcctgcctcagcctcccaaagtgctgggattataggcttgagccactgcacccagccaggtgggtctttaatatcagcaaccctttgcttccatgtaatttccagccagaggtcccagttcccaagagccaggctgttcctcttccacttgagtgccctcctctccctccaggccacctcctttccacactgctcatctgcacttctcccttctgactctcgcctgtgcaggtaaagacctctggccatcctaagaccttctctggatgaacctcgatggttgatgaccctgcatcctgaaacagggcaggatgcagagggaccatcatctcttttgacccagtcactgtgtgtccctcagcacagctcacggtggcactttttgcctgtgacatgtcaccaggcttcctatctgacttgcagccactctggtctctgagcctcctgctactcagtgtgtcctgtggagcaggagctccagcatcacctgggagcttgtgagaaatgcagcctgggcctctccccagacccgctgcctgggaatctgcattggaacaagatcccctagtgattcctatgcgttcttaagttggagaggcactgaattcttgttaatgcctcagctaaataaaggcttgaggagtgagaacttgaaggaggcagcatgaagctgcggaaagtggtgttggcatctgatagaactgaaatcacatcttgccttttcccctcatcccctgcaagtacttgctgtgtgatcaattactcaacctctctgaacttcattttctctcagtagaaataatatgagctttggtcctcctcaaagttgccatatctcagaaggaccagcacagggcaggattcagagcagctgctgtaagtgctggctgtttgccctccctctgcatacccgggggaggctgcagcaatgtggtgagtcagagaaggctgtggggagatttaaagggtctcttcccagcacaggaagcctggcacccagagcctaaggccagccaccctctctggagcatcacggatcatgtagttgaagcctccagctggtacagaagagaacagcaggtgcctgagaatgtgcggcactctgcaagctggggctctttgcaaagcagcaggaggacctcagccaaggaggcgcacaaggagggtaggctgctgttcgagggggcagatgctggcctccccgtggtggtgtcccctcctccacctgccagtgcccacactgaggccagcaacacactcttctgacagcagagtcataaggtgtggacatagaggcccatgtctcaagagaacagctggacatccacagagattaaggagctccctacaagtgtctggatgtggtgtaaaggagacctctgcacggaggctccagccgcactctgctattccctagttacctgatctcatcactttccctcccggaacctcaggcccctgcactgcaggggacagaccatccctgtggccttcctctcactgagttaattcaagacaaagctctcctttgtaaaccagaccctttccattcagtctatcacagtgtggctcactcggcaccccttttcagccccgctctcctcttcagttctcactgtggcttttttgttcttaattccttttcatggcccggcaaaaacggagttaattatattaaagacctgacttccctgtctagctccttaactccaggtcagcagataattgagagtcattgccctgatactgaatgaagagataaagttcccaggtttatttcaagtgacttatctgaagatgaggaaagagcaagaggttactaaaaaacatatctgtgaattgttgacagagacggtcacttctgcagaaactccagatgcccttgccaagtccaggtacaggtctaaactagcaaaccaaatgcattttctaggtttaaagtaaaggtgggtgctgatctccaggatgacatgcgaagatgccaaatcatccgagacatgattggaccggaaaagactttggtaaatatcctctcacaccactaagaagcagtagcctttgtccagggctaaatacaactcgtttcaagattaaagaacattgggaatttaaaaagttaattgtcagaggaagtacacttctgtagtcttgcagtaggcgagctcaaacaaaaataagcaaagggactaatagttttacgttttttaattctgcagaactagttaagtaagtttggggttaaggatcctttcttactaacacagatgtacctgagcaaacagttttcccattggtgctctggtgtgtcaatcatgtaatctcccctcctagctcctcaggtaggagggtgtcagggggccattactgcagaaatgttggaacttcagctgagataaatgtaaggatcagtcatttctgatttgtatttttgtaaaccagttcttacgtgtaaaatattttcataaagtcacagtaagatgtttttatgaggcttcggaggcttttttgcataagttaaaatagaaattttgagttcttgacccaggatcactatttatacatgaattaatgctgctttttttttttaatgaagtcatctgtatccaaataacttatgataaaaattgattctgggctggccagatgctgtggctcatgcctgtaatcctagcactttgggatgcctaggtgagtggattgccggagctcaggagtacaagatcagcctggcaacatggaaaaaccccatctgtaccgaaaaatacaagaaaaaaaagtgttaggattatatggctcatgcctataatcctaacactttgggaggctgaagcaggtggatcacttgaggccaggagtttgggaccagcctgggctacatagcaagactctctctctaaaagaaagaagaaaaaaaaattaaccaggtgtggtggtgcatgtctgtaatccctcctactttggaagatggggcaagaggatcactgagctcaggagttggaggctgcagtgagctacaataataccactgcactccagcatgggcaacagagtgagatccagcctcttaaaaaaaaaaaatccattctgagcatactgtcctctggttttcatagtgtcctgggagagagctcttatcacttagcacattctgtagagatgtccatttctccaagcacgataagatcagggatgaggggctgtcccttaagctgggcacagccatcacctggcttccaagaaggatagtggtacacagagagccagggcctaggagggagaggactggacttgaactcaccattcactagatttattgttcttaagcaagttactgaatttctctgcatgacagttttcttatttgtaaaatgggttaatatgaactgcctcatggggttattattattattttttgagatagggtctcactcagtcacccaggctagagtacagcagcatgatcacacctcactgcagccttgacctcccctggctcaggggatcctcccacctcaaccccctgagtagctgggactacaagtgagagccaccacacccagctaatttttgtattttttgtagagagaggattttgctatgttgcccagcctggtcttgaactcctgggctcaagaaatccacaggctgggccagacgcagtggctcatggctgtaatcccagcactttgggaggccgaggcgggcggatcacaaggtcaggagattgagaccatcctggctaacacggtgaaaccccgtctctactaaaaatacaaaaaaaaatagcctggtgtggtggtgggcgcctgtagtcccagctactcgggaggctgaggcaggagaatggcgtgaacctgggaggcagaggttgcagtgagccgagatagcgccactgcactccagccttggtgacagagcgagactctgtctcaaaaaaaaaaaagaaaaagaaaagaaatccacgggcttcagcctcccagagtgttgagattacaggcatgagccaccatgcctggccagttattataaatattaaatggaacaaaatccataaagtgcctagtggagtaggtgtgccattgtgggagagttaaggctacttattattgtgccagacacacagtgggcaatagtcaataaatgactattgaacaaacaatgttgattgtgcatgattcagaatgtgacaaaatggtttctacgaacagaaccaacactgcaagacacatgtatttgggtggcatctagatggagattggaccagagcccagggccagcgagcacttctcatggcccagcccagggcactgctggacatccagtggctcctcaagcaattcacggctcctcctaaagactgtacctggagccagagtccccgtctcagcagctgctctctggctctttttgttagggccgtgtgctgggcctcagcagaggcgttagggggtctcactcagctgttggtggcactgagtgacagcatttcctccctgggagccgcagccctgctgtgaggttggctcagggctgacctccctgtgaagagtctctttttgcagatgatggatgccaaccagcgctgggatgtgcctgaggcggtggagtggatgtccaagctggccaagttcaagccattgtggattgaggagccaacctcccctgatgacattctggggcacgccaccatttccaaggtaggaaaacggctgctgctgctgtggcagcttatttttctgtttagttttccagagtgctggggacagatcctaaaatttcttcacttgttccctcttgcatttcctgttgaagtagctgaaataattctaatgtgtgacaaatacagggcttacagacctgacattcctttttctacttcagcttatactttgcccttatttctgtttgttttagataaagtaagctgctaaaagttgaagggctaccagcaatttgaaggttaatagacatggttcctatgctttgtaaatacagaaatgtgacagcattttttttttttttgttttttggtggttttttttgttttgttttgttttgagatagagtcttactctgttgcccaggctggagtgcaatggcatgatctcggctcactgcaacctctgcctcccgagttcaagcaattcttctgcctcagcctcctgagtagctgggactacagatgtgtgccaccatgcctggctttttttttttttttttttttggtatttttagtagagatgaggtttcaccacattggccaggcctgtctcgaactcctgacctcagaccatctgcccgccttggcctcccaaagtgctggattacaggagtgagccaccgcgcccggccttgtgttttcatctgataattttttttctcctacacgctaactggtttggcacagtcatgtgccccataacaatgtttcagtcagtgaaagactgcctatataatggcgcagtatatataatcccataagcttataatggagctgaaaaactcattgcccagtgacgttgtagagattgtaatgtggtacaacgcattacctttcctatgtttaagtatgtttagatactggccattgtgttccaattgcctgcagcgttcagaacagtagcatgctgtacaggtttgtagcctgggagcaataggccatgccatatagcctagggcgtgtagtagtctctaccatctagggtcatggacgtacactctatgatgttcacacaatgatgaaacagcccaacggcacatttctcagagggtaaccttgtcattcagtgacacgactgtacattcatgtggcttatagccacatcctgcctgcctaggaacattttttcctgaggtgactttgcatagctatacactccccattttgtgttgatcttacacctttaactctgatggagcagtcttggttccagttctaggagggacaccttgatgcatcccacataaattcatgggtcgtactggaggtgtggagtcggggactcagggaccagttctctgtttctctcagcaaatcagcacatgatctacattatgtgggatactctgccaaagcctgggtttcagaaatgccctccccttccacattgcagcctcgctggagagaacagccgagatatgtgaaacaaagaccggaggatactgggccagggcactgaatgccaagcacagtagaaaagttcattgaggagaacattgggtgtgggctgggacgagggagatggccagagctgactccataaggaaagctaagcctcaggtgagggaagggtgagcaggagccatggagcgaccacagccttcattatttaaacagagcccaaattttctgaggaatcattccacaataggaatctcaggtgaggagccccggggaaacaagacttttcaccttgggtcccacttgctttttcctccttagggctctttcaggttggctgtgccctgctgaatgccagctggcctagcaccaacctgatctctgcctacctgagcatctcacaggaagctcctcagggctctaaccctcccaggttttgcttacatgagggaggccatccccttaggagtatctgaggaaggagcagctgcagagcctgcaggtccaggcgggggcagtggagatgccccagggagcacagggcacatgccagggacaggctgccacgtggggctggattatggggtctgtccactcagaggatgcagccagtcagagtgagccactgcagcttctccgatgaaagaacggcatagtggccaggcatagtggctcacacctgtaaccccagcactttgggaggccgaggtgggtggatcacctgaggtcaggagtttgagaccagcctggccaacatggtgaaacctcgtctctactaaaaatacaaaaattagctggtctcgatcttctgacctcgtgatccgccccaccctatagtcccagctactcggagaggctgaggcaggagaatggcgtgaacccaggaggaggagcttgcagtgagccaaaatcgcaccactgcactccagcctgggtgacagagcgagactccatctcagaaaaaaaaaaaaaattagcagggcgcggtgatgtgtgcctgtaatcccagctactcaggaggctgaggcaggagaatggcttgagcctgggaagtgtgaggttacggtaagccaagtttgcgccattgcactccagcctgggcgacagagcaaatactccttctcaaaaaaaaaaaaaaaaaaaaacacaacagcatagtgacagctgaagcacagataatgtgactggtggctacatgtagagtccattgagacagagggtgtgtgggaggtgaggaatgggcagggagaaacccaggcagggatgggagcgaggaggcttttccaggaatctgagagagataaagggagagggcagcttgaatagagcagattcaggaaatattgaaaaggaggaaaaacatttggcccctagtctgccatatatgcttaaaatggtagaacaaataagtcaaatggcctttcctcctcccccttcctccgtttctccctttctcttctctttggagataaataaccaagagtacttaaattagaaattttaagaagcataaaatgttggcttgaaaaggtgccttagagaccatctgctcaaactaaggccttctgcagatgaggaggccgaggctttgggtggcacaggcggggcttgcccaaggccacacatcccgtgagatgcggggccagcaccggaatcagggatacttggctgctgagtgaagggatttttctgctgagaagttggcttagtctgattattcagatgcctcctctggctctggaatcagtggagttccaacccagtctctaccactttctagctttgtgatccaggaacagttcaaacccggcacacagttttatcattttttataaaatggggataacgctggctcctctcccattggattgagaccaggaatcatttaagtcagtgttttgcacagcacctgacaggtactcagagctccaaaaatgttagctgtcagtgtgattactattaccctaagcaaagggaagggaagccagggaggaaccaaggctacctgtgcggagtagctgtggagtcgcagtcacagtagaggatggatgggagcgcccagagtccaggtggcaggtgacggaggtagtgttcaggggccaggtgagaggacagagagcagcagggctgtgttcaggtgcagagtccagtacctcaccagctgaggactctaccaggtgagcagtggtctcagcctaacctgcagattgaggtctgaggccacccactgagctggaaggaagaggattttttttttttcatggatttttcctgccttaaggaagaggattttggaatcaacaaagacatgaggccaggtgcagtggctcacacctgtaatcccaacactttgggaggccgaggcgggaggatcatctgaggtcaggagtttgagaccagcctggccaacatggcaaaaccccgactctattaaaaatacaaaaaattagccagcatggtggcgtgcacctctaatcccagctactcgggaggctgaggcacgagaatcgcttcagcctggggggtggaggttgcggtgagctaagatcatgccactgcactccagcttgggtgacagagcaagactcggtctcaaaaaaaaaaaaaaaaaaaagatatgagagggttctagaaggaggtttctcagggaggcaagaagaagggaattgatggagtgatgacccacaggaaggagtcgtccaaaggttggaccctgtgagtccacaatgagccactccgaatagccctgtccttatgccactgcgcaggctggagagggaggtgctgtccacgttgggaggagcgcagctggagcatgggccgggacaccgcagaaggagatctgcagagccctggtcaggaacggggctggtggcggcagctcagcagtgctcaccttctcctctgcagatacacagagccctcccgcacgcatgtgttcccctggacatcctttgccagtcttgagccttcacgtggcttaacagcagggccgtttcctccttcagctataaatgtttttaaacattaggagttgcagttcaaaacttaggaaaataacaccaggctgccttctattttataggcactggtcccattaggaattggcattgccacaggagaacaggtgagtgacgcccccaacaggtggatgacgtccccttggggtcagtacacgctgaccagtgaccgaggacacagttgtgtgttaggctccatcacctgctgtactttgagttgggaaattttcatcatcttagaaactgggtcattttatcagagtctagagtcagatatagaaaaagtttgtggctatttctccaatttatatgactaaggtcgggtatctttttcaaagtgtctaattgaaattgaaaaggcagcaatttaaagttgctattgcaagggcagaaaatggtcttaagaaagccagctttcaaattgaataaacatgactgcgttcactttttgagcttataaatgaagcccgagtgcctgccaaaacctgctgcagtcagcccacgagcagagcagcgtgaggagctgattctcagttttcccggcaaaaggagcaatactgctctgccgtggttccgtgttgtcatctgtgccacctgctcatcactgtcaccgtatttcatcctgatgcttcatctcccacttatcagtcgctgtgacagtcattccctcataaatggcgagccagtgtgattttgacctgactcacactgttgcattagcagatttgtaaagaagtgagcacaaggtccctgcccacgctataaaagctcgcctcatgcccagcgagaacaaagaagaaatacagtctgggcttcctgacggccactgatgaataattattggcatagagtggctgcgttgccaggtttagagatcctgaaggccaaggctgactcttctgttggtgttattttcaattctatttccagtgccacaatagagtgatatttaagcaactcctacaggcgaaggccctgcagttcctccagattgacagttgcagactgggcagtgtcaatgagaacctctcagtattgctgatggccaaaaagtttgaaagtaagcgtgctgcagcggctgcagaccagaccttcatttccccactaatcagacacctcccttgatggtttgcaattcacatgcatgggagtctgtagtttgccatttcgatttttttctaactctcatttagctttaatccgggaatttttgatgattttcatcttggaatttccttcctaaatattaataaatgatttaatcacctgtgggcaataagaaaaaccagaaagttccctttcaccccttcctctccctgccctactcttggtattaaatagaaacgatttccttttagttcctgtttgcccccatgctggtggagttggcctctgtgaactggtgcagcacctgattatatttgactacatatcagtttctgcaagccttgaaaataggtcagtaatgtggcattaatactttctgtttcagtagggtccctcaatccaggccagagcttgtaaattctgccttcatgaccagaacacactaagaccttgtccgctggcatgtcctataactctcaggcggagttggttttgctttcacagagacccaccaatgaacggtcattttgcctcctaagatagggtctggtagctgactcactttattttttaagtacattgaaggtaaggcttgcagccacactactcccttaaccagctcctgttttcatcacgtgtattctgtacttctgtcccatctcctcttcccagtactggagtcttccatggtctagacacacatttatttcatcttatttctcagaacgccccaggtgggcttttaaattaggacaatctccttccagtcatctgcacacgtagggttttgcttattccacttttcttgtctcctggaattaaatgtctcacagaaagatcactgcaagtatatagcaaaggcacaaaagcattcactgggaaagggaaacaccaaattcaggactgtgagtgataaatgggacccttgagggtacataggaggcttcagtaataatggtaaccgtttttctcttcaggggggtagtgagtagacaggtgctgtcttttaatatagccgaactattttatactgtattagtctattcttgcactgctataaagaaatacctgagactgggtaatttataaagaaaagaggtttaattggcttacagttctgcaggctgcacgggaagcatagcggcttctgctcagcttctggaaacttacaatcatgatggaaggtgaagggggaacaagcacttgttatggccaagagcagaaggaagagagagtgaggggggaaggtgctacacacttttaaacaacagatcttgtgataactatctcgaacagcaccaaggaacgggtgccaaaccattcatgaaggaccacttcccatgatccaatcacctcccagcagggcctgctgccaacactggggattacagttcaacatgagatttgggcagggacacaaatccaaaacaaatccaaaccatatcagcctgcctgtcacagctgttctataacaggcgatggaagtcaggcagcagagctcggtcacttgccccaagcctcagaactacaaagtggctgacgcagaacctgaacacagattgacctgattctaaatcctctgctcttcatctaaatcatttgtatagctgaaaggaacctcatttggtgattttattttttgggtggggagtatggaatgtattttattgttctgcatctgggtttggttccttagatgtcttggttcttggatggaggtgggtgtgtcccacctccctcagttgtggtcccatggacctgttcggattgttttccaggtacaaagtgtaccgagaaagcctcacagtgctaatgcttcctagatgcccagctgaggcagtgacaaaatggccctcccaaccctacctgccaaaaaaaccccaagcccctggcagctgctgcagccatatgaaaaaatacaaacgcttcttgaaaaatagatcacaaaatgtggtgattttaatctattcatctgacttttgaccagaggaacccaaataattctggatatttacagagtctgaattgatcccttttaaagggcaccacaaaacctctagagggacttcgtgtgttcatgtcatcaaagtccccacctcacattgctatattttagaagaaaaggacctgaggcacagaggtttagggacttgcctagaaacgcatggtaacacagctaagccttggccaacactgtcaattgagtggtactcgctccttctgctttaagttagcaccacgtgaataatctgacttcaggcatcattgccccgatctgattccctcctcctagggtgtgtgagtatgttgaccacctgcatgagcatttcaagtatcccgtgatgatccagcgggcttcctacatgcctcccaaggtaagctgtggcctgagggcccctgtagaagagatgctgccagccactgccacgcctgtctcgtgaactagactgtggagcaccaagctttgactcctgtttgtttgcaatatccactaacaaacggttcttcagtttgtctgtatcaaaatcctcaggcctgagggccagggcttggaggttcaattgcctctgacaaggcttctgtaatactagcctttcctcactagtggagatcttaacatttgcactccttgtgcaaaaaaacctggcaccatctagcaagttagtgacctaaaaagtttggactacaattgtgtggctggggccatttattctgatcatgttcaagagatcatggctcattttcaccaacagaggtcaaactattatcaaagagtttgatgagttaactaactctggcaagtagccagtaaaatatgttcctctgccctattatttccaacagtctccaaacttattttaaaaatattaattcagggctgggcatggtggcttacgcctgtaatcccaacactttgggaggctgaggcaggtggatcatttgaggtcaggtgtttgagaccagcctggccaacatggtgaaaccctgtctctacaaaaaatacaaaaaattagccgggcatggtggcaggtgcctgtgatcccagctacatgggaggctgaggcaggagaatcacttgaacctgggaggtggaggttgcagtgagccaagattgcgccactgcactgcagcctgggcaacggacagtgactccatgtcagaaaaaaaaaaattaattaattgcctctggcttagacgtaaaagcatttcttggagcagcataaatgcataaaatctgtttttgttccaggtggttgttaacaggactcatttttttggtctttgataggatcccggctactcaacagaaatgaaggaggaatctgtaaagaaacaccagtatccagatggtgaagtttggaagaaactccttcctgctcaagaaaattaagtgctcagccccaacaacttttttctttctgaagtgaaagggcttaaaatttcttggaaatagttttacaaaaatggatttaaaaaatcctaccgatcaagatgagttcagctagaagtcataccaccctcaggaatcagctaagtaattattacttgattcttttagcaaatcaatgcacgttatcctacttaatccttaaataagtttagatttaactaacccaaagtccaggaggatgttcttacaaaaatagctatatcaagggctggcacctagacattaaactgtaatttgaaaataagcaacatgttgcataacttgttggaataattccttgttctgtttaacacttgtcataaattagcagaataaaaatagtcgtgcaacaccgggggtatctggtatgcaacgaagggaaaaatatttcactgattaaccccgaagtggttttgcatcttttccttgcttaatctaagcatattattagagaagtcacaccatgctgaagctaatgagggcaaaatggtagtccatagattattttaaaataaccctttaaggttataaaagtttaaaaaaaaaaaaaaaaaactctatcctaaatggtcattatattttgaggataagatgcagttaaaatgagaaaaatagggcaaaatatattcactattatttctaaaatatactcttttaagtagcatccaaaccagaatacagcacatgtttacttaaggagagttctttaatctattttaggaaggaactgagcagataagtggcagtacagaatgaacaaagcgtggacgaatgcagaacacttctttattatagcaacatataaaacaactataactttaaagttcataaccacactctacatcatgatcgatggtgttactcagctccctcagatttgagggaatagcttgtgaaattcttaaaatattctaaaaatattccaaaaatagcttgtgaaattcaccaaccttctttataagtacgtgggattgaaatgcacatacatgtttttgctaagagcacatacatttcattctcctcactttgttcataacctcagcattgtcagataccctcagtgagttaactcaaagccttttattatggaaagaactggcacagttacatttgccagtggcaacatccttaaaaattaataactgataggtcacggacagatttttgacctagttcctttttcttttagagcaaaaagaacttttacctcggcatccagcccaacccctaaagactgacaatatccttcgagctcctttgaaagcaccctaaacagccatttccattttaatagttggatgcggattgtacccttcaatctgaaagtcttcagctttgaagtcatcaattttctcaacttttcgaagaatcctgagctttgggaaaggtctgggttctcgctgaagctaaaaacaaaataaggccattactttgccataattgtacgacctgttgtaattgctcctcatgtccgtgaaacaagtacacaggatgtgatcaacaaagttctattttacaggagtatgatcctgtcgataccttgccgtaggttatgtaacatgattggagcgcaaccagctgttctcttgcacagatcgagagtgaggggtattttgtgacattacacagcatcaggagcctggtgcctcatcaggtgtaagttcttataaccactcttggcaaatttattaaagacaggaacacagtcaatctgtaactcatagtagctctacgtttacttgaattccacaatccctaacccatctgtccctggcagaaagaaggaaagatgacatgcatggacagtgaacagaaagggatgaaagccaggattcctgggatgaacagacagtggcaattaggatgtgaagacaggtcacaacctattactatgtctaaaaacgaccagagcagagagccagagagaataagcctgaagtcacctccactcaaaagcagccaaactccctcaaaggagtaacttttaaaacctggatctaacctggaaggggctaaaaagtgtctggttctgagtttttttccttaaggctcatgaagcagatgaacttacatttttattgccatttcatatcaattgttggctgctataacttagggatttcaacagacttttgaagtttggacctaaatattgtacttaatgtaaaattaacaaaaaatatttatggccagggtggtggcttatgcctgtaattccag

SEQ ID NO: 23530 - DNA, 4192 bp, Homo Sapiens
  misc_feature (1259)..(1259): n is a, c, g, or t
  misc_feature (1389)..(1389): n is a, c, g, or t
  misc_feature (2541)..(2541): n is a, c, g, or t
tgaagccgcgctcccctggaagcgacccaggggaggccaagttgtcagctttttgatcctctactgtgcatctccttgactgccgcatcatgggagtaagttcttcaaacacccatttttgctctatgggaaaaaaacgatttaccaattaatattactcagcacagagatgggggcccggtttccatattttttgcacagctagcaattgggctccctttgctgctgatgggcatcattgtttaggggtgaaggagggggttcttcctcaccttgtaaccagtgcagaaatgaaatagcttagcggcaagaagccgttgaggcggtttcctgaatttccccatctgccacaggccatatttgtggcccgtgcagcttccaaatctcatacacaactgttcccgattcacgtttttctggaccaaggtgaagcaaatttgtggttgtagaaggagccttgttggtggagagtggaaggactgtggctgcaggtgggactttgttgtttggattcctcacagccttggctcctgagaaaggtgaggagggcagtccaagaggggccgctgacttctttcacaagtactatctgttcccctgtcctgtgaatggaagcaaagtgctggattgtccttggaggaaacttaagatgaatacatgcgtgtacctcactttacataagaaatgtattcctgaaaagctgcatttaaatcaagtcccaaattcattgacttaggggagttcagtatttaatgaaaccctatggagaatttatccctttacaatgtgaatagtcatctcctaatttgtttcttctgtctttatgtttttctataacctggattttttaaatcatattaaaattacagatgtgaaaataaagcagaagcaacctttttccctcttcccagaaaaccagtctgtgtttacagacagaagagaaggaagccatagtgtcacttccacacaattatttatttcatgtctttactggacctgaaatttaaactgcaatgccagtcctgcaggagtgctggcattaccctctgcagaacagtgaaaggtattgcactacattatggaatcatgcaaaaggaaaaaaagtttcatgatatctgttgttggcagtttttgtttatctctgacagtttttagttaaatgtttagatcctcagaactacattagtgcctactattaacttactctgtctcttgttaaaggctaaatctgcgcttctccctggtgccagcaggttccnctcacagtcaatgcagtggtatagcatatcctcacatttctagtgcccttgagactgtgctatggaaccaatcttgaacatacatgcattgacttgacaagttactgagtaagcagcatatcagcaaggngccactacagcctactctgccagacactgagcttggggccctagggaagatagagaattatacaaggcaaagtccttctctttagggctcttacaatctatcacttccaaaaagtaaatggtgactgataaaacaattggcagaacctgtttgattactgtgacagtcttaatgataccataaatcaatattagaaagctagttgacttaaagcctgaaataatgggagttttctcctccacttattagaataaggaccctcagtgactaattattgtgggtagggtcaagattaactagttttatacagagttctgctgtaaatagtcattttgcattgattagtgcagttctctgaatcataaagcaagttttacctctctgtacatgtttttgcagacatacttgaaaagctccttaaatctaggtgcttcaattcagcttttcttgagagcacaaatgaaaagctgtggagaaaatgtcctcattaaagtattaaagtgtgggcagaattacaattacaaagtgccagccaccgaataaagataaaagttcagttccttaaaatgagtttttatgagataacagtcagtgatcttggtgttaccgggattccacatggggcagtgggaaagagttcaggttttgaaggtaacctagtttagatttgaattccagctatgtgacattgggtaaatttgtagtagtcctgagcctcagcgtcctcatctataaaatgactggcgaaaatacttcacaagctcattttgagcactttaggaagtaagtgaaagtacctaaaatagcaggcacccaattgatgattttatatcttccttctttgcttgcagtgatttcaggatgtcctcatatctatttataggtctaaaattatatcttaaagtatgttgtagaataaattaaaaggataactaaatcaccatttagattaagcttgacttgcaaactaggaagaagcacctaggcctttctttgaaaatatttttttggttcgttttggtaaagctctataaattggtatctattattttaccaatttttttttagtagtaagtccatttagagaactaaccatattatttatggaataattagcatgaggaaggtataattgcattttttttttttttnagacggagcttgcactgtagccccagctggactgcagtggcgtgatcttggctcactgcaacctccgcctcccaggttcaagcgattctcctgcctcagcctcccgagcagctgagactacaggcgcctgccaccacgcctggccaattttttttttttttagtagagactgcgtttcaccatgttgggcaggctggtcttgaactcctgaccttgtgatccacctgcctcggctctcagagagctgggattacaggtgtgagccgccgtgcccagccattgcatttttattcacatacacattgttaatgtggaacaatttaacactaatctcatcagagagcgagatgaatgtggcaattgctcattttattttgcatatattaaattgagtaggttcagctctaacataccttaagaaaaatgcatatcggtgcactgtatgtatttcaaaatgcctttcctatgattgtcatgtcctcctttaaggcttttccctcaaatttattacaaatttagtatttttagtacttgatgactctaattacatgaatgcacctggaatgacatttgtaacagaagacggtctgacttgctttcagtattcacaagttctttccagtttccaagtcttttcctagcagtaatttaggggagacagaggagtttcatgtaaagagcatgcagtttggagtcagaacctgggtatgactctgtggccttgatgaagcaagttacttaaactcttgagttttagctttctcctttacaatgcatgaatgcctatccccctacaaaacaaagattaaatgtgatgatgtatgccaaggcgctttgtatattgtaaagtgctatataattataagatgttctaaattttcaaggacctaaaccaggcattggcaaacgtttttccagggagtaaatattttacgctttgcatatataatttatggaggtgttgagaggatagattagacacttgaagtactcaggatagtgcctggcatgtaggaagcacctggaaaatattcgctgtgattaccatcagtccattttaccgaggaaggagccaaggtccaggcccactgaagggacttgcataacattacaatagcagtggcagaaccagccatgcttctgcaaatcacaacctctttgagcctctgtcacctgaactgcaaaatgagtgggttagacaaaatcatctgttgggacctcctagttccacggtgctatcattctaccaactggcgccctaaggttgaaagtgcttatctgctttccaatgtggcttccttacagtctggaactgcaatatgcaggagcagtaaactggcagaaaaccaggaatcagagaaagaaaatataatttaactttaaagatgtaaattatatatatagtatattatatatatttttaaagctttatatgcctcaaatatcagggaaaggagccaagtccttggtatttagtttggtgaatacttgcattgaatacatgtcaagatgtcaagacatttttgaatgtgtctcagggatttctatgctacacattcttttaacaaatcaagtatttatgtacacatgttcagattttttgacaaaatgattaaaataatgagatggaaaatgaaaaaaaaaaaaaaaa

SEQ ID NO: 23531 - DNA, 4356 bp, Homo Sapiens
cgaagaggagagagcgcgggcctctaggaaggtatggcctcacaagtcttggtctacccaccatatgtttatcaaactcagtcaagtgccttttgtagtgtgaagaaactcaaagtagagccaagcagttgtgtattccaggaaagaaactatccacggacctatgtgaatggtagaaactttggaaattctcatcctcccactaagggtagtgcttttcagacaaagataccatttaagagacctcgaggacacaacttttcattgcagacaagtgctgttgttttgaaaaacactgcaggtgctacaaaggtcatagcagctcaggcacagcaagctcacgtgcaggcacctcagattggggcgtggcgaaacagattgcatttcctagaaggcccccagcgatgtggattgaagcgcaagagtgaggagttggataatcatagcagcgcaatgcagattgtcgatgaattgtccatacttcctgcaatgttgcaaaccaacatgggaaatccagtgacagttgtgacagctaccacaggatcaaaacagaattgtaccactggagaaggtgactatcagttagtacagcatgaagtcttatgctccatgaaaaatacttacgaagtccttgattttcttggtcgaggcacgtttggccaggtagttaaatgctggaaaagagggacaaatgaaattgtagcaatcaaaattttgaagaatcatccttcttatgcccgtcaaggtcaaatagaagtgagcatattagcaaggctcagtactgaaaatgctgatgaatataactttgtacgagcttatgaatgctttcagcaccgtaaccatacttgtttagtctttgagatgctggaacaaaacttgtatgactttctgaaacaaaataaatttagtcccctgccactaaaagtgattcggcccattcttcaacaagtggccactgcactgaaaaaattgaaaagtcttggtttaattcatgctgatctcaagccagagaatattatgttggtggatcctgttcggcagccttacagggttaaagtaatagactttgggtcggccagtcatgtatcaaagactgtttgttcaacatatctacaatctcggtactacagagctccagagattatattggggttgccattttgtgaagccatagacatgtggtcattgggatgtgtgattgcagaattatttcttggatggccgctctacccaggagccttggagtatgatcagattcgatacatttctcagactcaaggtttgccaggagaacagttgttaaatgtgggtactaaatccacaagatttttttgcaaagaaacagatatgtctcattctggttggagattaaagacattggaagagcatgaggcagagacaggaatgaagtctaaagaagccagaaaatacattttcaacagtctggatgatgtagcgcatgtgaacacagtgatggatttggaaggaagtgatcttttggctgagaaagctgatagaagagaatttgttagtctgttgaagaaaatgttgctgattgatgcagatttaagaattactccagctgagaccctgaaccatccttttgttaatatgaaacatcttctagatttccctcatagcaaccatgtaaagtcctgttttcatattatggatatttgtaagtcccacctaaattcatgtgacacaaataatcacaacaaaacttcacttttaagaccagttgcttcaagcagtactgctacactgactgcaaattttactaaaatcggaacattaagaagtcaggcattgaccacatctgctcattcagttgtgcaccatggaatacctctgcaggcaggaactgctcagtttggttgtggtgatgcttttcagcagacattgattatctgtcccccagctattcaaggtattcctgcaacacatggtaaacccaccagttattcaataagggtagataatacagttccacttgtaactcaggccccagctgtgcagccactacagatccgaccaggagttctttctcagacgtggtctggtagaacacagcagatgctggtgcctgcctggcaacaggtgacacccctggctcctgctactactacactaacttctgagagtgtggctggttcacacaggcttggagactgggggaagatgatttcatgcagcaatcattataactcagtgatgccgcagcctcttctgaccaatcagataactttatctgcccctcagccagttagtgtggggattgcacatgttgtctggcctcagcctgccactaccaagaaaaataaacagtgccagaacaggagtaattcattacagaataccaatatcccacattcagcatttatttctccaaagataattaatgggaaagatgtcgaggaagtaagttgtatagaaacacaggacaatcagaactcagaaggagaggcaagaaattgctgtgaaacatctatcagacaggactctgattcatcagtttcagacaaacagcggcaaaccatcattattgccgactccccgagtcctgcagtgagtgtcatcactatcagcagtgacactgatgaggaagagacttcccagagacattcactcagagaatgtaaaggtagtctagattgtgaagcttgccagagcactttgaatattgatcggatgtgttcattaagtagtcctgatagtactctgagtaccagctcctcagggcagtccagcccatccccctgcaagagaccgaatagtatgtcagatgaagagcaagaaagtagttgtgatacggtggatggctctccgacatctgactcttccgggcatgacagtccatttgcagagagcacttttgtggaggacactcatgaaaacacagaattggtatcctctgctgacacagaaaccaagccagctgtctgttctgttgtggtgccaccagtggaactagaaaatggcttaaatgccgatgagcatatggcaaacacagattctatatgccagccattaataaaaggacgatctgcccctggaagattaaaccagccttctgcagtgggtactcgtcagcaaaaattgacatcagcattccagcagcagcatttgaacttcagtcaggttcagcactttggatctgggcatcaagagtggaatggaaactttgggcacagaagacagcaagcttatattcctactagtgttaccagtaatccattcactctttctcatggaagtcccaatcacacagcagtgcatgcccacctggctggaaatacacacctcggaggacagcctactctacttccatacccatcatcagccaccctcagtagtgctgcaccagtggcccacctgttagcctctccgtgtacctcaagacctatgttaaagcatccaacttataatatctcccatcccagtggcatagttcaccaagtcccagtgggcttaaatccccgtctgttaccatccccaaccattcatcagactcagtacaaaccaatcttcccaccacattcttacattgcagcatcacctgcatatactggatttccactgagtccaacaaaactcagccagtatccatatatgtgaaaaacagtatattggggaagctcaatgatacaaacatttgattaaaaataaaaacatggtatttaatattagccatggcacaagaaaattatttttggaatcatgtagacttgggtgcaatttaaacaactttgagctttaaaaactcacttttgatgtgttttgcacatttggtataacttgtctttggtcatgttatcttcttatgtagtaactctagacaggtgacttatgggagcagaagtccagttttgctcctgctattttttataaattgccttctaactagtgcaagacacgtctacatttgggaagccattctgtgtacagacttagagcaacagatgcacatatgtcagaattacagcatacaagtgaattgtattatccgtgtcttagtgtataaatgttgggtcacttacctaagaaattgagctattgttctttacatttgcatgtgtcttttgcatgggcaaaatgttgcctagactttgctcttaaatgttgttctaataatctcagctgcattgtaaaccgttcctacacatagtgccttaaatatttgaggttgttaatgttattacctatatataaatgttgaggactgcagcacttaaaattcagacctactatttagtttccttttgatagcgtaatgttcatttttgtttttgtgtggtatgatttcaggtagtagctgtttttttccttattaagagggcagcatgtttgctatag

SEQ ID NO: 23532 - DNA, 1799 bp, Homo Sapiens
cgctttttttttttttttttgcttctcttaaaaagtttaagaagaatatgacctcattaaatgtgctgttttatttggaccagtcacacaaaatgtctctctagagttgactttaaagttgtttacagaaatttaaactcaattccagagattgaagttgtccaaacagctcatgggcttagtgtccaaacccctgcccagccttccctttccaagttggtgccacctccaggtagccattggtggttttcctattactgatgtggctgtggaatgataaggtcctagaggggccctggcatttcaggaagcggacctggtattccctgacaaacattgcttaggaaagagggccggagaataagaagccagcacctcatcagtcagccctgcaatgtgagacttccgtagctgttgagagtcactgcaggtgttctttcatcccatctgattttaacccatggttgagacgttccaagttagatctgctgctcttaggtgtggggctgtccacattagggaacttgcctcaaaaacagtccacagtggcaataccggacttctgttcaagctttttaaagtgctgagccttacaaacccctgaaggaaggtgaccctttaagagaggatcatctttttttatatttattttcaccaaatagggtgatgagggttggtttttgttccctcaacccatttgggtaaaataacggatctgattagaaactgttttaaggaggggctgggctcggtggctcacgcctgtaatcccagactttgagaggccaaggcggtcacgaggtcaggagttcgagaccagcctagccaacatggtgaaaccccgtctctacaaaaaatacaaaaattagccgggtgggacacgcctgtaatcccagctactcaagaggctgaggcaggagaatagcttgaacccgggaggcagaggttgcagtgagccgagatcacaccactgcactccagcctgggtgacagagcgaggctccgtctcaaaaaaaaaaaaaaaaaaaattgttttagcgctgggtttcccaaggtgggagagacagacccagcctggagctggcccctggcctgtgtgctgacttcttggggtcctcaaaccactgtatttttctgttgagcctgtacttggggagagatcagtagcatttgaggaagtaagagaaaagaatcatggtacctcagggtttctttccctttactcgctggcagccattgtctgtgggcacctcatgtttttccacactctactgggccgtggaggtaacgatcacccaggccagtctcctctgcctgggatgcgccctctgagaggaggcctagcagggcaggctccctctgggcatccctggatgcagcctctggacacatgcctcctttaaagtgtccgggtgcagctcaggttgagtggaggtagaaggagaaacagacatgtttaccacgcgttttccaaagctcctgatctttcccaagattgtaactgaaaactgctgtctcttgttttgttcgttttgggggtggtggtgctggctgggccatgcttgtgaagtgatgtgtgtctctgatttaacggattcactgttttctctgctaattgagagagcgttatttacattatttatttgttttgacacaagtgctttcagtgttttatcctagctaatggcttcttaaaggtaataaaacccttccaacgtaattggtcagataaaactttttttcttgtatgcttaaataaagcaattagtgaagcacttcaaaaaaaaaaaaaaaaaaaa

SEQ ID NO: 23533 - DNA, 1660 bp, Homo Sapiens
cgccgccgcttttttttttttttggcaagcagtagttattgctttgttggtaaaagttggcgttatttctgaaaagcatacgtgggaatggcaaactgtagaagctgtggccaccggactccaggattttattatctgtattgagatgttcctcgctgccattgctcatcattacacattctcatataaaccatatgtccaagaagcagaagagggctcatgctttgattcctttcttgccatgtgggatgtctcagatattagagatgatatttctgaacaagtaaggcatgttggacggacagtcaggggacatcccaggaaaaaattgtttcccgaggatcaagatcaaaatgaacatacaagtctattatcatcatcatcacaagatgcaatttccattgcttcttctatgccaccttcacccatgggtcactaccaagggtttggacacactgtgactccccagactacacctaccacagctaagatatctgatgaaatccttagtgatactataggagagaaaaaagaaccttcagataaatccgtggattcctgaacagtatggaaaagcaaactgtgcaactactacattatatcattacctggtatcccatggattttgtgcttgggacagaccataaatgatggaaaatgtcaacacaaaaatagctgaaagccaggtacaactactgcatttatatatgtaagttttgtatatcaaaaataattggtctaaatttcctagacttagacttgatttcttaacattagggtatcgcatactcaaatggtagacaatgaccccaactaaatcttcctgatgttacactgctttatcaagaggatggactttttttttttgagacagacagagtcttgctctgtcacccaggctggagtgcagtggcgcaatctcgggtcactgcaagctctgcctcccaagttcatgccattctcctgcctcagcctcccaagtagctgggactacaggcacctgccaccatgcccagctaattttttttttttcagtagagacagggtctcaccatgttagccaggatggtcttgatctgacctcgtgatccgccgacctcggcctcccaaagtgctggaattacaggcgtgagccactgcgcctggccaagaatggacattttttaaaaaaacatcagtacttcctaccactgctgcatgagtataatgctccggaattatcagaaagcataatgcagaaatacgaattagtggaacttaatcatgtgccatataagcttacctaacaaacagttatatccctattcctcaactgaatgtctttcaataaataagaatttatcatttattttctgcaacttttttatgtctcattctttaaacattaaaaacccttaatattttaacaaaaatttcttgattagaggcacagtgaaaaagaagtcaaaaaaaaagttctacttttcatcagtgctattaaaggtggcagcaaatgtaaatcttggctgaatggtcttaattactcattaaaccacagtcagaaagacatataggtgctatttgggaaaactttttattacctaggatggggtttctctaattgctaatcacaaccccactgggtcatgtttgacattttataatgaaaaaaaaaaaaaaa

SEQ ID NO: 23534 - DNA, 1121 bp, Homo Sapiens
atgaatgtcaaaggaaaagtaattctgtcaatgctggttgtctcaactgtgatcattgtgttttgggaatttatcaacagcacagaaggctctttcttgtggatatatcactcaaaaaacccagaagttgatgacagcagtgctcagaagggctggtggtttctgagctggtttaacaatgggatccacaattatcaacaaggggaagaagacatagacaaagaaaaaggaagagaggagaccaaaggaaggaaaatgacacaacagagcttcggctatgggactggtttaatccaaacttgaaggaatccgaataactaaactggactctggttttctgactcagtccttctagaagacctggactgagagatcatgcggttaaggagtgtgtaacaggcggaccacctgttgggactgcgagattctcaaggggaaggactgggtctcatttctcccatctcagcgcttagcaggatgacctggtatagagcagggaactgggaaatgtgggtcaggggatcagacactccagttgggtcttttatataaattaaatggcaaaaggctccatacccttcttcttctttcctaccctccactttatctgcaaaatgggaatgatgataacacccacttcatagaatggtcatgaagatcaaatgagagaataaaagtcaagcacttagcctctggtgcacaataagtattaaataagtatacctattcctccttttccttttttaaaaataatattaccaaatgtccagcttatacacatttacaagacttagctagtgggctatgttagagctactaaaagatctttgacaagctaaaactaagatgcaatgaatgaggtgtaacgaacaagagagttttaagttcagaaatggttacagaagtataagacagctgtgtgggtgttttttggtttttggtttctggtttacaatctcgtcattcaacaaagatgggagttttatagaactaaaagcaccatgtaagctactaaaaacaacaacaaaaaaggctcatcatttctcagtctgaattgacaaaaatgccaatgcaaataaaaatgattactttttattttaaaaaaaaaaaaaaaaaaaaaa

SEQ ID NO: 23535 - DNA, 2667 bp, Homo Sapiens
  misc_feature (2515)..(2515): n is a, c, g, or t
acggggactcggccctgaacgagcaggagaaggagttgcagcggcggctgaagcgtctctacccggccgtggacgaacaagagacgccgctgcctcggtcctggagcccgaaggacaagttcagctacatcggcctctctcagaacaacctgcgggtgcactacaaaggtcatggcaaaaccccaaaagatgccgcgtcagttcgagccacgcatccaataccagcagcctgtgggatttattattttgaagtaaaaattgtcagtaagggaagagatggttacatgggaattggtctttctgctcaaggtgtgaacatgaatagactaccaggttgggataagcattcatatggttaccatggggatgatggacattcgttttgttcttctggaactggacaaccttatggaccaactttcactactggtgatgtcattggctgttgtgttaatcttatcaacaatacctgcttttacaccaagaatggacatagtttaggtattgctttcactgacctaccgccaaatttgtatcctactgtggggcttcaaacaccaggagaagtggtcgatgccaattttgggcaacatcctttcgtgtttgatatagaagactatatgcgggagtggagaaccaaaatccaggcacagatagatcgatttcctatcggagatcgagaaggagaatggcagaccatgatacaaaaaatggtttcatcttatttagtccaccatgggtactgtgccacagcagaggcctttgccagatctacagaccagaccgttctagaagaattagcttccattaagaatagacaaagaattcagaaattggtattagcaggaagaatgggagaagccattgaaacaacacaacagttatacccaagtttacttgaaagaaatcctaatctccttttcacattaaaagtgcgtcagtttatagaaatggtgaatggtacagatagtgaagtacgatgtttgggaggccgaagtccaaagtctcaagacagttatcctgttagtcctcgaccttttagtagtccaagtatgagccccagccatggaatgaatatccacaatttagcatcaggcaaaggaagcaccgcacatttttcaggttttgaaagttgtagtaatggtgtaatatcaaataaagcacatcaatcatattgccatagtaataaacaccagtcatccaacttgaatgtaccagaactaaacagtataaatatgtcaagatcacagcaagttaataacttcaccagtaatgatgtagacatggaaacagatcactactccaatggagttggagaaacttcatccaatggtttcctaaatggtagctctaaacatgaccacgaaatggaagattgtgacaccgaaatggaagttgattcaagtcagttgagacgccagttgtgtggaggaagtcaggccgccatagaaagaatgatccactttggacgagagctgcaagcaatgagtgaacagctaaggagagactgtggcaagaacactgcaaacaaaaaaatgttgaaggatgcattcagtctactagcatattcagatccctggaacagcccagttggaaatcagcttgacccgattcagagagaacctgtgtgctcagctcttaacagtgcaatattagaaacccacaatctgccaaagcaacctccacttgccctagcaatgggacaggccacacaatgtctaggactgatggctcgatcaggaattggatcctgcgcatttgccacagtggaagactacctacattagctatgcatttcaagagctcacacttatattgtggcatatagtcaacatggaagtagaccagctctgctgatttgaaatttagattttttaaattatgtactggggacaggtttttgtcgctttacattgcttcctagtttacagcatgatgcaaatgattttctaacttagtgttaggagaaattattttccatctttaacctcttagttgtctaagagttaaatattactgaatttcagacgttcaaattgatcatcacaaatcctttaaaacaattacctaaaagaaaccaaaaatcctgccttctttgtgggggaggggggagagaggggaaggaaatggaacaagttgtgtttgtgttagcatgtgggtgatgtaaacttcaaattgggagatgttccgacccccattcccaaataagcatcaatcagtgtacctgcaaaatgcataaacatccgccagtttgaatttatagtgttgatgaaagaaatcatttttaatgtgtactgtaaacctgaaatactcaggagctgagtgaatatgtttgttgctacttacaatcccgacctgttagtcccagtagttttgttttaacatggtctttttcaactttgtttcctgtttaactacagatgacttctgttgtagactcacaagtttaactgttgtattataacagtattacatgtcaacggtgtggttatgacctttatttatataaaaaccnaatatttagtcaatttaccgtgtcttaatttaatctttgtacaccttccatttttaagtgcttaaatgagtactatattgcaataaaatgtagtgatataattaaccagccattaaaaatttacttttacagaaaaaaaaaaaaaaaaaaaa

SEQ ID NO: 23536 - DNA, 2255 bp, Homo Sapiens
  misc_feature (119)..(119): n is a, c, g, or t
  misc_feature (130)..(130): n is a, c, g, or t
taatgtttttgtttttaatgtatccatggtttccagttcccctgagaaagtggaaattacccatgctaataaagcaagcgttagtgcgaagacctagctgatgtttggctggtttttangcccgctagcncagtcaccctttataaagcctgccaagtttggagcgtgggtaattttacacgcgggtctccacagatcctgtctacttcggtagatttattactaggaaagtgcgtgggggcactaatttttgtgaattgactaatgcgttagaattttaaaaaccgggtagaacgcagcgcaggaagcgagcgttccccgccgcagcgccggagcgtccagccagaatccccctgcatgcgcagcccctggcgtcttacgtcccacaggccccaccccggcgccttccgtcccgcaggctccgcctttggcgctgggctctgacgtcaccacctgcgccgctcacagtagaaacaggaagtgggaccaaaacaaaggagcggcggccgggagcggacttaccttaccttctctgccttcggcgcgcttctcagccgggccgccgacccaaaggagccgtccgactatgtctaacatggagaaacacctgttcaacctgaagttcgcggccaaagaactgagtaggagtgccaaaaaatgcgataaggaggaaaaggccgaaaaggccaaaattaaaaaggccattcagaagggcaacatggaagttgcgaggatacacgccgaaaatgccatccgccagaagaaccaggcggtgaatttcttgagaatgagtgcgcgagtcgatgcagtggctgccagggtccagacggcggtgacgatgggcaaggtgaccaagtcgatggctggtgtggttaagtcgatggatgcgacattgaagaccatgaatctggagaagatttctgctttgatggacaaattcgagcaccagtttgagactctggacgtccagacgcagcaaatggaagacacgatgagcagcacgacgacgctcaccactccccagaaccaagtggatatgctgctccaggaaatggcagatgaggcgggcctcgacctcaacatggagctgccgcagggccagaccggctccgtgggcacgagcgtggcttcggcggagcaggatgaactgtctcagagactggcccgccttcgggatcaagtgtgacggcagaacccgctctgaggtttcctggccatagccaccctttgaaatgctctctgtgtgttagagagatactataccctagaaactctgaacacgccagaatgctgaaatgcccttctacctttgggtttacagccccctccacataaattaagaaattcagtatttctgcactcttagctggattctaaagttctgtatagctcgtaatgatggtatttttatagcagccttttaacagaactagttaatttcgtgtatatgaatctttctcgaagatctggtcaaaactgtattcagtttcctgcccagaatgatcagattgaaggtggttggtttttattattatttagtgtgattgatagtatctagaatggcaggtggtgcataaaagttaaagagaggggaaagattacttagtttggttatacagttataaacaccatgcagtgtattcggtggactgtgctatttctgtttatcctttgggttttggtttttgtgttttttttttttgccttcacagtgagactgcaaatgattgttctcataacgtatattattaataaatgtggtcctataatttatactgaaattaccttaggatatttttgcataatactctcttactgcttacattctataaatttttcacgtgataattgtctttgcgtaactgggaaaaatgccgaataacttcctttattatctggaaaaattaaatttgttcatttatattttctacttactaaattgagtttttaaaaagacttagtgtgacatttgacagtgtctttcaaacgaacttctctaacaagtttatagttattttcctgtttcaacactattagaagtcttataaattatgctaattagcatggcagtcatgttacacactcttaacattgccaaagaactgttgatttcgtttgagaaaaccctaggactgtgtgtgtgtaggttttgttttgattttaccaccccaaaaatagaaataaaattagaactgcgttttaagttctaatttggcatttattaatttgtccaaaagcaagaactcttggaaatc

SEQ ID NO: 23537 - DNA, 3138 bp, Homo Sapiens
gggcttcgtgttcctgggtgctgaccgtgcactccccgccgcccgaggacttagagctctggaagtagctctccagcttccttcgtactcgggggccggacttgtacacccgcacgaggagcggggacggcgggcgcagaagtgggccaccatatctggaaactacagtctatgctttgaagcgcaaaagggaataaacatttaaagactcccccggggacctggaggatggacttttccatggtggccggagcagcagcttacaatgaaaaatcagagactggtgctcttggagaaaactatagttggcaaattcccattaaccacaatgacttcaaaattttaaaaaataatgagcgtcagctgtgtgaagtcctccagaataagtttggctgtatctctaccctggtctctccagttcaggaaggcaacagcaaatctctgcaagtgttcagaaaaatgctgactcctaggatagagttatcagtctggaaagatgacctcaccacacatgctgttgatgctgtggtgaatgcagccaatgaagatcttctgcatgggggaggcctggccctggccctggtaaaagctggtggatttgaaatccaagaagagagcaaacagtttgttgccagatatggtaaagtgtcagctggtgagatagctgtcacgggagcagggaggcttccctgcaaacagatcatccatgctgttgggcctcggtggatggaatgggataaacagggatgtactggaaagctgcagagggccattgtaagtattctgaattatgtcatctataaaaatactcacattaagacagtagcaattccagccttgagctctgggatttttcagttccctctgaatttgtgtacaaagactattgtagagactatccgggttagtttgcaagggaagccaatgatgagtaatttgaaagaaattcacctggtgagcaatgaggaccctactgttgctgcctttaaagctgcttcagaattcatcctagggaagagtgagctgggacaagaaaccaccccttctttcaatgcaatggtcgtgaacaacctgaccctccagattgtccagggccacattgaatggcagacggcagatgtaattgttaattctgtaaacccacatgatattacagttggacctgtggcaaagtcaattctacaacaagcaggagttgaaatgaaatcggaatttcttgccacaaaggctaaacagtttcaacggtcccagttggtactggtcacaaaaggatttaacttgttctgtaaatatatataccatgtactgtggcattcagaatttcctaaacctcagatattaaaacatgcaatgaaggagtgtttggaaaaatgcattgagcaaaatataacttccatttcctttcctgcccttgggactggaaacatggaaataaagaaggaaacagcagcagagattttgtttgatgaagttttaacatttgccaaagaccatgtaaaacaccagttaactgtaaaatttgtgatctttccaacagatttggagatatataaggctttcagttctgaaatggcaaagaggtccaagatgctgagtttgaacaattacagtgtcccccagtcaaccagagaggagaaaagagaaaatgggcttgaagctagatctcctgccatcaatctgatgggattcaacgtggaagagatgtgtgaggcccacgcatggatccaaagaatcctgagtctccagaaccaccacatcattgagaataatcatattctgtaccttgggagaaaggaacatgacattttgtctcagcttcagaaaacttcaagtgtctccatcacagaaattatcagcccaggaaggacagagttagagattgaaggagcccgggctgacctcattgaggtggttatgaacattgaagatatgctttgtaaagtacaggaggaaatggcaaggaaaaaggagcgaggcctttggcgctcgttaggacagtggactattcagcaacaaaaaacccaagacgaaatgaaagaaaatatcatatttctgaaatgtcctgtgcctccaactcaagagcttctagatcaaaagaaacagtttgaaaaatgtggtttgcaggttctaaaggtggagaagatagacaatgaggtccttatggctgcctttcaaagaaagaagaaaatgatggaagaaaaactgcacaggcaacctgtgagccataggctgtttcagcaagtcccataccagttctgcaatgtggtatgcagagttggctttcaaagaatgtactcgacaccttgcgatccaaaatacggagctggcatatacttcaccaagaacctcaaaaacctggcagagaaggccaagaaaatctctgctgcagataagctgatctatgtgtttgaggctgaagtactcacaggcttcttctgccagggacatccgttaaatattgttcccccaccactgagtcctggagctatagatggtcatgacagtgtggttgacaatgtctccagccctgaaacctttgttatttttagtggcatgcaggctatacctcagtatttgtggacatgcacccaggaatatgtacagtcacaagattactcatcaggaccaatgagaccctttgcacagcatccttggaggggattcgcaagtggcagccctgttgattaatctctacatcattttaacagctggtatggccttaccttgggtgaactaaccaaataatgaccatcgatggctcaaagagtggcttgaatatatcccatgggttatctgtatggactgactgggttattgaaaggactagccacatactagcatcttagtgcctttatctgtctttatgtcttggggttggggtaggtagataccaaatgaaacactttcaggaccttccttcctcttgcagttgttctttaatctcctttactagaggagataaatattttgcatataatgaagaaatttttctagtatataacgcaggccttttattttctaaaatgatgatagtataaaaatgttaggataacagaatgattttagattttccagagaatattataaagtgctttaggtatgaaaataaatcatctttgtctgattaaaaaaaaaaaa

SEQ ID NO: 23538 - DNA, 4973 bp, Homo Sapiens
aggtgcgagtccccactgctggggaggcggcgggccccggctcccctcggccgcctagcccgcctcgcccgcccggggttggcggggagggaacagctgggcggccccagagcccctcggaggacaatgcgcccggcgctcggccaccctcgctcggtctcctccgcgtccggttccttcccgccgcccccggcagccgcccggctgcagcccctcttcctccgcgggggctccttccgcggccggagaggctccggcgacagcagcaccagcaccagcaccagccgcgggggaggcggcggcagacgcggcgggggcggcggctccccgagcagcagcacgggcgccgagcgcgaggacgacgacgagagcctcagcgtcagcaagccgctggtgcccaacgccgcgctcctggggccgccggctcaggtgggcgcccccgccggccccgcgcctgtcgccttctcctcctcagcggccacctcctcctccacctccacgcccacctcctcctgcagcatgacagccgcggacttcggcgggggcgccgcggccggggccgtcgggggccccgggagccgctcggcggggggcgcgggcggcaccgggaccggcagcggcgcctcctgctgcccgtgttgctgctgctgcggctgcccagaccgccccggccgcagaggtcggcgccgcggctgcgcccccagtcccaggtgccgctggggctaccaggcgctgtccgtggtgctgctgctggcgcagggcggcctgctggacctgtacctcatcgccgtcaccgacctgtactggtgctcctggatcgccactgacctggtggtggtggtgggctgggccatcttcttcgccaagaacagccggggccgtcggggcggcgcagccagcggcgcgcacaaccaccacctgcaccaccaccacgccgcgccgcccctgcatctgcccgccccctcggccgctaccgctggggccaaggcacgcggagcccgcgggggcgccggcggcgcggggggcggcctgggggcggccgcggcagcgggcgagttcgccttcgcctacctggcctggcttatctactccatcgccttcactcccaaggtggtgctgatcctgggcacgtccatcctagacctcatcgagctacgcgcgcccttcggcaccacgggcttccgtctcaccatggcgctgtcggtgcccctgctctacagcttggtgcgggccatcagcgaggcgggcgcgcccccgggatcggcaggacccctgctgctgcagccccagcggcaccgcgcggccggatgcttcctgggcacgtgcttggacctgctcgacagcttcacgctggtggagctgatgctggagggccgcgtgccgctgcccgcgcacctgcgctacctgcttatcgccgtctacttcctcaccctcgcctcgccggtgctctggctctacgagctcaacgccgcggccgcagcggctgcatcctggggccaggcctccgggcctggcagctgcagccgccttctgcgcctgctgggcggctgcctggtggacgtgcccttgctggcgctgcgctgcctcctggtggtcagctaccagcagcccctctccatcttcatgctcaagaacctcttcttcctcggctgccggggcctggaggccctggagggctgctgggaccggggcaatcgggcctccccgagtcgggccagagggggctacggtgctccgccctccgcccctccaccacctccgccaccacctcagggaggctcccagctgggccactgcatctcggagaacgaggggggtgctcatggctatgtcaacaccctggctgtggcctctcagaattgagggtgaagggcacgggtccttgtttttgggttgagagtccccaacccccttgtcttctaccttctgtcacctagatttgatcagggtctatttggaagaggtaacccttttcagggctaagggccagggtgtccttctgcaccctggggtgaggacggcttggagggagaccagcagttaacggtgagggaggtaggtgcacttaccctctcctctcttctcctatcctaccccaatcctgacctccaaggggctggtacctctgcttcttgctttgcccacctccactctaattcccatccattaggaggagaggggtgctgggccttggaccttctcccttgcttagaagtgccagcctcttttaggctgtggttagtggccattgtcccatgccttgaaattgacccagaacccactttccactgatgtgtctcttggatttcttccaggtgatagatacaaagtgtatgtctctgtgtgtgtagtgttgttttctcgtgtccaccctgtggccctttgcaatgggtaggagatctggggaggccctgccccctacaccatacttatcaccaccctcctcttttctgcctggatttgtgaccatgaattcccaggaagagctgggcccctgggagctgcccaggtactccccttgaagggagaatctcacccaggatcttcctcaatactgctcctctcttctcagctcagggagaggaggggatccattctctaaggaccaaactgcaccctttcttgggtgagtgagcatttctacctccgtgctttcaacttttgttgcatcatgcactgatgctgcttgcaaaaaatgaagacaaaatactcagaagttgcatttgccatggccactggctccagctggggtttggtgccagtgttattacagggtctgcggagtatcagccattggcttggcctctctctgttcctccctctgcacctagaactcttatccttcctgtggtttggtgccgactgggtcggatctgggcttagagtaatagctttggtgggtttcctggatggatgtgaagttgggcctcccatgggcccaagggagtaggaagccccattccccacctgtccttcctctaggaagtgtagatcagaaagtgaggtggtgacctcccacctctggtctggttaagagtctcactagggccaaggcaggctgcagaactttccctcttcctctcattgagggtgatgacaagagacatccggggactgtgcacttacagtcggtgtggaatgtcactcttgcagtctttgaggcaggataagtatttttacatattttaagggtgcaggaggacagcagctaacaaggccaggaaatactcacttccctccaccctcaacaggatgtggtgggggtgaaacttgaagaatttttgtttccccttctcccttcttacgtttgggaagttttatgtagtgtaacaaactctagacgagttaccagaagatgtggattctagttctgattctgtcactcattggctttgagtgacatatttttatttcctgggcctgttttctcacattaaaaaagtagaagttagatgagtgatctctaaggttgaaggtaatttcagctctcacattcttttgagtttgtggctcttgaaagccctggtcctgatgctccctgtaaaggtggctgggagagaagccagccaggctgcacttgcagaacattccctgctctgtactgggtgtgtgaagccccagcagagaaggccggagggagggcttgggtgcctgggctgggtgtggggcagggcctggcacagctgcagagtgcacagggagggtcagaagtgccaagtcactggccgttaactcagcacccaggccaagcccccgcctcccacttgaagccccctcttacaactgttttgggggcttggagcagaagacacccttgtagacagacataagaggggcagaaggcttgaccagagttctcttgagcctcctcatgctctcagagcagggaacagcggggggaaaatgtttacactccatgcacaatctgtgcttccagtccctcaccctatgtggcccaatagctggctggatttcacacttaattggtatttttttctgccttcttcccctgcccccactgactcctctcctctccctttgattgtactcaaggttctggggcctgggccctgggtgggtaccaacagctgctcgctgttcccatgtcctctctccagctttgctgtgtttctctgctacctaatctcagtgactgtgaaaggacattgtgtctgagccatgcccagccgctggctggccccctgatctgccccccttctattgtttggatggccatctcctgctgggcctccctgactgtaaaatctctgtactgtttgttaggtttttggtgggaggctgtgataagttccaatgagctgccacttccctggatatgtcaagaagctgatggcaacttggccaattctggcagatatcaggcccccagttcagccccagtcaccctcttttacacatgtgggtcaaccactgtgtgctcagagggtcagtcccttcctctgctgtgtttttcttgagtccttgcactcacttcccctgccccagtcacgatgacccctaaagcttcctttgcccttgctttctagggcatccctagtgaaggggcaaacctgagatttctccgtggacctgacagccaaggcagggcactgtctcctgaggccagtgccagcacgtgcatggttcacagaaaaggatcctgggctcagaatctcgagaaccgcctgctcctaacaattcagcaagtcaggggcttcctctctgttagtccccaaatccttacttattttaaaaagactagaccctctctaaagactgttccattttaacatgtcctgattctgcatccgtgggttttgtgaaagagagctagctggcggttagagcctggaagaaggagggaagtggcacctcactagcatttatcacttttttccttctctttttaaaaataaaaccagactctgttctgaaaataaaaaacttgagacttgaaaaaaaaaaaaaaaaaa

SEQ ID NO: 23539 - DNA, 9722 bp, Homo Sapiens
tcatctggaattatgcccgccctgcgccccgctctgctgtgggcgctgctggcgctctggctgtgctgcgcggcccccgcgcatgcattgcagtgtcgagatggctatgaaccctgtgtaaatgaaggaatgtgtgttacctaccacaatggcacaggatactgcaaatgtccagaaggcttcttgggggaatattgtcaacatcgagacccctgtgagaagaaccgctgccagaatggtgggacttgtgtggcccaggccatgctggggaaagccacgtgccgatgtgcctcagggtttacaggagaggactgccagtactcaacatctcatccatgctttgtgtctcgaccctgcctgaatggcggcacatgccatatgctcagccgggatacctatgagtgcacctgtcaagtcgggtttacaggtaaggagtgccaatggacggatgcctgcctgtctcatccctgtgcaaatggaagtacctgtaccactgtggccaaccagttctcctgcaaatgcctcacaggcttcacagggcagaaatgtgagactgatgtcaatgagtgtgacattccaggacactgccagcatggtggcacctgcctcaacctgcctggttcctaccagtgccagtgccctcagggcttcacaggccagtactgtgacagcctgtatgtgccctgtgcaccctcaccttgtgtcaatggaggcacctgtcggcagactggtgacttcacttttgagtgcaactgccttccaggttttgaagggagcacctgtgagaggaatattgatgactgccctaaccacaggtgtcagaatggaggggtttgtgtggatggggtcaacacttacaactgccgctgtcccccacaatggacaggacagttctgcacagaggatgtggatgaatgcctgctgcagcccaatgcctgtcaaaatgggggcacctgtgccaaccgcaatggaggctatggctgtgtatgtgtcaacggctggagtggagatgactgcagtgagaacattgatgattgtgccttcgcctcctgtactccaggctccacctgcatcgaccgtgtggcctccttctcttgcatgtgcccagaggggaaggcaggtctcctgtgtcatctggatgatgcatgcatcagcaatccttgccacaagggggcactgtgtgacaccaaccccctaaatgggcaatatatttgcacctgcccacaaggctacaaaggggctgactgcacagaagatgtggatgaatgtgccatggccaatagcaatccttgtgagcatgcaggaaaatgtgtgaacacggatggcgccttccactgtgagtgtctgaagggttatgcaggacctcgttgtgagatggacatcaatgagtgccattcagacccctgccagaatgatgctacctgtctggataagattggaggcttcacatgtctgtgcatgccaggtttcaaaggtgtgcattgtgaattagaaataaatgaatgtcagagcaacccttgtgtgaacaatgggcagtgtgtggataaagtcaatcgtttccagtgcctgtgtcctcctggtttcactgggccagtttgccagattgatattgatgactgttccagtactccgtgtctgaatggggcaaagtgtatcgatcacccgaatggctatgaatgccagtgtgccacaggtttcactggtgtgttgtgtgaggagaacattgacaactgtgaccccgatccttgccaccatggtcagtgtcaggatggtattgattcctacacctgcatctgcaatcccgggtacatgggcgccatctgcagtgaccagattgatgaatgttacagcagcccttgcctgaacgatggtcgctgcattgacctggtcaatggctaccagtgcaactgccagccaggcacgtcaggggttaattgtgaaattaattttgatgactgtgcaagtaacccttgtatccatggaatctgtatggatggcattaatcgctacagttgtgtctgctcaccaggattcacagggcagagatgtaacattgacattgatgagtgtgcctccaatccctgtcgcaagggtgcaacatgtatcaacggtgtgaatggtttccgctgtatatgccccgagggaccccatcaccccagctgctactcacaggtgaacgaatgcctgagcaatccctgcatccatggaaactgtactggaggtctcagtggatataagtgtctctgtgatgcaggctgggttggcatcaactgtgaagtggacaaaaatgaatgcctttcgaatccatgccagaatggaggaacttgtgacaatctggtgaatggatacaggtgtacttgcaagaagggctttaaaggctataactgccaggtgaatattgatgaatgtgcctcaaatccatgcctgaaccaaggaacctgctttgatgacataagtggctacacttgccactgtgtgctgccatacacaggcaagaattgtcagacagtattggctccctgttccccaaacccttgtgagaatgctgctgtttgcaaagagtcaccaaattttgagagttatacttgcttgtgtgctcctggctggcaaggtcagcggtgtaccattgacattgacgagtgtatctccaagccctgcatgaaccatggtctctgccataacacccagggcagctacatgtgtgaatgtccaccaggcttcagtggtatggactgtgaggaggacattgatgactgccttgccaatccttgccagaatggaggttcctgtatggatggagtgaatactttctcctgcctctgccttccgggtttcactggggataagtgccagacagacatgaatgagtgtctgagtgaaccctgtaagaatggagggacctgctctgactacgtcaacagttacacttgcaagtgccaggcaggatttgatggagtccattgtgagaacaacatcaatgagtgcactgagagctcctgtttcaatggtggcacatgtgttgatgggattaactccttctcttgcttgtgccctgtgggtttcactggatccttctgcctccatgagatcaatgaatgcagctctcatccatgcctgaatgagggaacgtgtgttgatggcctgggtacctaccgctgcagctgccccctgggctacactgggaaaaactgtcagaccctggtgaatctctgcagtcggtctccatgtaaaaacaaaggtacttgtgttcagaaaaaagcagagtcccagtgcctatgtccatctggatgggctggtgcctattgtgacgtgcccaatgtctcttgtgacatagcagcctccaggagaggtgtgcttgttgaacacttgtgccagcactcaggtgtctgcatcaatgctggcaacacgcattactgtcagtgccccctgggctatactgggagctactgtgaggagcaactcgatgagtgtgcgtccaacccctgccagcacggggcaacatgcagtgacttcattggtggatacagatgcgagtgtgtcccaggctatcagggtgtcaactgtgagtatgaagtggatgagtgccagaatcagccctgccagaatggaggcacctgtattgaccttgtgaaccatttcaagtgctcttgcccaccaggcactcggggcctactctgtgaagagaacattgatgactgtgcccggggtccccattgccttaatggtggtcagtgcatggataggattggaggctacagttgtcgctgcttgcctggctttgctggggagcgttgtgagggagacatcaacgagtgcctctccaacccctgcagctctgagggcagcctggactgtatacagctcaccaatgactacctgtgtgtttgccgtagtgcctttactggccggcactgtgaaaccttcgtcgatgtgtgtccccagatgccctgcctgaatggagggacttgtgctgtggccagtaacatgcctgatggtttcatttgccgttgtcccccgggattttccggggcaaggtgccagagcagctgtggacaagtgaaatgtaggaagggggagcagtgtgtgcacaccgcctctggaccccgctgcttctgccccagtccccgggactgcgagtcaggctgtgccagtagcccctgccagcacgggggcagctgccaccctcagcgccagcctccttattactcctgccagtgtgccccaccattctcgggtagccgctgtgaactctacacggcaccccccagcacccctcctgccacctgtctgagccagtattgtgccgacaaagctcgggatggcgtctgtgatgaggcctgcaacagccatgcctgccagtgggatgggggtgactgttctctcaccatggagaacccctgggccaactgctcctccccacttccctgctgggattatatcaacaaccagtgtgatgagctgtgcaacacggtcgagtgcctgtttgacaactttgaatgccaggggaacagcaagacatgcaagtatgacaaatactgtgcagaccacttcaaagacaaccactgtaaccaggggtgcaacagtgaggagtgtggttgggatgggctggactgtgctgctgaccaacctgagaacctggcagaaggtaccctggttattgtggtattgatgccacctgaacaactgctccaggatgctcgcagcttcttgcgggcactgggtaccctgctccacaccaacctgcgcattaagcgggactcccagggggaactcatggtgtacccctattatggtgagaagtcagctgctatgaagaaacagaggatgacacgcagatcccttcctggtgaacaagaacaggaggtggctggctctaaagtctttctggaaattgacaaccgccagtgtgttcaagactcagaccactgcttcaagaacacggatgcagcagcagctctcctggcctctcacgccatacaggggaccctgtcataccctcttgtgtctgtcgtcagtgaatccctgactccagaacgcactcagctcctctatctccttgctgttgctgttgtcatcattctgtttattattctgctgggggtaatcatggcaaaacgaaagcgtaagcatggctctctctggctgcctgaaggtttcactcttcgccgagatgcaagcaatcacaagcgtcgtgagccagtgggacaggatgctgtggggctgaaaaatctctcagtgcaagtctcagaagctaacctaattggtactggaacaagtgaacactgggtcgatgatgaagggccccagccaaagaaagtaaaggctgaagatgaggccttactctcagaagaagatgaccccattgatcgacggccatggacacagcagcaccttgaagctgcagacatccgtaggacaccatcgctggctctcacccctcctcaggcagagcaggaggtggatgtgttagatgtgaatgtccgtggcccagatggctgcaccccattgatgttggcttctctccgaggaggcagctcagatttgagtgatgaagatgaagatgcagaggactcttctgctaacatcatcacagacttggtctaccagggtgccagcctccaggcccagacagaccggactggtgagatggccctgcaccttgcagcccgctactcacgggctgatgctgccaagcgtctcctggatgcaggtgcagatgccaatgcccaggacaacatgggccgctgtccactccatgctgcagtggcagctgatgcccaaggtgtcttccagattctgattcgcaaccgagtaactgatctagatgccaggatgaatgatggtactacacccctgatcctggctgcccgcctggctgtggagggaatggtggcagaactgatcaactgccaagcggatgtgaatgcagtggatgaccatggaaaatctgctcttcactgggcagctgctgtcaataatgtggaggcaactcttttgttgttgaaaaatggggccaaccgagacatgcaggacaacaaggaagagacacctctgtttcttgctgcccgggaggggagctatgaagcagccaagatcctgttagaccattttgccaatcgagacatcacagaccatatggatcgtcttccccgggatgtggctcgggatcgcatgcaccatgacattgtgcgccttctggatgaatacaatgtgaccccaagccctccaggcaccgtgttgacttctgctctctcacctgtcatctgtgggcccaacagatctttcctcagcctgaagcacaccccaatgggcaagaagtctagacggcccagtgccaagagtaccatgcctactagcctccctaaccttgccaaggaggcaaaggatgccaagggtagtaggaggaagaagtctctgagtgagaaggtccaactgtctgagagttcagtaactttatcccctgttgattccctagaatctcctcacacgtatgtttccgacaccacatcctctccaatgattacatcccctgggatcttacaggcctcacccaaccctatgttggccactgccgcccctcctgccccagtccatgcccagcatgcactatctttttctaaccttcatgaaatgcagcctttggcacatggggccagcactgtgcttccctcagtgagccagttgctatcccaccaccacattgtgtctccaggcagtggcagtgctggaagcttgagtaggctccatccagtcccagtcccagcagattggatgaaccgcatggaggtgaatgagacccagtacaatgagatgtttggtatggtcctggctccagctgagggcacccatcctggcatagctccccagagcaggccacctgaagggaagcacataaccacccctcgggagcccttgccccccattgtgactttccagctcatccctaaaggcagtattgcccaaccagcgggggctccccagcctcagtccacctgccctccagctgttgcgggccccctgcccaccatgtaccagattccagaaatggcccgtttgcccagtgtggctttccccactgccatgatgccccagcaggacgggcaggtagctcagaccattctcccagcctatcatcctttcccagcctctgtgggcaagtaccccacacccccttcacagcacagttatgcttcctcaaatgctgctgagcgaacacccagtcacagtggtcacctccagggtgagcatccctacctgacaccatccccagagtctcctgaccagtggtcaagttcatcaccccactctgcttctgactggtcagatgtgaccaccagccctacccctgggggtgctggaggaggtcagcggggacctgggacacacatgtctgagccaccacacaacaacatgcaggtttatgcgtgagagagtccacctccagtgtagagacataactgacttttgtaaatgctgctgaggaacaaatgaaggtcatccgggagagaaatgaagaaatctctggagccagcttctagaggtaggaaagagaagatgttcttattcagataatgcaagagaagcaattcgtcagtttcactgggtatctgcaaggcttattgattattctaatctaataagacaagtttgtggaaatgcaagatgaatacaagccttgggtccatgtttactctcttctatttggagaataagatggatgcttattgaagcccagacattcttgcagcttggactgcattttaagccctgcaggcttctgccatatccatgagaagattctacactagcgtcctgttgggaattatgccctggaattctgcctgaattgacctacgcatctcctcctccttggacattcttttgtcttcatttggtgcttttggttttgcacctctccgtgattgtagccctaccagcatgttatagggcaagacctttgtgcttttgatcattctggcccatgaaagcaactttggtctcctttcccctcctgtcttcccggtatcccttggagtctcacaaggtttactttggtatggttctcagcacaaacctttcaagtatgttgtttctttggaaaatggacatactgtattgtgttctcctgcatatatcattcctggagagagaaggggagaagaatacttttcttcaacaaattttgggggcaggagatcccttcaagaggctgcaccttaatttttcttgtctgtgtgcaggtcttcatataaactttaccaggaagaagggtgtgagtttgttgtttttctgtgtatgggcctggtcagtgtaaagttttatccttgatagtctagttactatgaccctccccacttttttaaaaccagaaaaaggtttggaatgttggaatgaccaagagacaagttaactcgtgcaagagccagttacccacccacaggtccccctacttcctgccaagcattccattgactgcctgtatggaacacatttgtcccagatctgagcattctaggcctgtttcactcactcacccagcatatgaaactagtcttaactgttgagcctttcctttcatatccacagaagacactgtctcaaatgttgtacccttgccatttaggactgaactttccttagcccaagggacccagtgacagttgtcttccgtttgtcagatgatcagtctctactgattatcttgctgcttaaaggcctgctcaccaatctttctttcacaccgtgtggtccgtgttactggtatacccagtatgttctcactgaagacatggactttatatgttcaagtgcaggaattggaaagttggacttgttttctatgatccaaaacagccctataagaaggttggaaaaggaggaactatatagcagcctttgctattttctgctaccatttcttttcctctgaagcggccatgacattccctttggcaactaacgtagaaactcaacagaacattttcctttcctagagtcaccttttagatgataatggacaactatagacttgctcattgttcagactgattgcccctcacctgaatccactctctgtattcatgctcttggcaatttctttgactttcttttaagggcagaagcattttagttaattgtagataaagaatagttttcttcctcttctccttgggccagttaataattggtccatggctacactgcaacttccgtccagtgctgtgatgcccatgacacctgcaaaataagttctgcctgggcattttgtagatattaacaggtgaattcccgactcttttggtttgaatgacagttctcattccttctatggctgcaagtatgcatcagtgcttcccacttacctgatttgtctgtcggtggccccatatggaaaccctgcgtgtctgttggcataatagtttacaaatggttttttcagtcctatccaaatttattgaaccaacaaaaataattacttctgccctgagataagcagattaagtttgttcattctctgctttattctctccatgtggcaacattctgtcagcctctttcatagtgtgcaaacattttatcattctaaatggtgactctctgcccttggacccatttattattcacagatggggagaacctatctgcatggaccctcaccatcctctgtgcagcacacacagtgcagggagccagtggcgatggcgatgactttcttcccctgg

SEQ ID NO: 23540 - DNA, 7693 bp, Homo Sapiens
atgccgccgctcctggcgcccctgctctgcctggcgctgctgcccgcgctcgccgcacgaggcccgcgatgctcccagcccggtgagacctgcctgaatggcgggaagtgtgaagcggccaatggcacggaggcctgcgtctgtggcggggccttcgtgggcccgcgatgccaggaccccaacccgtgcctcagcaccccctgcaagaacgccgggacatgccacgtggtggaccgcagaggcgtggcagactatgcctgcagctgtgccctgggcttctctgggcccctctgcctgacacccctggacaacgcctgcctcaccaacccctgccgcaacgggggcacctgcgacctgctcacgctgacggagtacaagtgccgctgcccgcccggctggtcagggaaatcgtgccagcaggctgacccgtgcgcctccaacccctgcgccaacggtggccagtgcctgcccttcgaggcctcctacatctgccactgcccacccagcttccatggccccacctgccggcaggatgtcaacgagtgtggccagaagcccaggctttgccgccacggaggcacctgccacaacgaggtcggctcctaccgctgcgtctgccgcgccacccacactggccccaactgcgagcggccctacgtgccctgcagcccctcgccctgccagaacgggggcacctgccgccccacgggcgacgtcacccacgagtgtgcctgcctgccaggcttcaccggccagaactgtgaggaaaatatcgacgattgtccaggaaacaactgcaagaacgggggtgcctgtgtggacggcgtgaacacctacaactgcccgtgcccgccagagtggacaggtcagtactgtaccgaggatgtggacgagtgccagctgatgccaaatgcctgccagaacggcgggacctgccacaacacccacggtggctacaactgcgtgtgtgtcaacggctggactggtgaggactgcagcgagaacattgatgactgtgccagcgccgcctgcttccacggcgccacctgccatgaccgtgtggcctccttttactgcgagtgtccccatggccgcacaggtctgctgtgccacctcaacgacgcatgcatcagcaacccctgtaacgagggctccaactgcgacaccaaccctgtcaatggcaaggccatctgcacctgcccctcggggtacacgggcccggcctgcagccaggacgtggatgagtgctcgctgggtgccaacccctgcgagcatgcgggcaagtgcatcaacacgctgggctccttcgagtgccagtgtctgcagggctacacgggcccccgatgcgagatcgacgtcaacgagtgcgtctcgaacccgtgccagaacgacgccacctgcctggaccagattggggagttccagtgcatgtgcatgcccggctacgagggtgtgcactgcgaggtcaacacagacgagtgtgccagcagcccctgcctgcacaatggccgctgcctggacaagatcaatgagttccagtgcgagtgccccacgggcttcactgggcatctgtgccagtacgatgtggacgagtgtgccagcaccccctgcaagaatggtgccaagtgcctggacggacccaacacttacacctgtgtgtgcacggaagggtacacggggacgcactgcgaggtggacatcgatgagtgcgaccccgacccctgccactacggctcctgcaaggacggcgtcgccaccttcacctgcctctgccgcccaggctacacgggccaccactgcgagaccaacatcaacgagtgctccagccagccctgccgcctacggggcacctgccaggacccggacaacgcctacctctgcttctgcctgaaggggaccacaggacccaactgcgagatcaacctggatgactgtgccagcagcccctgcgactcgggcacctgtctggacaagatcgatggctacgagtgtgcctgtgagccgggctacacagggagcatgtgtaacagcaacatcgatgagtgtgcgggcaacccctgccacaacgggggcacctgcgaggacggcatcaatggcttcacctgccgctgccccgagggctaccacgaccccacctgcctgtctgaggtcaatgagtgcaacagcaacccctgcgtccacggggcctgccgggacagcctcaacgggtacaagtgcgactgtgaccctgggtggagtgggaccaactgtgacatcaacaacaacgagtgtgaatccaacccttgtgtcaacggcggcacctgcaaagacatgaccagtggcatcgtgtgcacctgccgggagggcttcagcggtcccaactgccagaccaacatcaacgagtgtgcgtccaacccatgtctgaacaagggcacgtgtattgacgacgttgccgggtacaagtgcaactgcctgctgccctacacaggtgccacgtgtgaggtggtgctggccccgtgtgcccccagcccctgcagaaacggcggggagtgcaggcaatccgaggactatgagagcttctcctgtgtctgccccacggctggggccaaagggcagacctgtgaggtcgacatcaacgagtgcgttctgagcccgtgccggcacggcgcatcctgccagaacacccacggcgsstaccgctgccactgccaggccggctacagtgggcgcaactgcgagaccgacatcgacgactgccggcccaacccgtgtcacaacgggggctcctgcacagacggcatcaacacggccttctgcgactgcctgcccggcttccggggcactttctgtgaggaggacatcaacgagtgtgccagtgacccctgccgcaacggggccaactgcacggactgcgtggacagctacacgtgcacctgccccgcaggcttcagcgggatccactgtgagaacaacacgcctgactgcacagagagctcctgcttcaacggtggcacctgcgtggacggcatcaactcgttcacctgcctgtgtccacccggcttcacgggcagctactgccagcacgtagtcaatgagtgcgactcacgaccctgcctgctaggcggcacctgtcaggacggtcgcggtctccacaggtgcacctgcccccagggctacactggccccaactgccagaaccttgtgcactggtgtgactcctcgccctgcaagaacggcggcaaatgctggcagacccacacccagtaccgctgcgagtgccccagcggctggaccggcctttactgcgacgtgcccagcgtgtcctgtgaggtggctgcgcagcgacaaggtgttgacgttgcccgcctgtgccagcatggagggctctgtgtggacgcgggcaacacgcaccactgccgctgccaggcgggctacacaggcagctactgtgaggacctggtggacgagtgctcacccagcccctgccagaacggggccacctgcacggactacctgggcggctactcctgcaagtgcgtggccggctaccacggggtgaactgctctgaggagatcgacgagtgcctctcccacccctgccagaacgggggcacctgcctcgacctccccaacacctacaagtgctcctgcccacggggcactcagggtgtgcactgtgagatcaacgtggacgactgcaatccccccgttgaccccgtgtcccggagccccaagtgctttaacaacggcacctgcgtggaccaggtgggcggctacagctgcacctgcccgccgggcttcgtgggtgagcgctgtgagggggatgtcaacgagtgcctgtccaatccctgcgacgcccgtggcacccagaactgcgtgcagcgcgtcaatgacttccactgcgagtgccgtgctggtcacaccgggcgccgctgcgagtccgtcatcaatggctgcaaaggcaagccctgcaagaatgggggcacctgcgccgtggcctccaacaccgcccgcgggttcatctgcaagtgccctgcgggcttcgagggcgccacgtgtgagaatgacgctcgtacctgcggcagcctgcgctgcctcaacggcggcacatgcatctccggcccgcgcagccccacctgcctgtgcctgggccccttcacgggccccgaatgccagttcccggccagcagcccctgcctgggcggcaacccctgctacaaccaggggacctgtgagcccacatccgagagccccttctaccgttgcctgtgccccgccaaattcaacgggctcttgtgccacatcctggactacagcttcgggggtggggccgggcgcgacatccccccgccgctgatcgaggaggcgtgcgagctgcccgagtgccaggaggacgcgggcaacaaggtctgcagcctgcagtgcaacaaccacgcgtgcggctgggacggcggtgactgctccctcaacttcaatgacccctggaagaactgcacgcagtctctgcagtgctggaagtacttcagtgacggccactgtgacagccagtgcaactcagccggctgcctcttcgacggctttgactgccagcgtgcggaaggccagtgcaaccccctgtacgaccagtactgcaaggaccacttcagcgacgggcactgcgaccagggctgcaacagcgcggagtgcgagtgggacgggctggactgtgcggagcatgtacccgagaggctggcggccggcacgctggtggtggtggtgctgatgccgccggagcagctgcgcaacagctccttccacttcctgcgggagctcagccgcgtgctgcacaccaacgtggtcttcaagcgtgacgcacacggccagcagatgatcttcccctactacggccgcgaggaggagctgcgcaagcaccccatcaagcgtgccgccgagggctgggccgcacctgacgccctgctgggccaggtgaaggcctcgctgctccctggtggcagcgagggtgggcggcggcggagggagctggaccccatggacgtccgcggctccatcgtctacctggagattgacaaccggcagtgtgtgcaggcctcctcgcagtgcttccagagtgccaccgacgtggccgcattcctgggagcgctcgcctcgctgggcagcctcaacatcccctacaagatcgaggccgtgcagagtgagaccgtggagccgcccccgccggcgcagctgcacttcatgtacgtggcggcggccgcctttgtgcttctgttcttcgtgggctgcggggtgctgctgtcccgcaagcgccggcggcagcatggccagctctggttccctgagggcttcaaagtgtctgaggccagcaagaagaagcggcgggagcccctcggcgaggactccgtgggcctcaagcccctgaagaacgcttcagacggtgccctcatggacgacaaccagaatgagtggggggacgaggacctggagaccaagaagttccggttcgaggagcccgtggttctgcctgacctggacgaccagacagaccaccggcagtggactcagcagcacctggatgccgctgacctgcgcatgtctgccatggcccccacaccgccccagggtgaggttgacgccgactgcatggacgtcaatgtccgcgggcctgatggcttcaccccgctcatgatcgcctcctgcagcgggggcggcctggagacgggcaacagcgaggaagaggaggacgcgccggccgtcatctccgacttcatctaccagggcgccagcctgcacaaccagacagaccgcacgggcgagaccgccttgcacctggccgcccgctactcacgctctgatgccgccaagcgcctgctggaggccagcgcagatgccaacatccaggacaacatgggccgcaccccgctgcatgcggctgtgtctgccgacgcacaaggtgtcttccagatcctgatccggaaccgagccacagacctggatgcccgcatgcatgatggcacgacgccactgatcctggctgcccgcctggccgtggagggcatgctggaggacctcatcaactcacacgccgacgtcaacgccgtagatgacctgggcaagtccgccctgcactgggccgccgccgtgaacaatgtggatgccgcagttgtgctcctgaagaacggggctaacaaagatatgcagaacaacagggaggagacacccctgtttctggccgcccgggagggcagctacgagaccgccaaggtgctgctggaccactttgccaaccgggacatcacggatcatatggaccgcctgccgcgcgacatcgcacaggagcgcatgcatcacgacatcgtgaggctgctggacgagtacaacctggtgcgcagcccgcagctgcacggagccccgctggggggcacgcccaccctgtcgcccccgctctgctcgcccaacggctacctgggcagcctcaagcccggcgtgcagggcaagaaggtccgcaagcccagcagcaaaggcctggcctgtggaagcaaggaggccaaggacctcaaggcacggaggaagaagtcccaggatggcaagggctgcctgctggacagctccggcatgctctcgcccgtggactccctggagtcaccccatggctacctgtcagacgtggcctcgccgccactgctgccctccccgttccagcagtctccgtccgtgcccctcaaccacctgcctgggatgcccgacacccacctgggcatcgggcacctgaacgtggcggccaagcccgagatggcggcgctgggtgggggcggccggctggcctttgagactggcccacctcgtctctcccacctgcctgtggcctctggcaccagcaccgtcctgggctccagcagcggaggggccctgaatttcactgtgggcgggtccaccagtttgaatggtcaatgcgagtggctgtcccggctgcagagcggcatggtgccgaaccaatacaaccctctgcgggggagtgtggcaccaggccccctgagcacacaggccccctccctgcagcatggcatggtaggcccgctgcacagtagccttgctgccagcgccctgtcccagatgatgagctaccagggcctgcccagcacccggctggccacccagcctcacctggtgcagacccagcaggtgcagccacaaaacttacagatgcagcagcagaacctgcagccagcaaacatccagcagcagcaaagcctgcagccgccaccaccaccaccacagccgcaccttggcgtgagctcagcagccagcggccacctgggccggagcttcctgagtggagagccgagccaggcagacgtgcagccactgggccccagcagcctggcggtgcacactattctgccccaggagagccccgccctgcccacgtcgctgccatcctcgctggtcccacccgtgaccgcagcccagttcctgacgcccccctcgcagcacagctactcctcgcctgtggacaacacccccagccaccagctacaggtgcctgagcaccccttcctgaccccttcgccggagtcgcccgaccaatggtcgtcctcgtcgccgcactctaatgtgtctgactggtctgagggcgtgtcgtcgcccccgacctccatgcagtcccagatcgcgcgcatcccggaggcgttcaagtaatagctcgaggtgccagcagctc

SEQ ID NO: 23541 - DNA, 1074 bp, Homo Sapiens
gggagttggagggaggatgggaatatttttaacactttgttttcctgtgcagaaacataataccagttttcgcagaaatgtgtctcaatctgtgactaccaaagccctcctcagtccttccctcagagggacacatttgctgtttctcccgcaagcagatgttgtggatgaggcgatagactccttggcaagaacgaaaggtgtgatgaaacctccctgctcggaagggtctccgtggaggtgtcctcatttcacatgctgggttttgcaagcgaggaagccaggcagtggaggaactagagagaggcaggcgtgtgtgtggacaagcgctggagccgcagccctcagactggcacgggaacgccagcgttgggtgttcagattccacgcgtatgtctgggctcactcacagcatggccgagtgtctgcagtgctggtcctgacccttccagagcagcagtggacagatgagataagactgtttcagaaacaaagatggccacagccttcctaacaagcaggtcatctggccatgtctgtattgtaactggtaaaaggcttcaagtcagattgatgatcaagaaaagtcaaaaccccagcccaagattgggaaagcaggtggtggttccaagcttttaaaaaattattgaagctctccatcctgttctgtgagtgtgtcttctctttctccttcacgtcatagccgtgacccaccgttcatctctgctcttgcgtaaagatgaccgatggagtccaaagccaagtggcttcaccagctgacaagccaccctcctgcagcctgagtttcacagtccactgggttcgttgtcatgcggtgtttgaatggttaagcccttgcagtatttcagatcgggcaaaaaatatcggatgcacatagcagaaccattggtggtatttatagctttgctttgtactcctcactgtttctgcctacgcaaaatatccatgtttcctctgagaaatctgttgtggactgaaagcgctgctggctgtgaaatttaataaagtgtgtatgctttgctggaaaaaaaaaaaaaaaaaaaaaaaaaaaaa

SEQ ID NO: 23542 - DNA, 2879 bp, Homo Sapiens
cctcatggatgaacttcaggatgttcagctcacagagatcaaaccacttctaaatgataagaatggtacaagaaacttccaggactttgactgtcagggacatgatatagaaacaactcatggtgtggtccacgtcactataagaggcttacccaaaggaaacagaccagttatactaacatatcatgacattggcctcaaccataaatcctgtttcaatgcattctttaactttgaggatatgcaagagatcacccagcactttgctgtctgtcatgtggatgccccaggccagcaggaaggtgcaccctctttcccaacagggtatcagtaccccacaatggatgagctggctgaaatgctgcctcctgttcttacccacctaagcctgaaaagcatcattggaattggagttggagctggagcttacatcctcagcagatttgcactcaaccatccagagcttgtggaaggccttgtgctcattaatgttgacccttgcgctaaaggctggattgactgggcagcttccaaactctctggcctgacaaccaatgttgtggacattattttggctcatcactttgggcaggaagagttacaggccaacctggacctgatccaaacctacagaatgcatattgcccaagacatcaaccaagacaacctgcagctcttcttgaattcctacaatggacgcagagacctggagatcgaaagacccatactgggccaaaatgataacaaatcaaaaacattaaagtgttctactttactggtggtaggggacaattcgcctgcagttgaggctgtggtcgaatgcaattcccgcctgaaccctataaatacaactttgctaaagatggcggactgtgggggactgccccaggtagttcagcctgggaagctcaccgaggccttcaagtactttttgcagggaatgggctacataccatctgccagcatgactcggctcgcccgatcacgaacccactcaacctcgagtagcctcggctctggagaaagtcccttcagccggtctgtcaccagcaatcagtcagatggaactcaagaatcctgtgagtcccctgatgtcctggacagacaccagaccatggaggtgtcctgctaagcagatgctcctcccctggaccattgcaagtccatccttcaaatgaccactccataatataacatttcatccagtaaactggcctctactatctttaactcatgcatggccactgaacctctctctagtagcctggatttatcattctctctgcctgcccacccccttttttgtatagcccaagaaccacttccatgccatactgtaacattccaacatctttagctgatcagatctctccatatcctctcttgccagctttttcccgtgctcccccaactatgtatcagataagattctttgatcccgactctgtgtgtgcgagcacgcgtgtctgtgtttgtgtgtgcatagttctgtggttttagacacgctttcttgtagtgcttctgcaaaaaacaaaaaagggacttattttgcattctcaatggtgtttttaagggaattaggcagaacagatttctaggttgggtaggccactgcattctcttttgtttgcaaattggtcaacaaaatttgcaaagtgatttcaggagagagcagctttgaggaatgtggaaaatcataattgccgtctggaccattgattgattgtgaccagtagcagaagggtgcctgttacatagagaggctccttctgtccaaatgaatttctgtatactcttctataaataaaagggaggaatatattctgctggaagcccatgaaccatcgctgaggttctgatacaacatagagttttttccaaggagtgaatgtggtttaattactggactctcttagcacaggaaggtggaaacaaaatgccaggcctctgctctgaagagcaaaactgctgtcgctgcagtatctgataccagacatccacatatccacaagaagtgcctcttaggtctgtgacagagagtgtgtctccattcctcagttcccagaaaggggagaggtttggcctaaaaagcatgtagatgggggagaaatgggtggggggagaggaacagccattaacacagtatcatgtttaacaagtatagccttgatttcagtagatgtaatggaagccaaattaaattgatacagaacccatttctcagagtctttttttttttttgagacagagtctcgctgttacccaggctggagtgcaatggcgcaaacttggctcactgcaacctctgccccctgggttcaagcgattctcctgcctcagcctcccgagtagctgagactacaggcacctgccaccatacccagctaagttatgtatttttagtagagatggagtttcaccatgttggccaggctggtctcaaactcctgacctcaggtgatccacctgcctcagcctcccaaagtgctgggattacaggcatgagtcattgctcccagccattagaaagattgttaatcctatgaactcccttttgtaggagagaaagggccaatctgtaggggtagccctgtccaggtaaagttgttttcagcctcatgtctactgttaggtgagggagtcacagccagacagagagtattgctggagggtgagagaattgtggagaccaactaccacatagcaagagcccagctcttgggagcattgagatgtaagctcagggttacacagttccaaatcttgggaaggggcttttcagacagactgtttgctttctgctgagataaggaatgcatcactctgccagagtatgactttttacagattattaaataaagctgcatatgtctcattgt

SEQ ID NO: 23543 - DNA, 2217 bp, Homo Sapiens
ggcacgagggtagccccgcgacagctgggccgagggtgcgggcctgcgctccctcggctcctggcgcgggctcggggagaggggtggaagatgtctatggatgtgacattcctggggacgggtgcagcatacccatctccaacccggggtgcctctgctgtggtccttcggtgtgaaggcgagtgctggctctttgactgtggggagggaacacagacacagcttatgaaaagccaacttaaagcagggagaattaccaagatcttcatcacacaccttcatggagaccatttctttggccttcctgggctcctctgcacaatcagcctgcagagtggctccatggtgtccaaacagcctattgaaatctatggccctgtagggcttcgggactttatctggcgaaccatggaactctctcacacggagctggtcttccattatgtggttcatgaactggttcctacagcagatcaatgtcctgcagaagaactaaaagaatttgcgcatgtgaatagagcagacagtcctcccaaagaggaacaaggaagaactatcctgttagactcagaagaaaactcataccttctgtttgatgatgaacaatttgttgtaaaagcatttcgcctctttcacagaattccctcatttgggttttcagtcgtggaaaagaaacgcccaggtaaactcaatgcacagaaacttaaagaccttggtgttccaccaggtcctgcctatgggaagctgaaaaatggaatttctgttgttctggaaaatggggttacaatttctccccaagatgtcttaaaaaagcctattgttggaagaaaaatctgcatattgggtgactgctctggggttgtgggtgatggaggagtaaaactgtgctttgaagcagacctgttgatccacgaagcaaccctggatgatgcccagatggacaaagcaaaggagcatggccacagcacaccacagatggcagcaacatttgcaaagttgtgccgtgcaaagaggctggttctgactcacttcagtcagaggtacaaaccagttgccttggccagagaaggagaaacagatggcattgcagaactaaaaaagcaagctgaatcagtgttagatctccaagaagtgactctagcagaagattttatggtgataagcattccaatcaagaaatgaaaccagtgttcctgagtgcacactgacatgtctgtgaatatgttactgaacctatagtccagtttttttatttcttgttttagtctgaaattatttgggccctaataatcctaaaaagaatggagctgcattgatgaattggctcagtatttaaagggagcaaactttttgataataaatctttttaagagaaaaaaaacccagcatcctttttgaagtccagatttgtcaaaatgatagactattcagttatacatcttattttgtgctactaccacagatagccaatattccatgcagtcctgggcttagcttctgcccagctttattgctgctattggcaaagagcacaggactcagccctcgtggctaaaaatggtattttggcagtttgtattgaatctgtttgtgttattaacagaagagggagaaatgtcatgagacgttggacaggcaggattgatgatagcatgaccatagctttgctggaatactgaatgcagggtttggctaggtgtttattttaacattttattaaactttctatttgggtcttaacccatggttctcagctggggtgacactgctcctctagaagcaggtttgaaattatgggtatgttttcttgtcacagtgactgagtacggtggtggtagtggtggtactactactactggtatttagtcagcagggataagggatgttagctgtcctgcaaagttttggtcagtcatatacaataaagaatcatctcaccccgaaatgcaaattgcaggcccattgagatacacagcaagttagtttatactcttgatgtgaatatagtttaccaaaattagtgacataatgagtggaattactaggtaagtcaaatcctaaagagtgaatgtgttagaattgcagtgtcataccaaataacattcaaaagaaatgagccattaagtgaagcttatgaacctggaggtaaaaaatgcttatctgttaaactgaggtttcattgacgtgtccctattaataaacgttatttgccccaca

SEQ ID NO: 23544 - DNA, 427 bp, Homo Sapiens
gactgtcactcggtcccagacaccagagcaagctcaagacccagcagtgggacagccagacagacggcacgatggcactgagctcccagatctgggccgcttgcctcctgctcctcctcctcctcgccagcctgaccagtggctctgttttcccacaacagacgggacaacttgcagagctgcaaccccaggacagagctggagccagggccagctggatgcccatgttccagaggcgaaggaggcgagacacccacttccccatctgcattttctgctgcggctgctgtcatcgatcaaagtgtgggatgtgctgcaagacgtagaacctacctgccctgcccccgtcccctcccttccttatttattcctgctgccccagaacataggtcttggaataaaatggctggttcttttgttttccaaa

SEQ ID NO: 23545 - DNA, 3481 bp, Homo Sapiens
ctcttacaacattggctgccggcgtgactttgaccgcttcccggtgcgttaccggcagctgaacccacccggcgccacgggactttgacgcgtgctctgcgcttgccatgagactcctgggagctgcagccgtcgcggctctggggcgcggaagggcccccgcctccctaggctggcagaggaagcaggttaattggaaggcctgccgatggtcttcatcaggggtgattcctaatgaaaagatacgaaatattggaatctcagctcacattgattctgggaaaactacattaacagaacgagtcctttactacactggcagaattgcaaagatgcatgaggtgaaaggtaaagatggagttggtgctgtcatggattccatggaactagagagacaaagaggaatcactattcagtcagcagccacttacaccatgtggaaagatgtcaatattaacattatagatactcctgggcatgtggacttcacaatagaagtggaaagggccctgagagtgttggatggtgcagtccttgttctctgtgctgttggaggggtacagtgccagaccatgactgtcaatcgtcagatgaagcgctacaacgttccgtttctaacttttattaacaaattggaccgaatgggctccaacccagccagggccctgcagcaaatgaggtctaaactaaatcataatgcagcgtttatgcagatacccatgggtttggagggtaattttaaaggtattgtagatcttattgaggaacgagccatctattttgatggagactttggtcagattgttcgatatggtgagattccagctgaattaagggcggcggccactgaccaccggcaggagctaattgaatgtgttgccaattcagatgaacagcttggtgagatgtttctggaagaaaaaatcccctcgatttctgatttaaagctagcaattcgaagagctactctgaaaagatcatttactcccgtatttttgggaagcgccttgaagaacaaaggagttcagcctcttttagatgctgttttagaatacctcccaaatccatctgaagtccagaactatgctattctcaataaagaggatgactcaaaagagaaaaccaaaatcctaatgaactccagtagagacaattcccacccatttgtaggcctggcttttaaactggaggtaggtcgatttggacaattaacttatgttcgctgttatcagggagagctaaagaagggtgacaccatctataacacaaggacaagaaagaaagtacggttgcaacggctggctcgcatgcatgccgacatgatggaggatgttgaggaagtatatgccggagacatctgtgcattgtttggcattgactgtgctagtggagacacattcacagacaaagccaacagcggcctttctatggagtcaattcatgttcctgatcctgtcatttcaatagcaatgaagccttctaacaagaacgatctggaaaaattttcaaaaggtattggcaggtttacaagagaagatcccacatttaaagtatactttgacactgagaacaaagagacagttatatctggaatgggagaattacacctggaaatctatgctcagaggctggaaagagagtatggctgtccttgtatcacaggaaagccaaaagttgcctttcgagagaccattactgcccctgtcccgtttgactttacacataaaaaacaatcaggtggtgcaggccagtatggaaaagtaataggtgtcctggagcctctggacccagaggactacactaaattggaattttcagatgaaacattcggatcaaatatgccaaagcagtttgtgcctgctgtagaaaaggggtttttagatgcctgcgagaagggccctctttctggtcacaagctctctgggctccggtttgtcctgcaagatggagcacaccacatggttgattctaatgaaatctctttcatccgagcaggagaaggtgctcttaaacaagccttggcaaatgcaacattatgtattcttgaacctattatggctgtggaagttgtagctccaaatgaatttcagggacaagtaattgcaggaattaaccgacgccatggggtaatcactgggcaagatggagttgaggactattttacactgtatgcagatgtccctctaaatgatatgtttggttattccactgaacttaggtcatgcacagagggaaagggagaatacacaatggagtatagcaggtatcagccatgtttaccatccacacaagaagacgtcattaataagtatttggaagctacaggtcaacttcctgttaaaaaaggaaaagccaagaactaactttgcttactgtgagttgactgactctaattgaatctgcgtggttttgatactttgatggattccagtggaataaattcaggctgctgaaacaagaaattctgagcccaggaagcgggctcttctttcttcaaaagaagcccttcttgttcatattcaggagcttctgttatattcaaaggtaattctatgtctatctcaactctattgattggttttatagttcattgaaaatcctcaaataaaatataattattactgaaatatgtttaatatttaaggggaaaagagactaatttcagttatacttttaagcttagaatgtatgttcatttccaaattttgtatcataagagttttcaacatagagaaaagctgaaaaaatgcaaagaataaccacatactttccatctaccttcctttgttaacgggttgtttatcatataataatttgttttgtcatatttgctttcactgtctattatctgtttaagtctcataactctatttttagtttgctgaagacttgaaagtgaatcgcatatatcatgacacttcttggagtgtcattaatgggcaggcttttctgttgaagagtggattccgtatgttcttcatagagagtgtttttcagattcttcattgggatattaaaatattagccaaatttctctctgttttatatatgtctgtttatttcagtttgtggtttctgcaaatttgtaactgcctctgttttaggagtataagtattacttccttgtggtctattgtgaagtaaaaagtagacccttgcatatactattcttgtttgtgttcatcttaatgtttttgtacagctaaatcaaatgtaatttatagagttagtttcatcaacctaatgaatgctagttaaatttgaattccttggaatttatcgtatattgtattcactgagattatgaagggacaaatgttaatcttttgtttccagaaaaagttgggctttcccaagcagttctattacccggttcagaattgcttcatccaaaaatcatctgatggtatagatggatcctagtccttttcattacctgatggtagaaataaaataattgattttaaaaaaaaaaaaaaaa

SEQ ID NO: 23546 - DNA, 5404 bp, Homo Sapiens
cagggcctggagaggtctgaagaaacctgggagccagcagcccggggctccactctgggttctgaaagcccattccctgctctgcggctcctcccaccccacctcttctcagccttgcagctcaagggttgatctcaggagtccaggacccaggagagggaagaatctgaggaacacagaacagtgagcgttgcccacaccccatctcccgtcaccacatctcccctcaccctcaccctccctgcctggccctggaccccatcccaggacctccctatcagctgacttcttccagtgtcttgcaggcccctctgggctcctccctcccctggcttttcctaccactccccctctatcggcgtctatctgtaggtgccctgggatttataaaactgggttccgaatgctgaataagagacggtaagagccaaggcaaaggacagcactgttctctgcctgcctgataccctcaccacctgggaacatcccccagacaccctcttaactccgggacagagatggctggcggagcctggggccgcctggcctgttacttggagttcctgaagaaggaggagctgaaggagttccagcttctgctcgccaataaagcgcactccaggagctcttcgggtgagacacccgctcagccagagaagacgagtggcatggaggtggcctcgtacctggtggctcagtatggggagcagcgggcctgggacctagccctccatacctgggagcagatggggctgaggtcactgtgcgcccaagcccaggaaggggcaggccactctccctcattcccctacagcccaagtgaaccccacctggggtctcccagccaacccacctccaccgcagtgctaatgccctggatccatgaattgccggcggggtgcacccagggctcagagagaagggttttgagacagctgcctgacacatctggacgccgctggagagaaatctctgcctcactcctctaccaagctcttccaagctccccagaccatgagtctccaagccaggagtcacccaacgcccccacatccacagcagtgctggggagctggggatccccacctcagcccagcctagcacccagagagcaggaggctcctgggacccaatggcctctggatgaaacgtcaggaatttactacacagaaatcagagaaagagagagagagaaatcagagaaaggcaggcccccatgggcagcggtggtaggaacgcccccacaggcgcacaccagcctacagccccaccaccacccatgggagccttctgtgagagagagcctctgttccacatggccctggaaaaatgaggattttaaccaaaaattcacacagctgctacttctacaaagacctcaccccagaagccaagatcccctggtcaagagaagctggcctgattatgtggaggagaatcgaggacatttaattgagatcagagacttatttggcccaggcctggatacccaagaacctcgcatagtcatactgcagggggctgctggaattgggaagtcaacactggccaggcaggtgaaggaagcctgggggagaggccagctgtatggggaccgcttccagcatgtcttctacttcagctgcagagagctggcccagtccaaggtggtgagtctcgctgagctcatcggaaaagatgggacagccactccggctcccattagacagatcctgtctaggccagagcggctgctcttcatcctcgatggtgtagatgagccaggatgggtcttgcaggagccgagttctgagctctgtctgcactggagccagccacagccggcggatgcactgctgggcagtttgctggggaaaactatacttcccgaggcatccttcctgatcacggctcggaccacagctctgcagaacctcattccttctttggagcaggcacgttgggtagaggtcctggggttctctgagtccagcaggaaggaatatttctacagatatttcacagatgaaaggcaagcaattagagcctttaggttggtcaaatcaaacaaagagctctgggccctgtgtcttgtgccctgggtgtcctggctggcctgcacttgcctgatgcagcagatgaagcggaaggaaaaactcacactgacttccaagaccaccacaaccctctgtctacattaccttgcccaggctctccaagctcagccattgggaccccagctcagagacctctgctctctggctgctgagggcatctggcaaaaaaagacccttttcagtccagatgacctcaggaagcatgggttagatggggccatcatctccaccttcttgaagatgggtattcttcaagagcaccccatccctctgagctacagcttcattcacctctgtttccaagagttctttgcagcaatgtcctatgtcttggaggatgagaaggggagaggtaaacattctaattgcatcatagatttggaaaagacgctagaagcatatggaatacatggcctgtttggggcatcaaccacacgtttcctattgggcctgttaagtgatgagggggagagagagatggagaacatctttcactgccggctgtctcaggggaggaacctgatgcagtgggtcccgtccctgcagctgctgctgcagccacactctctggagtccctccactgcttgtacgagactcggaacaaaacgttcctgacacaagtgatggcccatttcgaagaaatgggcatgtgtgtagaaacagacatggagctcttagtgtgcactttctgcattaaattcagccgccacgtgaagaagcttcagctgattgagggcaggcagcacagatcaacatggagccccaccatggtagtcctgttcaggtgggtcccagtcacagatgcctattggcagattctcttctccgtcctcaaggtcaccagaaacctgaaggagctggacctaagtggaaactcgctgagccactctgcagtgaagagtctttgtaagaccctgagacgccctcgctgcctcctggagaccctgcggttggctggctgtggcctcacagctgaggactgcaaggaccttgcctttgggctgagagccaaccagaccctgaccgagctggacctgagcttcaatgtgctcacggatgctggagccaaacacctttgccagagactgagacagccgagctgcaagctacagcgactgcagctggtcagctgtggcctcacgtctgactgctgccaggacctggcctctgtgcttagtgccagccccagcctgaaggagctagacctgcagcagaacaacctggatgacgttggcgtgcgactgctctgtgaggggctcaggcatcctgcctgcaaactcatacgcctggggctggaccagacaactctgagtgatgagatgaggcaggaactgagggccctggagcaggagaaacctcagctgctcatcttcagcagacggaaaccaagtgtgatgacccctactgagggcctggatacgggagagatgagtaatagcacatcctcactcaagcggcagagactcggatcagagagggcggcttcccatgttgctcaggctaatctcaaactcctggacgtgagcaagatcttcccaattgctgagattgcagaggaaagctccccagaggtagtaccggtggaactcttgtgcgtgccttctcctgcctctcaaggggacctgcatacgaagcctttggggactgacgatgacttctggggccccacggggcctgtggctactgaggtagttgacaaagaaaagaacttgtaccgagttcacttccctgtagctggctcctaccgctggcccaacacgggtctctgctttgtgatgagagaagcggtgaccgttgagattgaattctgtgtgtgggaccagttcctgggtgagatcaacccacagcacagctggatggtggcagggcctctgctggacatcaaggctgagcctggagctgtggaagctgtgcacctccctcactttgtggctctccaagggggccatgtggacacatccctgttccaaatggcccactttaaagaggaggggatgctcctggagaagccagccagggtggagctgcatcacatagttctggaaaaccccagcttctcccccttgggagtcctcctgaaaatgatccataatgccctgcgcttcattcccgtcacctctgtggtgttgctttaccaccgcgtccatcctgaggaagtcaccttccacctctacctgatcccaagtgactgctccattcggaaggaactggagctctgctatcgaagccctggagaagaccagctgttctcggagttctacgttggccacttgggatcagggatcaggctgcaagtgaaagacaagaaagatgagactctggtgtgggaggccttggtgaaaccaggagatctcatgcctgcaactactctgatccctccagcccgcatagccgtaccttcacctctggatgccccgcagttgctgcactttgtggaccagtatcgagagcagctgatagcccgagtgacatcggtggaggttgtcttggacaaactgcatggacaggtgctgagccaggagcagtacgagagggtgctggctgagaacacgaggcccagccagatgcggaagctgttcagcttgagccagtcctgggaccggaagtgcaaagatggactctaccaagccctgaaggagacccatcctcacctcattatggaactctgggagaagggcagcaaaaagggactcctgccactcagcagctgaagtatcaacaccagcccttgacccttgagtcctggctttggctgacccttctttgggtctcagtttctttctctgcaaacaagttgccatctggtttgccttccagcactaaagtaatggaactttgatgatgcctttgctgggcattatgtgtccatgccagggatgccacagggggccccagtccaggtggcctaacagcatctcagggaatgtccatctggagctggcaagacccctgcagacctcatagagcctcatctggtggccacagcagccaagcctagagccctccggatcccatccaggcgcaaagaggaataggagggacatggaaccatttgcctctggctgtgtcacagggtgagccccaaaattggggttcagcgtgggaggccacgtggattcttggctttgtacaggaagatctacaagagcaagccaacagagtaaagtggaaggaagtttattcagaaaataaaggagtatcacagctcttttagaatttgtctagcaggctttccagtttttaccagaaaacccctataaattaaaaattttttacttaaatttaagaattaaaaaaaaaaaaaaaa

SEQ ID NO: 23547 - DNA, 1875 bp, Homo Sapiens
cgctcgcgagtcatgctgtgtcccgccggagaaggtcgagtatccccgccgccgaggagcagccccagcgccaggcctcccgacgtccccgggcagcagccccaggccgcgaagtccccgtctccagttcagggcaagaagagtccgcgactcctatgcatagaaaaagtaacaactgataaagatcccaaggaagaaaaagaggaagaagacgattctgccctccctcaggaagtttccattgctgcatctagacctagccggggctggcgtagtagtaggacatctgtttctcgccatcgtgatacagagaacacccgaagctctcggtccaagaccggttcattgcagctcatttgcaagtcagaaccaaatacagaccaacttgattatgatgttggagaagagcatcagtctccaggtggcattagtggtgaagaggaagaggaggaggaagaagagatgttaatcagtgaagaggagataccattcaaagatgatccaagagatgagacctacaaaccccacttagaaagggaaaccccaaagccacggagaaaatcagggaaggtaaaagaagagaaagagaagaaggaaattaaagtggaagtagaggtggaggtgaaagaagaggagaatgaaattagagaggatgaggaacctccaaggaagagaggaagaagacgaaaagatgacaaaagtccacgtttacccaaaaggagaaaaaagcctccaatccagtatgtccgttgtgagatggaaggatgtggaactgtccttgcccatcctcgctatttgcagcaccacattaaataccagcatttgctgaagaagaaatatgtatgtccccatccctcctgtggacgactcttcaggcttcagaagcaacttctgcgacatgccaaacatcatacagatcaaagggattatatctgtgaatattgtgctcgggccttcaagagttcccacaatctggcagtgcaccggatgattcacactggcgagaagccattacaatgtgagatctgtggatttacttgtcgacaaaaggcatctcttaattggcacatgaagaaacatgatgcagactccttctaccagttttcttgcaatatctgtggcaaaaaatttgagaagaaggacagcgtagtggcacacaaggcaaaaagccaccctgaggtgctgattgcagaagctctggctgccaatgcaggcgccctcatcaccagcacagatatcttgggcactaacccagagtccctgacgcagccttcagatggtcagggtcttcctcttcttcctgagcccttgggaaactcaacctctggagagtgcctactgttagaagctgaagggatgtcaaagtcatactgcagtgggacggaacgggtgagcctgatggctgatgggaagatctttgtgggaagcggcagcagtggaggcactgaagggctggttatgaactcagatatactcggtgctaccacagaggttctgattgaagattcagactctgccggaccttagtggacaggaagacttggggcatgggacagctcagactttgtatttaaaagttaaaaaggacaaaaaaaaaatctaaagcatttaaaatctagtgaaataactgaagggcctgctctttccattgtggatcacagcacacacatacatacaccctccacctccccatcccctgttctccctctgttgctccccttataaaattgatgttgtctttaccagaaaggtagacaaaaaagaagcagcagcagctcttaaagtgagggttattctcatactcggttccagccatcagcagacttcctgctcatcggcagatccccctttccaacccgatcgtccaacagatcg

SEQ ID NO: 23548 - DNA, 3381 bp, Homo Sapiens
ctcatatttcataaaatatgaacttttcccggcccacatccctaggccttcctgatgcgcttgcctgctccctggtctctctgcatggggaaggagtgttcccagcttgcaaactccagctttgcctgtgagaggaacaagcgtccctgatccagaaggtgttcagatggagatggcgagttctgctggctcctggctctctggctgcctcatccctctcgtcttcctccggctgtctgtgcatgtgtcaggccacgcaggggatgccggcaagttccacgtggccctactagggggcacagccgagctgctctgccctctctccctctggcccgggacggtacccaaggaggtgaggtggctgcggtccccattcccgcagcgttcccaggctgttcacatattccgggatgggaaggaccaggatgaagatctgatgccggaatataaggggaggacggtgctagtgagagatgcccaagagggaagtgtcactctgcagatccttgacgtgcgccttgaggaccaagggtcttaccgatgtctgatccaagttggaaatctgagtaaagaggacaccgtgatcctgcaggttgcagccccatctgtggggagtctctccccctcagcagtggctctggctgtgatcctgcctgtcctggtacttctcatcatggtgtgcctttgccttatctggaagcaaagaagagcaaaagaaaagcttctctatgaacatgtgacggaggtggacaatcttctttcagaccatgctaaagaaaaaggaaaactccataaagctgtcaagaaactccggagtgaactgaagttgaaaagagctgcagcaaactcaggctggagaagagcccggttgcattttgtggcagtgaccctggacccagacacagcacatcccaaactcatcctttctgaggaccaaagatgtgtaaggcttggagacagacggcagcctgtacctgacaacccccagagatttgatttcgttgtcagcatcctaggctctgagtacttcacgactggctgccactactgggaggtgtatgtgggagacaagaccaaatggattcttggagtatgtagtgagtcagtgagcaggaaggggaaggttactgcctcacctgccaatggacactggcttctgcgacagagtcgtgggaatgagtatgaagctctcacatccccgcagacctccttccgccttaaagagcctccacggtgtgtggggattttcctggactatgaagcaggagtcatctctttctacaatgtgaccaacaagtcccacatctttactttcacccacaatttctctggcccccttcgccctttctttgaaccttgccttcatgatggaggaaaaaacacagcacctctagtcatttgttcagaactacacaaatcagaggaatcaattgtccccaggccagaagggaaaggccatgctaatggagatgtgtccctcaaggtgaactcttctttactacccccgaaggccccagagctgaaggatataatcctgtccttgccccctgaccttggcccagcccttcaggagctcaaggctccttctttttagggatatgccacattacctgctcccatcaccatccagcccagcaccctggacttcagtcgcctggcccaaccccatgattatggaacgtctcttcaccttaacccaaatccagacccttttgtggtttctatttgtaccacttttctcccaggcctcagttctgaagcttacctttcttctaaggaattgaagctcccagtgacctggagggaggattcctggaaaccaaacaatcagtttaggtgcaggtggagatgttgaatatgtgttaccaagatacagcacaggttcagggaaaagagttcgctactccaggggttatttagaagacactttctctgcctcatcctgccctcaagctttagtcaagaagttatggcccccagtccctgacttcttacttatcccattgaggactgcctttctctctctcagttctggcctctgccccccaaagtcagctctctaaaagcaagcatgttttagaccactcactctttccctctttcttcaggaatgaattgggaaaggctgatgagtaaaacataccatccttttctattttcttgatgctgtttacaacatagtttggtgatatccagagctaatgtacatgctttcaaaagctaatctgcctgttgatgataactaggtacagcgactttaaatacagttgctataatcctgaaaagccccaggagcacatcagggagctgggaaacacagttgcagagaactcagctgtatgttgccctctgaccttggcccagaccttcagaggctcagtctgttgagtctgttgtgactgtcttatgaatcaatctgttgtgccaaccctttctgagattcagagaggtccagctagaaaaagtggcagttttaaccaccaacgtagaagcttttttttccccacaagaccattgtactgcaatacttgactatttgtgtagcaaacagcctcttaggttggagagtattgatttcaaataggaagttggtagactaggtgtgaggatgaaataatgaccttgatttttgggtgtgtattgcagaagcctcgtcgctttcaagtcacatcatatatgcgatctggcctaaccatggagatattggttatcagtttgcagatgaatacacagttctatccaacagaaactgtatctttctgtttgtcagaagttctccgttagttcctgtattagtcaaggttttccagagaaacagaatcaatatatattggggcaggggggcggtggttattataaggaattggctcacgtgattatggaggcggttaaatcccaagatctgcaggataagtcagcaagatggagtcccatgagagctgatggtttagttccagtctgatggcagcaggcttgacgccaaggaagagatgatgtttaattcaagtccgaaggcaaggaaaaagctgatggtcctgtccaaaggctattaggcaggaagaattctcttagggcagagttagctcttttgttctattcaggccttcaactgattcagcaaggcccgcccacatttgggaggacagtctgcattactcagtctactgatttgaatgttaatgtcattgagaaacaccctcacaggaacactcagaataatgtttgaccaaatagctgggcatcttgtgacccagttaagtggatacataagattaactatcacagtgactcagtggaattttttgtttgcttttgtacagttttaaaataaaagtttggtatttgtgttttaaaaaaaaaaaaaaaaaaaaaaaaaaaaaa

SEQ ID NO: 23549 - DNA, 826 bp, Homo Sapiens
tctcgggaagcgcgcctgtgtttgtaccgggaatcggccattctggcggtggagcgggcgggaaggaggcgttcgtctagatttgtcggctcgcggggagacttcaggagtcgctgtctctgaacttccagcctcagagaccgccgcccttgtccccgagggccatgggccgggtctcagggcttgtgccctctcgcttcctgacgctcctggcgcatctggtggtcgtcatcaccttattctggtcccgggacagcaacatacaggcctgcctgcctctcacgttcacccccgaggagtatgacaagcaggacattcatccacttcctctctgcaggctggtggccgcgctctctgtcaccctggggcctctttgcagtggagctggccggtttcctctcaggagtctccatgttcaacagcaccccagagcctcatctccattggggctcactgtagtgcatccgtggccctgtccttcttcatattcgagcgttgggagtgcactacgtattggtacatttttgtcttctgcagtgcccttccagctgtcactgaaatggctttattcgtcaccgtctttgggctgaaaaagaaacccttctgattaccttcatgacgggaacctaaggacgaagcctacaggggcaagggccgcttcgtattcctggaagaaggaaggcataggcttcggttttcccctcggaaactgcttctgctggaggatatgtgttggaataattacgtcttgagtctgggattatccgcattgtatttagtgctttgtatacaattgtataattgtagtaaaaatttggggctgcct

SEQ ID NO: 23550 - DNA, 1260 bp, Homo Sapiens
ccctgggatactcccctcccagggtgtctggtggcaggcctgtgcctatccctgctgtccccagggtgggccccgggggtcaggagctccagaagggccagctgggcatattctgagattggccatcagcccccatttctgctgcaaacctggtcagagccagtgttccctccatgggacctaaagacagtgccaagtgcctgcaccgtggaccacagccgagccactgggcagccggtgatggtcccacgcaggagcgctgtggaccccgctctctgggcagccctgtcctaggcctggacacctgcagagcctgggaccacgtggatgggcagatcctgggccagctgcggcccctgacagaggaggaagaggaggagggcgccggggccaccttgtccagggggcctgccttccccggcatgggctctgaggagttgcgtctggcctccttctatgactggccgctgactgctgaggtgccacccgagctgctggctgctgccggcttcttccacacaggccatcaggacaaggtgaggtgcttcttctgctatgggggcctgcagagctggaagcgcggggacgacccctggacggagcatgccaagtggttccccagctgtcagttcctgctccggtcaaaaggaagagactttgtccacagtgtgcaggagactcactcccagctgctgggctcctgggacccgtgggaagaaccggaagacgcagcccctgtggccccctccgtccctgcctctgggtaccctgagctgcccacacccaggagagaggtccagtctgaaagtgcccaggagccaggagccagggatgtggaggcgcagctgcggcggctgcaggaggagaggacgtgcaaggtgtgcctggaccgcgccgtgtccatcgtctttgtgccgtgcggccacctggtctgtgctgagtgtgcccccggcctgcagctgtgccccatctgcagagcccccgtccgcagccgcgtgcgcaccttcctgtcctaggccaggtgccatggccggccaggtgggctgcagagtgggctccctgcccctctctgcctgttctggactgtgttctgggcctgctgaggatggcagagctggtgtccatccagcactgaccagccctgattccccgaccaccgcccagggtggagaaggaggcccttgcttggcgtgggggatggcttaactgtacctgtttggatgcttctgaatagaaataaagtgggttttccctggaggt

SEQ ID NO: 23551 - DNA, 10065 bp, Homo Sapiens
atggggcgccatgttgccaccagctgccacgtggcctggcttttggtgctgatctctggatgctggggccaggtgaaccggctgcccttcttcaccaaccacttctttgatacatacctgctgatcagcgaggacacgcctgtgggttcttctgtgacccagttgctggcccaagacatggacaatgaccccctggtgtttggcgtgtctggggaggaggcctctcgcttctttgcagtggagcctgacactggcgtggtgtggctccggcagccactggacagagagaccaagtcagagttcaccgtggagttctctgtcagcgaccaccagggggtgatcacacggaaggtgaacatccaggttggggatgtgaatgacaacgcgcccacatttcacaatcagccctacagcgtccgcatccctgagaatacaccagtggggacgcccatcttcatcgtgaatgccacagaccccgacttgggggcagggggcagcgtcctctactccttccagcccccctcccaattcttcgccattgacagcgcccgcggtatcgtcacagtgatccgggagctggactacgagaccacacaggcctaccagctcacggtcaacgccacagatcaagacaagaccaggcctctgtccaccctggccaacttggccatcatcatcacagatgtccaggacatggaccccatcttcatcaacctgccttacagcaccaacatctacgagcattctcctccgggcacgacggtgcgcatcatcaccgccatagaccaggataaaggacgtccccggggcattggctacaccatcgtttcagggaataccaacagcatctttgccctggactacatcagcggagtgctgaccttgaatggcctgctggaccgggagaaccccctgtacagccatggcttcatcctgactgtgaagggcacggagctgaacgatgaccgcaccccatctgacgctacagtcaccacgaccttcaatatcctggttattgacatcaatgacaatgccccggagttcaacagctccgagtacagcgtggccatcactgagctggcacaggtcggctttgcccttccactcttcatccaggtggtggacaaggatgagaatttgggcctgaacagcatgtttgaggtgtacttggtggggaacaactcccaccacttcatcatctccccgacctccgtccaggggaaggcggacattcgtattcgggtggccatcccactggactacgagaccgtggaccgctacgactttgatctctttgccaatgagagtgtgcctgaccatgtgggctatgccaaggtgaagatcactctcatcaatgaaaatgacaaccggcccatcttcagccagccactgtacaacatcagcctgtacgagaacgtcaccgtggggacctctgtgctgacagtcctggcaactgacaatgatgcaggcacctttggggaagtcagctacttcttcagtgatgaccctgacaggttctcgctggacaaggacacgggactcatcatgctgattgccaggctggactatgagctcatccagcgcttcaccctgacgatcattgcccgggacgggggcggcgaggagaccacaggccgggtcaggatcaatgtgttggatgtcaacgacaacgtgcccaccttccagaaggatgcctacgtgggtgctctgcgggagaacgagccttctgtcacacagctggtgcggctccgggcaacagatgaagactcccctcccaacaaccagatcacctacagcattgtcagtgcatctgcctttggcagctacttcgacatcagcctgtacgagggctatggagtgatcagcgtcagtcgccccctggattatgaacagatatccaatgggctgatttatctgacggtcatggccatggatgctggcaacccccctctcaacagcaccgtccctgtcaccatcgaggtgtttgatgagaatgacaaccctcccaccttcagcaagcccgcctacttcgtctccgtggtggagaacatcatggcaggagccacggtgctgttcctgaatgccacagacctggaccgctcccgggagtacggccaggagtccatcatctactccttggaaggctccacccagtttcggatcaatgcccgctcaggggaaatcaccaccacgtctctgcttgaccgagagaccaagtctgaatacatcctcatcgttcgcgcagtggacgggggtgtgggccacaaccagaaaactggcatcgccaccgtaaacatcaccctcctggacatcaacgacaaccaccccacgtggaaggacgcaccctactacatcaacctggtggagatgacccctccagactctgatgtgaccacggtggtggctgttgacccagacctgggggagaatggcaccctggtgtacagcatccagccacccaacaagttctacagcctcaacagcaccacgggcaagatccgcaccacccacgccatgctggaccgggagaaccccgacccccatgaggccgagctgatgcgcaaaatcgtcgtctctgttactgactgtggcaggccccctctgaaagccaccagcagtgccacagtgtttgtgaacctcttggatctcaatgacaatgaccccacctttcagaacctgccttttgtggccgaggtgcttgaaggcatcccggcgggggtctccatctaccaagtggtggccatcgacctcgatgagggcctgaacggcctggtgtcctaccgcatgccggtgggcatgccccgcatggacttcctcatcaacagcagcagcggcgtggtggtcaccaccaccgagctggaccgcgagcgcatcgcggagtaccagctgcgggtggtggccagtgatgcaggcacgcccaccaagagctccaccagcacgctcaccatccatgtgctggatgtgaacgacgagacgcccaccttcttcccggccgtgtacaatgtgtctgtgtccgaggacgtgccacgcgagttccgggtggtctggctgaactgcacggacaacgacgtgggcctcaatgcagagctcagctacttcatcacaggtggcaacgtggatgggaagttcagcgtgggttaccgcgatgccgttgtgagaaccgtggtgggcctggaccgggagaccacagccgcctacatgctcatcctggaggccatcgacaacggccctgtagggaagcgacacacgggcacagccaccgtgttcgtcactgtcctggatgtgaatgacaaccggcccatctttctgcagagcagctatgaggccagcgtccctgaggacatccctgaaggccacagcatcttgcagctgaaagccacggacgcagatgagggcgagtttgggcgtgtgtggtaccgcatcctccatggtaaccatggcaacaacttccggatccatgtcagcaatgggctcctgatgcgagggccccggcccctggaccgggagcggaactcatcccacgtgctgatagtggaggcctacaaccacgacctgggccccatgcggagctccgtcagggtgattgtgtacgtggaggacatcaacgatgaggcccccgtgttcacacagcagcagtacagccgtctggggcttcgagagaccgcaggcattggaacgtcagtcatcgtggtccaagccacagaccgagactctggggatggtggcctggtgaactaccgcatcctgtcgggcgcagaggggaagtttgagattgacgagagcacagggcttatcatcaccgtgaattacctggactacgagaccaagaccagctacatgatgaatgtgtcggccactgaccaggccccgcccttcaaccagggcttctgcagcgtctacatcactctgctcaacgagctggacgaggccgtgcagttctccaatgcctcatacgaggctgccatcctggagaatctggcactgggtactgagattgtgcgggtccaggcctactccatcgacaacctcaaccaaatcacgtaccgcttcgacgcctacaccagcacccaggccaaagccctcttcaagatagacgccatcacgggtgtgatcacagtccagggcctggtggaccgtgagaagggcgacttctataccttgacagtggtggcagatgacggcggccccaaggtggactccaccgtgaaggtctacatcactgtgctggacgagaatgacaacagcccccggtttgacttcacctccgactcggcggtcagcatacccgaggactgccctgtgggccagcgagtggctactgtcaaggcctgggaccctgatgctggcagcaatgggcaggtggtcttctccctggcctctggcaacatcgcgggggcctttgagatcgtcaccaccaatgactccattggcgaagtgtttgtggccaggcccctggacagagaagagctggatcactacatcctccaggttgtggcttctgaccgaggcacccctccacggaagaaggaccacatcctgcaggtgaccatcctggacatcaatgacaaccctccagtcatcgagagcccctttggatacaatgtcagtgtgaatgagaacgtgggtggaggtactgctgtggtccaggtgagagccactgaccgtgacatcgggatcaacagtgttctgtcctactacatcaccgagggcaacaaggacatgaccttccgcatggaccgcatcagcggtgagatcgccacacggcctgccccgcctgaccgcgagcgccagagcttctaccacctggtggccactgtggaggacgagggcaccccaaccctgtcggccaccacgcacgtgtacgtgaccattgtggatgagaatgataacgcgcccatgttccagcagccccactatgaggtgctgctggatgagggcccagacacgctcaacaccagcctcatcaccatccaggcactggacctggatgagggtcccaacggcacagtcacctatgccatcgtcgcaggcaacatcgtcaacaccttccgcatcgacagacacatgggtgtcatcactgctgccaaagagctggactacgagatcagccacggccgctacaccctgatcgtcactgccacagaccagtgccccatcttatcccaccgcctcacctctaccaccacggtgcttgtgaatgtgaatgacatcaacgacaatgtgcctaccttcccccgggactatgagggaccatttgaagtcactgagggccagccggggcccagagtgtggaccttcctggcccatgaccgagactcaggacccaacgggcaggtggagtacagcatcatggatggagaccctctgggggagtttgtgatctctcctgtggagggggtgctaagggtccggaaggacgtggagctggaccgggagaccatcgccttctacaacctgaccatctgtgcccgtgaccgggggatgcccccactcagctccacaatgctggtggggatccgggtgctggacatcaacgacaacgaccctgtgctgctgaacctgcccatgaacatcaccatcagcgagaacagccctgtctccagctttgtcgcccatgtcctggccagtgacgctgacagtggctgcaatgcacgcctcaccttcaacatcactgcgggcaaccgcgagcgggccttcttcatcaatgccacgacagggatcgtcactgtgaaccggcccctggaccgcgagcggatcccagagtacaagctgaccatttctgtgaaggacaacccggagaatccacgcatagccaggagggattatgacttgcttctgatcttcctttctgatgagaatgacaaccaccccctcttcactaaaagcacctaccaggcagaggtgatggaaaactctcccgctggcacccctctcacggtgctcaatgggcccatcctggccctggatgcagaccaagacatctacgccgtggtgacctaccagctgctgggtgcccagagtggcctctttgacatcaacagcagcaccggtgtggtgaccgtgaggtcaggtgtcatcattgaccgggaggcattctcgccacccatcctggagctgctgctgctggctgaggacatcgggctgctcaacagcacggcccacctgctcatcaccatcctggatgacaatgacaaccggcccacctttagccctgccaccctcactgtccatctgctagagaactgcccgcctggattctcagtccttcaagtcacagccacagatgaggacagtggcctcaatggggagctggtctaccgaatagaagctggggctcaggaccgcttcctcattcatctggtcaccggggtcatccgtgttggtaatgccaccatcgacagagaggagcaggagtcctacaggctaacggtggtggccaccgaccggggcaccgttcctctctcgggcacagccattgtcaccattctgatcgatgacatcaatgactcccgccccgagttcctcaaccccatccagacagtgagcgtgctggagtcggctgagccaggcactgtcattgccaatatcacggccattgaccacgacctcaacccaaagctagagtaccacattgtcggcattgtggccaaggacgacactgatcgcctggtgcccaaccaggaggacgcctttgctgtgaatatcaacacaggatctgtaatggtgaagtcccccatgaatcgggagctggttgccacctatgaggtcactctctcagtgattgacaatgccagcgacctaccagagcgctctgtcagtgtgccaaatgccaagctgactgtcaacgtcctggacgtcaatgacaatacgccccagttcaagccctttgggatcacctactacatggagcggatcctggagggggccacccctgggaccacactcattgctgtggcagccgtggaccctgacaagggccttaatgggctggtcacctacaccctgctggacctggtgcccccagggtatgtccagctggaggactcctcggcagggaaggtcattgccaaccggacagtggactacgaggaggtgcactggctcaactttaccgtgagggcctcagacaacgggtccccgccccgggcagctgagatccctgtctacctggaaatcgtggacatcaatgacaacaaccccatctttgaccagccctcctaccaggaggctgtctttgaggatgtgcctgtgggcacaatcatcctgacagtcactgccactgatgctgactcaggcaactttgcactcattgagtacagccttggagatggagagagcaagtttgccatcaaccccaccacgggtgacatctatgtgctgtcttctctggaccgggagaagaaggaccactatatcctgactgccttggccaaagacaaccctggggatgtagccagcaaccgtcgcgaaaattcagtgcaggtggtgatccaagtgctggatgtcaatgactgccggccacagttctccaagccccagttcagcacaagcgtgtatgagaatgagccggcgggcacctcggtcatcaccatgatggccactgaccaggatgaaggtcccaatggagagttgacctactcacttgagggccctggcgtggaggccttccatgtggacatggactcgggcttggtgaccacacagcggccactgcagtcctacgagaagttcagtctgaccgtggtggccacagatggtggagagcccccactctggggcaccaccatgctcctggtggaggtcatcgacgtcaatgacaaccgccctgtctttgtgcgcccacccaacggcaccatcctccacatcagagaggagatcccgctgcgctccaacgtgtacgaggtctacgccacggacaaggatgagggcctcaacggggcggtgcgctacagcttcctgaagactgcgggcaaccgggactgggagttcttcatcatcgacccaatcagcggcctcatccagactgctcagcgcctggaccgcgagtcgcaggcggtgtacagcctcatcttggtggccagcgacctgggccagccagtgccatacgagactatgcagccgctgcaggtggccctggaggacatcgatgacaacgaaccccttttcgtgaggcctccaaaaggcagcccccagtaccagctgctgacagtgcctgagcactcaccacgcggcaccctcgtgggcaacgtgacaggcgcagtggatgcagatgagggccccaacgcgatcgtgtactacttcatcgcagccggcaacgaagagaagaacttccatctgcagcccgatgggtgtctgctggtgctgcgggacctggaccgggagcgagaagccatcttctccttcatcgtcaaggcctccagcaatcgcagctggacacctccccgtggaccctccccaaccctcgacctggttgctgacctcacactgcaggaggtgcgcgttgtgctagaggacatcaacgaccagccaccacgcttcaccaaggctgagtacactgcaggggtggccaccgacgccaaggtgggctcagagttgatccaggtgctggccctggatgcagacattggcaacaacagccttgtcttctacagcattctggccatccactacttccgggcccttgccaacgactctgaagatgtgggccaggtcttcaccatggggagcatggacggcattctgcgcaccttcgacctcttcatggcctacagccccggctacttcgtggtggacattgtggcccgagacctggcaggccacaacgacacggccatcatcggcatctacatcctgagggacgaccagcgcgtcaagatcgtcattaacgagatccccgaccgtgtgcgcggcttcgaggaggagttcatccacctgctctccaacatcactggggccattgtcaatactgacaatgtgcagttccatgtggacaagaagggccgggtgaactttgcgcagacagaactgcttatccacgtggtgaaccgcgataccaaccgcatcctggacgtggaccgggtgatccagatgatcgatgagaacaaggagcagctacggaatcttttccggaactacaacgtcctggacgtgcagcctgccatctctgtccggctgccggatgacatgtctgccctgcagatggcgatcatcgtcctggctatcctcctgttcctggccgccatgctctttgtcctcatgaactggtactacaggactgtacacaagaggaagctcaaggccattgtggctggctcagctgggaatcgtggcttcatcgacatcatggacatgcctaacaccaacaagtactcctttgatggagccaaccctgtgtggctggatcccttctgtcggaacctggagctggccgcccaggcggagcatgaggatgacctaccggagaacctgagtgagatcgccgacctgtggaacagccccacgcgcacccatggaacttttgggcgtgagccagcagctgtcaagcctgatgatgaccgatacctgcgggctgccatccaggagtatgacaacattgccaagctgggccagatcattcgtgaggggccaatcaagggctcgctgctgaaggtggtcctggaggattacctgcggctcaaaaagctctttgcacagcggatggtgcaaaaagcctcctcctgccactcctccatctctgagctgatacagactgagctggacgaggagccaggagaccacagcccagggcagggtagcctgcgcttccgccacaagccaccagtggagctcaaggggcccgatgggatccatgtggtgcacggcagcacgggcacgctgctggccaccgacctcaacagcctgcccgaggaagaccagaagggcctgggccgctcgctggagacgctgaccgctgccgaggccactgccttcgagcgcaacgcccgcacagaatccgccaaatccacacccctgcacaaacttcgcgacgtgatcatggagacccccctggagatcacagagctgtga

SEQ ID NO: 23552 - DNA, 3752 bp, Homo Sapiens
caggctggaagcggcgccatattggcgtcggccgcgctgtattgtcataaatagagccggttttgtggtgttttcactactcggttggatgcctcagccatagtaagtgggaaagtgagcgagcaagcgagctactagcgaccggaggaaagtgaacagggggagaagggaacagcaagaacaggactccagagcgataaacactcgctggagagggagacgcaggaagcgatgaaagagatgtctgcaaacaccgtgctggacagccagcgtcaacaaaagcattatggaattacctccccaattagtttggcatctcctaaagaaattgatcatatttacacacagaaattaattgacgccatgaaaccatttggagtgtttgaagatgaggaagaattgaaccacaggctggtggttcttggtaaattgaacaatttagtaaaagaatggatttctgatgtcagcgagagtaagaacctcccaccttctgttgtggctactgttggtggtaaaattttcacatttggatcctataggcttggagtacacaccaaaggagctgacattgatgcactttgtgtagctccaagacatgtggaaagatctgatttttttcagtctttttttgaaaaattgaaacatcaagatggcattagaaacttaagagctgtagaagatgcctttgtacctgttataaaatttgaatttgatggtattgaaattgatctagtctttgcaagactggcaatacaaaccatatcagataatttagatctaagagacgactctcgcctgagaagccttgatataaggtgtattcgcagcttaaatggttgtagagttactgatgaaattttgcatttagtgccaaataaagaaacttttagactcaccctaagagctgtcaaattatgggcaaaacgacgtggtatttattccaacatgctaggattccttggtggtgtctcctgggcaatgctagttgcaagaacttgccaattgtatccaaatgcagcagcatctactttagttcataagttctttttagttttttccaagtgggaatggccaaatcctgtgctgctgaagcaaccagaagaaagcaatttgaatttgcctgtctgggatcctcgggtaaatccatcagataggtatcatctcatgcccataatcacccctgcctacccacaacagaattctacgtataatgtgtccacatcaactcgaacagtaatggtagaagaatttaaacaaggtcttgcagtcacagatgaaattcttcaaggaaagtcagattggtccaaactacttgagccaccgaatttctttcaaaagtatagacattatatagtattgactgccagcgcatcaacagaagaaaaccatctagagtgggttggattagtagaatctaaaatccgtgtacttgttggaaacttggaacggaatgaatttattactcttgcccatgtgaatccccagtcattcccagggaataaggaacatcataaagacaacaattacgtatcaatgtggttccttgggataatttttcggagagtagaaaatgcagaaagtgtcaacatagacttgacatatgatatacagtcatttactgatacagtgtacagacaggcaaacaatataaatatgctaaaggagggaatgaaaattgaagcaactcatgtaaagaaaaaacaacttcaccactaccttcctgcagaaattcttcaaaagaagaaaaagcaaagtctctctgatgtcaatcgaagctcgggcggacttcaatccaaaagattgtctctggatagcagttgtctggatagctccagagacactgataatggaacaccttttaattctccagcgtccaagtctgatagcccttctgtaggagaaacagaaaggaatagtgctgagcctgctgctgtaattgtggagaagccactgagtgtaccaccagcccaaggactttccattccagtgattggcgcaaaagttgactctacagtaaaaactgtatcaccccccactgtgtgtaccattcctaccgtagtaggacgaaatgtcattcctagaatcacaacacctcacaaccctgcccagggacaaccgcatctgaatggaatgtcaaatataactaagactgttacacctaagagatcccattccccatccatagatgggactcctaagaggttgaaagacgtagaaaagtttattcgacttgaatcaacatttaaggacccccgcactgctgaagaaagaaaaagaaaatcagtggatgccattggaggagaatctatgcctattccaactattgatacatcacgcaaaaagagactacccagtaaagaactaccagattcatcatctccagttccagcaaacaacatccgtgtcatcaaaaattccattcgactgacccttaatcggtaaaagcagtgcctcctcacttaagtgaacaagcaatcatttagtggcatagatgcagccacttgttttttaaatagaagtggctgtcatacgtgaaataaggtgaaagtgacagccttcagtctaataaccttgaagtggtttttgaactgtcaaactttgacctgtagatgctgtagcattctctcactgattgctacatacacttctctgaggatcacctgctgtcaaattgccatctacagtattacagctttgcatttgggggttttactgccttaactttcaatgcttgttatgggaaccagttcttagccacttggacactgataacaagtcctgaactccttttttgttttgttttttgtgtttttttttttttttgtcttatgttgtaatcattgtatagagctaaaaaaattgaaaacaaacaaaaaaattgtcttgtattttccaaatgttaatacatttactttagcattgaagccactttgaaacctgagataaatgaatgtgaggtatcttttctgctttcctcatttgtgtagatgtactgtctgttctgttgatttaaattatttttttccagattggcacatgaaatatttaaacttttttgtgtgcctttctgtccaaatgttgcatagttaccagggaagattagtccagtgattacataagagttgggcaccataaattctctatattttgcctcccatggaggcctttgaaatgcatctttattaaaaatcaaaatataaccaggatactgaaagtcagtatatgaatggtaaaattgttacatatcctatttcatgccattcttgttagttgactggtattttttactgaggagcaactcattccagcatcaacaataagataacctttaagtatggcacacttgtatttttgaggtgtaaaattaacttggcatgataattcctgatcattatttaccccacaacttcaaatagtttcttcacggactaggcatgcagaaataagcagtggattttattgaaacctaaaggcattttgaatgacattgttaccaaccattaattggctcaggacctttgtaatttttatttaactatatgagttgtctttttttacgctgcttttttcaatgcatttcttaatattttttaagtttcatgaatgcatgctcagtttattaaaatccataaccatgtaattcttgtaatatgttgattcagtgttttgtaaatgaagtcgtatgtattttcagagtatttttgtatgtactgtaagataccatcttttcaaagagaaacgtttaaaacctt

SEQ ID NO: 23553 - DNA, 2634 bp, Homo Sapiens
atggccgaccgggaaggcggctgcgctgctgggcgggggcgggagctggagccggagctggagccggggccggggcccgggtcagcgcttgagccgggagaagagtttgagatcgtggaccgaagccagctgcccggcccaggcgacctgcggagcgcaacgaggccgcgggcggccgagggctggtcggcgcccatcctgaccctggcacgcagggccaccgggaacctgtcggcgagctgcgggagcgcgctgcgcgcggccgcggggctgggcggcggggacagcggggacggcacggcgcgcgcagcttctaagtgccagatgatggaggagcgtgccaacctgatgcacatgatgaaactcagcatcaaggtgttgctccagtcggctctgagcctgggccgcagcctggatgcggaccatgcccccttgcagcagttctttgtagtgatggagcactgcctcaaacatgggctgaaagttaagaagagttttattggccaaaataaatcattctttggtcctttggagctggtggagaaactttgtccagaagcatcagatatagcgactagtgtcagaaatcttccagaattaaagacagctgtgggaagaggccgagcgtggctttatcttgcactcatgcaaaagaaactggcagattatctgaaagtgcttatagacaataaacatctcttaagcgagttctatgagcctgaggctttaatgatggaggaagaagggatggtgattgttggtctgctggtgggactcaatgttctcgatgccaatctctgcttgaagggagaagacttggattctcaggttggagtaatagatttttccctctaccttaaggatgtgcaggatcttgatggtggcaaggagcatgaaagaattactgatgtccttgatcaaaaaaattatgtggaagaacttaaccggcacttgagctgcacagttggggatcttcaaaccaagatagatggcttggaaaagactaactcaaagcttcaagaagagctttcagctgcaacagaccgaatttgctcacttcaagaagaacagcagcagttaagagaacaaaatgaattaattcgagaaagaagtgaaaagagtgtagagataacaaaacaggataccaaagttgagctggagacttacaagcaaactcggcaaggtctggatgaaatgtacagtgatgtgtggaagcagctaaaagaggagaagaaagtccggttggaactggaaaaagaactggagttacaaattggaatgaaaaccgaaatggaaattgcaatgaagttactggaaaaggacacccacgagaagcaggacacactagttgccctccgccagcagctggaagaagtcaaagcgattaatttacagatgtttcacaaagctcagaatgcagagagcagtttgcagcagaagaatgaagccatcacatcctttgaaggaaaaaccaaccaagttatgtccagcatgaaacaaatggaagaaaggttgcagcactcggagcgggcgaggcagggggctgaggagcggaccacaagctgcagcaggagctgggcggtgaggatcggcgccctgcagctgcagctctcccagctgcacgagcaatgctcaagcctggagaaagaattgaaatcagaaaaagagcaaagacaggctcttcagcgcgaattacagcacgagaaaaacacttcctctctactcaggatggagctgcaacaagtggaaggactgaaaaaggagttgcgggagcttcaggacgagaaggcagagctgcagaagatctgcgaggagcaggaacaagccctccaggaaatgggcctgcacctcagccagtccaagctgaagatggaagatataaaagaagtgaaccaggcactgaagggccacgcctggctgaaagatgacgaagcgacacactgtaggcagtgtgagaaggagttctccatttcccggagaaagcaccactgccggaactgtggccacatcttctgcaacacctgctccagcaacgagctggccctgccctcctaccccaagccggtgcgagtgtgcgacagctgccacaccctgctcctgcagcgctgctcctccacggcctcctgaacgtccgtcctcaggagcacagcctcacggacagtgccaaaccctgtgggtctccaggggcttgggaaatgtgttctttcccaagagaatcaaaggaaagaatcaaatttcttgcccggtcactggcactccagaagacagcgtgccggaaccggcagctctcacctttctgtgacttgttcggaattaactcctctggatggaaacttccatcttacttggttacatcacggctctggttcagatacaacttcatgattttgctactatcatttttcacttttcaaagaatttaacctattttacagcagttcagttctgctagtgagtagttttcctctcctaccttccttctaaaaacctgattcatgcacagcgtttgacacacatggagtctgccagtgtgccttctctgcttcagacaagagatctgccatttcatgcccttgtgactacctatcattggccctgcaataaaatcatttatttttcaaaaaaaaaaaaaaa

SEQ ID NO: 23554 - DNA, 10215 bp, Homo Sapiens
  misc_feature (4908)..(4908): n is a, c, g, or t
  misc_feature (5098)..(5098): n is a, c, g, or t
  misc_feature (9196)..(9196): n is a, c, g, or t
gcggccgctgcttctttcacactttagttgggagctgcgcgccgcgctcagttactggagagctggccgcgcgccgccgcctcccgcacgcttgcacgcgggcccggcttcggggttttgggttcttactccaagcggcggggaggagggggagccccggacacactgtggggaggaggaggaagaagaggaggagggaggaagaaaaaagacgaggaggacaggggcggggggcgggaggcttgccaccttcagcccccccgcgaacgcccaaggtgcacacatcttgaccaactcagcagcaaggtggattttctttgtgtttaaagaaaaaaaatgtccctgtgtctgtagagatgatttgcagttcagcccggctgaagctgaccgaatgagactatgggctgtgcctccgccaagcatgttgccactgttcaaaatgaagaggaagcccagaaagggaaaaactaccagaacggagatgtgtttggcgatgagtataggatcaaaccagtggaagaggtcaaatacatgaaaaatggggcagaagaagagcagaaaatagcagccaggaaccaagaaaacttggaaaaaagtgccagctcaaatgtaagacttaaaactaataaagaggttccgggattagttcatcaacccagagcaaacatgcacatctctgaaagccaacaagaattcttcagaatgctggatgaaaaaattgaaaagggtcgggattactgttcggaagaagaggatatcacatagcaccaattttaccactcaaaccaggagctactactgtgtaaataggttacaccccagttgaaatctttgcaaaggtcggttctattcagcgaacagcactatagcaaaagaagatcgttccatattgtacgccccattaaattacagtgtttcttaatgaacttgcaaaggaatattgctaaaaacaaacaaaaaaaactgttatcgaactttctttgttgctgctagttaaaacttgttgcaacttttcacttctcttgtgtccaggtatgcagcaaaattctgcaatttcaccttaaagatactgttggttttacagatgctctccaacctattttctataagatgaggtagtggtgaactcagataacaaacttcccttctaaactggttctgcttctaagacaagcatctcctgccctctctccttcctccccatctctcgcacgcagtctagagatggactgagccttgcttctcactggcagtgttgagctttggagatgggatggttgctatgccaagccttgtttctctgctcagaagaagtagagaagctattatcaattaaaagcatgctgtgatgtgactcctggaagtgacgtaggagtgagtggcaggttgtttgatttaataggtatcttaatcaagaattaagcttgcaacattggctttgctcagatgcagatggaagtgtgatcacaatcattttgaatccctcttcctcacttttttttctaagaaaataaacattttactgtttttatggatccttgtcttctcccattcatccagctcagtgttttaagatgatcctgggtgcagaagttgagccctcctttgcattgacactgataattagcctatagggctccctacccttccattaagaatctaccaagcattagcaaggctgaaagtggtctaagaggtgaggggacatcctatgactttttaggaaggcctgaaaccaccttgttacctttcattttgttagcaaataaaccatcctattttgtaactctcccccttcaaaatgctacatgagccttgccacttcctttttctcttacttccagcacactagacatagcaaaagtgtttgcctactcaaaaacataatacttttatgctgatgatggtatttggagatgtgaaagccaaaagcccctggcagtggtggggaatgttgactgagtgttcagcagagtttatttttccatactatatgaagagaatgatctcttctcaaagacagaagtgatatttttaacaaatattgtcacaagtaaatagcaatcaaaaggagaaaataacttttgtatttttttaatgtgtttgatagctttgacgagggttctctttgttactttcaggggagggcatcctattaaatgccacgccagcagtccgggtctgggtttgtcccacaaaatcacaggagcactgtatgttcctctcttttggagttgtgactttgaagggcctcaatattagccacactgccgcctgcagaaggtggagagttaagatgttctatgtcaatttgctcttgccgaaaagatgagcctcgattttaaaatctatccacatccaactgatggcaccattgatgtgcaaataatgagattccctatctccttttagacctgggacggcaaaagggaagggaaggaaacttagcagagtgctattgactatagattcacatattagcaacaaaatcccgtaattcttttggccaacagcagctattttggggagcagctgtggctgttacataaatagagatgcagccaaaattttaggccttttatcctgcttctagcagaaaaatgcagggagagtcaagtagtctagggtttcaggttgcctcccctcatatggtttttggccaagtgactaaaacagttttccacaactgtaaacaaactggtaagccccacctcaaacttgttcactggggactttgcttaccgttctgtgggtgaccttttccgggatttcttgttcttatcaagcaagaattaagcacatgctaaacgtcttccatttgacttctctactcggtgtctcagacagtgtcttcccagaaaaccaccaccctctacccaaagatgaaacatgctcatgtcatttttctcatggtcacatttaacagttttgacatgttatacttgcgcatagatccaagcgtttcttgggaacctgacttttgagtgtttaataaagccggaagtggtgttgccctgaaccagcagattttcacctgggttctggctccggtgtttaacactggatacatctttgatgtgcgaaagtgagttcatcttcagacacatttggtacatccagaaatagatccaagaaatggggtggttgagtgggtccgcacgaaatgcttgattatgtcagcaacacccaacactgtctgttttccatttgttggttttaatcataaaattgtcaagtgattcgtgttgtactttatttttgtgccttctgaacggatctaaaacaaawgtattttgccttttttaccccacgtgtatctgaacattaagcagattggctcagacaccatgaaaaggatactccaatgtacgtgctggtgcactctgctagttgttatctctgtagggctcaagaagctggaaggaggaagggagggtaagtggcctggtgagtggaggtagaaaaatgatgagaaatgaactgagagcattaagcagagagggttgataggctggccgtgtccggggtgaaattggaaatccagctgcctagtggccagtgggtggggcaagactgtcaacgagatttacagctggcttacacatgccttatgtcctctgagttgtagagttgtaaaagttcagcagtgtgtgcacagctttcttttggttggcagagattcaggatcatggagtactgctctcataattgaagacgtgtttgttattggcagagaaccttaaaaaaggcctttacctcagcgatgcttcctagccccaggcttgcagagaacacagagtggtgttgtggtctatttagggacaaagaaggtataaagtccagagatgagaaaactgggtcagccctcagaaactgcagcagccacgcacacagaagcctgctggaagacaggtctctctccgtccacagtgcccatcatctgagcctgggctgggatgactcaacttagcaaagacggacccaggaggagtgctggttcttcagtctttgtactggccccatcctctcctcactgtaatgtgaggaagcacctctgtgtcagggctcacctgggcatccaaagcggccacgcccacaatccgacagcccccaggagcaggtccagggatgatgcagcccccttcttggtcccatgtgatgtcatcctgctttgttatcttcttataactttatcctgctataactttatcctcttcccagcctcatccctgtttttctgttagggcaagactcttccataagcctgctaaaaaacagagatgatacctcttacaaactttacctcatagcctgtgaagcaggttggcatgtggattacaagtcctgctttgacactgggcaagaatttaagattgttctatctctactagtcatagaaaagaaacattgttaaacatgttgagttttaaaggaagaaatattttcaaattcttaatccaagaaaatactgagttggaatcttagacttcgggactctgacacgttctttatgaaaggcaaaataattggtatctaaagttctctccttcctgcctcccctaaagaaaaaggatattagattgcacactataattttacataagatctgccttccacacttccctgctggaaggcattctcagagctttatgtcttcgtacctctcagagattggactttttcttgtttaaaaccccaaccaaaaaaaataataaggcatgattggtggggagggaatgtgtatttaggggcataataaaaaggtggctcgaagcaggaactttggcctcatggtgtcatgggtggatgcctggactccagtgtgcctgtgaggggctgggttaggcagtcggctgtcacactcacatgtgcctgcaataaaccttttggaatttcatgaacgaggtnctatgaattgccttttgccaatgaatggatgtatttttccaaggggggaatagtatccttgactttggcagtcacctttttgtatgtctctagaraggggtcaaaaaaactatggtaaagatgaggcttatgagtgaatacctctgggacaaaccttaggactcacaagctatgccatgtttttcagganactctgtacctatctggaatccaatcctgggagaagaggaaaaaggagctaatatttgtcctttatactcactctgtgccagatactgtgscaggcatttataattgtttgtgtcaccccatgatatccgttaaattaatctattacccccgtgttctaaataatagatcttaagtgtggaatgcatctatccaacataaatgcccatgttgaaagaaggaaagatgtcattcaagtatttttcaaattctttttattatgactatgcccttcgcaacactgtgaaaacaacccctgggggcatctgccttccagaatctctctctggcttctcaccagcttggtttcctcatggggagtgttttatttggcctcccctatctgakctgcacacacaccagggggaggccactggctaacagtaggacttcagtgccctgaggaaaaggctttgggaatttaggcacacgtttctctccttggaatccttctagcatctggaaaaggaacctggtatttctgcagttagataccagatgcaccagaacaggcttcgagtgctgtgattcttcctggttcccaagtcttgttgttcatcacaaactgtatctttttaaggttaaaagtcttgaccttcatggggtctgggacaatccgatctccaagcatggaggaaaggcaatgcctggaccactgacttgcattgaaatcctttcttgtgggctagggtttgatgtctctttttcatctttggactggggatctgcatcttccaggtccatttaagcactgaaactagatgcaaatctctttcgagaccttacatgttttagatagtcatgtaatgacttggatagacatttaaataacttgttccaaggtcggaagacccaagaactcctcagagttcctcttcttgcttcttgaatcacatcctctaaagatgactcatgtctccatagcaattgttaaaggtgctgcctagacgggacccgctcccacctttacttactttgctcgaaggaaccaaaacaatgtccttgtgtaaaggggctgtcatatccagttttcctttgaaatctggcccccaagatcctgcttctttctaacctggcagctgtcatgtcccttcaagatgatgtgggaaatggcccttacaacttgggaaccacagaaattgctgtatttcgggaagattcacctctaaactgaaggcttcattctgatagtgtctgccctctctaccctgatttcgcccttctttgcttccatttttagcccaaggctttgaatttgattgagtaagacttagaggcagtataaagaacaccataaacttaggcagaggtcccttagggtctctagagttgaaaataattctacagccttagggggacctcttggcattgactctaaagggagagaatagcccctgtgtcctggcatttcagtctagaccttcaaggactgttctctcttgacaggcaagcaagcaaagaaagttttgcaatagatttcaagccagtttttccattcaaaccaagatgcaaattcataaaattactcttttcctggaatagatccaggcagctgccttattagaactttagattcggatctattttcttaacacacatacacatacacgcgcatacatacatatacagagagatacgtggagaaaggaaatttactctatcattgcaatacttcaagaaagagctgtattttgcctttctgtaatctccaagatagtgtctaggaaagtaatagtataactatagggataccgaaacaggaaaaaccagccatcactcttgagaaagtttgagttcgactcacatgggagaatcgaggtctgctactcgtcttgctttgtgccccatctgtgcctggatgccctactacayctgcttgactcgtctgggctgctagccggggtgttgtggctgacatcctttcctggccttacacacataatagacacatccctaacggcgtgtgcctggtccagccacatacagccaccacatgtgtcacacactgtccccctcatccatgtggacttgactggcatttcagcagctccactgggatgctctaaccccagtgtgtggagttggggtcccttcatctaggttgacccaggtatagcatttttagcattgcctttccagtcttgatgattcattcattgaactcatttatttctggagcccctggtacactccaggcactgcgctaattgccagcaaagcacaactgaactaaatccaccttcaaggaacctagccataacgagggaggcagcatggaagtaccctacaggggaaagtcctgagtgctgtgggagcatctcaccgtggcagccagcccagttttggcaatcaggggcttcctgaaagaggtgacatcaaagcccggatgtgtcagaggactgagggagagtgttactaaaggactttcaggctgagaggatagcacaggactcagcccaaaggagggccagtgtggactgtccagggccagcctgcagtacagaggctggagcttggacttgtagagggagagagaagagcaagggacgtggacggggcagtgagccaggctagccacagagggttcccggggctttgctggggattcagggagcataaataagagctttaggtggtgctgtgtcctctgcagcccactgctgaggtcctccagacagrtaaggtgtggtcacaatcagggccggggtttccctgctcactgcggcagtgcaggggtgcttgctgagatgaytcatcccagggtgtcctctgtcccttacccagccccaactcctcttcctctgccaaaagctatttgaattcaaggactttaacctgggccggatctggtttggagacaaaggggacagctctgggtcagcatgaccttctttagagccactaaggcgaaaaataccgtttgggaccaggctggcctagacccagggatgagaatgcaccctaaaataaatatacgggaagcagcagagggcttccctgtctagtgtgtgatcctaactaaaggcagctctcttgggcagccttcccctggattaggtcacatacacctggtggccaagcctctgctgggtcccaaatacacacccgagtcctgccaaagaaaggagatttttaaaaagcacagacaaattgtatgcaagtggaaaatacccataggcctagacagctgtggagggaagacctcgtgggtacctggaggctgccagagctgggagctctgcaggtatgagtcagggaaggctcagagacaagcagaatctctctatggagacaacttgcagtgccttttaggttttccaaataacctcggagttcagagcattgggtttttttctcccctccccacccccagaaaaataattagaaaaatgtttaggagaaaggaaaagaattagatgcatcagaataccagctataagccaacactgtttccagaaactcaagaaaaagctcaaacagaagacagttcccctgagaggctggaggcgttggtgctgaaggcaattttcctagctaaggggcactgggccttgctgcaccttggggctgaccttttttgcaaaacacccacccctgccctcctggcatactcaacagcaacgccagctttctggacccttggaaagatgttagctcaaacacccactttttccagatcttcctcttgctcttcactgaggaatttgtaattctgaggctagcgatgccgactcggatattccgcagcccaggtgtttagattagaatttgtccagcggtaatcctgatgctggaaaccaacaaacatttggcctcatattcacccatttaaaaactagagcccctggcaggtccccttagggccatgtgttcatggaatataagccaagtttgccytagcgctkgttcatggaatataagccaagtttacctctccccattttctgccctggcccacttcccactcacctccacctcattgccaggaagggatcaaaatgcctccatgccagttgttaaatggctacatatttgcccttcccaagggtatttgcatttntatttaggaacatggccttatattcaaggaaaatctagcatcaagattacgaggcatcacctctcaatcaggtctgggaggtatcttggggcattgctcttctgaacacctgcagaggcttcctcaggtgagtgtgggagcccggaagtggcctccctaaccactctgcctgcacatgaattctccaaagcagtgggcccccatctgtttcaattacacatgcctgtcagcaaaaacttcgtgagatgcactctctctgtgtgtttattaatttatttaaagcatatatccctttacttttgtactactatattaggcacattataaaaagtatacagcatagaaactttaaatgaataagacacaaaatattataaacagaggttctggcattttctctctgaactcctgagggggaccttgggcacctcctggtatgtgcacaccccactttgaacacccttgctttagtgcaaatcagcacgcctaaatrgcatcccaaacccactgtgcgacatttggcctgcagaataggaaagtcctaggscagaatccccaggaacttcaaatctgggagatgaggaaagaaaactcactcacaaacaacataaatgtaaataattcaaaaccctaaaggagagctgtccctagacagtagtggctacaggtgctaagcaaaagtcaggtacactggacagagccatgcgattgattgttcatcttccctctctgggtctccagaaaaggacactggcaatatccccagctctctcctgattggaattctttgaaccctcgaagtgctccagcagtactaccccccacgtagcagtgggcccatgtcgcttgaatattatttttgatttgaccaccaagatgtaatgatgattctattccattttgaaaagggtctgagaaagtgtacaggtctaattatatatacatatttatacatgtgtatttttgtttattgttacattttgacattggactttctattaaataatttttaagagttg

SEQ ID NO: 23555 - DNA, 2318 bp, Homo Sapiens
gggggaagatggcggacgtgcttagcgtcctgcgacagtacaacatccagaagaaggagattgtggtgaagggagacgaagtgatcttcggggagttctcctggcccaagaatgtgaagaccaactatgttgtttgggggactggaaaggaaggccaacccagagagtactacacattggattccattttatttctacttaataacgtgcacctttctcatcctgtttatgtccgacgtgcagctactgaaaatattcctgtggttagaagacctgatcgaaaagatctacttggatatctcaatggtgaagcgtcaacatcggcaagtatagacagaagcgctcccttagaaataggtcttcagcgatctactcaagtcaaacgagctgcagatgaagttttagcagaagcaaagaaaccacgaattgaggatgaagagtgtgtgcgccttgataaagagagattggctgcccgtttggagggtcacaaagaagggattgtacagactgaacagattaggtctttgtctgaagctatgtcagtggaaaaaattgctgcaatcaaagccaaaattatggctaagaaaagatctactatcaagactgatctagatgatgacataactgcccttaaacagaggagttttgtggatgctgaggtagatgtgacccgagatattgtcagcagagagagagtatggaggacacgaacaactatcttacaaagcacaggaaagaatttttccaagaacatttttgcaattcttcaatctgtaaaagccagagaagaagggcgtgcacctgaacagcgacctgccccaaatgcagcacctgtggatcccactttgcgcaccaaacagcctatcccagctgcctataacagatacgatcaggaaagattcaaaggaaaagaagaaacggaaggcttcaaaattgacactatgggaacctaccatggtatgacactgaaatctgtaacggagggtrcatctgcccggaagactcagactcctgcagcccagccagtaccaagaccagtttctcaagcaagacctcccccaaatcagaagaaaggatctcgaacacccattatcataattcctgcagctaccacctctttaataaccatgcttaatgcaaaagaccttctacaggacctgaaatttgtcccatcagatgaaaagaagaaacaaggttgtcaacgagaaaatgaaactctaatacaaagaagaaaagaccagatgcaaccagggggcactgcaattagtgttacagtaccttatagagtagtagaccagccccttaaacttatgcctcaagactgggaccgcgttgtagccgtttttgtgcagggtcctgcatggcagttcaaaggttggccatggcttttgcctgatggatcaccagttgatatatttgctaaaattaaagccttccatctgaagtatgatgaagttcgtctggatccaaatgttcagaaatgggatgtaacagtattagaactcagctatcacaaacgtcatttggatagaccagtgttcttacggttttgggaaacattggacaggtacatggtaaagcataaatcgcacttgagattctgaattatttggctcctccatttctggaaattgagactcaagctttatgaatttatcaagaacttaaaaatgaagaaggtcacagattgatcttttataagaccttatttgatgctttgtgcttcaaggagatgatacctgtcatccatataagcaaactttttggcttacaactatttttttaatattagccttctagtctgtaatggaaattgtatattttgatagaagttttttctccattggttaaattagcattacttaaaatttgtttctttagaaaataaatgcaggttataaatgtgtgtatatttagagattataaggctctctgagccatcttctgatttttcattgctctataattctttttactgaaaatactatgttatgaatggtattaaattttagtctctggaacatccaaaaccaagcaaagggatgtgactattttgaatgaatcagaatgtcaacttgtatgtacactatatctacacttactcattatttaaaaagaataatgaaaaatctagatcaattcttcaatttgattgaactgttcagccttttcaagatttctttatttacaaatgattacatttaaatgaatgtacattcttctcactgactttggtgattttgaaacctagaatgatgtgtttctatctgtaatatctttccatttgaaaaaaatctcaaaacacagattaaaaccac

SEQ ID NO: 23556 - DNA, 1606 bp, Homo Sapiens
cgggtgaactacttaagcttaatttgttaaactccggggctctcaagaacaatggaatatcatcctgatttagaaaatttggatgaagatggatatactcaattacacttcgactctcaaagcaataccaggatagctgttgtttcagagaaaggatcgtgtgctgcatctcctccttggcgcctcattgctgtaattttgggaatcctatgcttggtaatactggtgatagctgtggtcctgggtaccatggctatttggagatccaattcaggaagcaacacattggagaatggctactttctatcaagaaataaagagaaccacagtcaacccacacaatcatctttagaagacagtgtgactcctaccaaagctgtcaaaaccacaggggttctttccagcccttgtcctcctaattggattatatatgagaagagctgttatctattcagcatgtcactaaattcctgggatggaagtaaaagacaatgctggcaactgggctctaatctcctaaagatagacagctcaaatgaattgggatttatagtaaaacaagtgtcttcccaacctgataattcattttggataggcctttctcggccccagactgaggtaccatggctctgggaggatggatcaacattctcttctaacttatttcagatcagaaccacagctacccaagaaaacccatctccaaattgtgtatggattcacgtgtcagtcatttatgaccaactgtgtagtgtgccctcatatagtatttgtgagaagaagttttcaatgtaagaggaagggtggagaaggagagagaaatatgtgaggtagtaaggaggacagaaaacagaacagaaaagagtaacagctgaggtcaagataaatgcagaaaatgtttagagagcttggccaactgtaatcttaaccaagaaattgaagggagaggctgtgatttctgtatttgtcgacctacaggtaggctagtattatttttctagttagtagatccctagacatggaatcagggcagccaagcttgagtttttattttttatttatttatttttttgagatagggtctcactttgttacccagcctagaatcttgtataatatgtaattgtagggaaactgctctcataggaaagttttctgctttttaaatacaaaaatacataaaaatacataaaatctgatgatgaatataaaaaagtaaccaacctcattggaacaagtattaacattttggaatatgttttattagttttgtgatgtactgttttacaatttttaccatttttttcagtaattactgtaaaatggtattattggaatgaaactatatttcctcatgtgctgatttgtcttatttttttcatactttcccactggtgctatttttatttccaatggatatttctgtattactagggaggcatttacagtcctctaatgttgattaatatgtgaaaagaaattgtaccaattttactaaattatgcagtttaaaatggatgattttatgttatgtggatttcatttcaataaaaaaaaactcttatcaaaaaaaaaaaaaaaaaaaaaaaaaaaaaaaaaaaaaaaa

SEQ ID NO: 23557 - DNA, 1506 bp, Homo Sapiens
  misc_feature (1494)..(1496): n is a, c, g, or t
gaacactggatactgctcttacaaaaccaagaggaaatcatgaagaaatgttttagttattgaaactacagttgaaatcatggatacatcaacaaatctggatattggagcccagcttatcgtggaagagtgtcccagcacttatagcctaactggcatgccagacattaaaatagaacatccactggacccaaattcagaagaagggtcagctcagggtgttgccatgggaatgaaattcatattgcctaaccgatttgatatgaatgtgtgttctcgatttgtgaagtccttaaatgaagaagatagtaaaaatattcaagatcaggttaactctgacctggaggtggcatctgtcctatttaaagctgaatgcaatatccatacatctccttctccgggaattcaagtaaggcatgtctacaccccctctacaacaaagcatttctcacccataaaacagtcaaccactttaaccaacaaacacagaggaaatgaggtctctaccacacctctgttagcaaattctttgtctgttcaccagttggctgctcagggagagatgctctatctggctactcgtatcgaacaagaaaatgttatcaatcacacggatgaagaaggatttactcctctgatgtgggctgcagcacacgggcaaatagctgtggtagagttcctacttcagaatggtgctgatccccaacttttaggaaaaggtcgagaaagtgcactgtcgttggcctgtagtaaaggctacacagatattgtcaaaatgctgcttgattgtggagttgatgtaaatgaatatgattggaatggaggaacacctctgctttatgctgtacatggaaatcatgtgaaatgtgtaaagatgctcttagaaagtggggctgatccaacaattgaaactgactctggatataattctatggatctagctgtagccctaggctatagaagtgttcaacaggttattgagtcacatttgttgaagctgcttcaaaatatcaaggagtagacacagtcatcagaaaatgtctgcccttttgtttacttcttggtccttataaatgatagttttgtttacttataaatttttacctcagttgcaatatttactggtttttagtaggttttaataaatatttctctgagtaattcactggtttataataaatgtaatactctttttataactatgttttactgtatatttaaaattataaattaatgttttcgtggcatgtaaatttttatggtacagatagttatcatcagtctttgtatcaagtgctgtaatttgacattttcagaaattattctaccctagtcatcttcactcgtgtattaagtcattcactttatatagggtttgctataaatccctagaaaaaaattgttcttattgttgaataaaaaagtgcacagtgtgattgtttacaaaatgatattataaataaataaaatacttcttctgtcaaaaaaaaaaannnaaaaaaaaaa

SEQ ID NO: 23558 - DNA, 3190 bp, Homo Sapiens
agcgcttgtgacggtgtgaccagggaggggaagtgtaagtgtctggccgtccgtggtggcggggccagcaggctgtcccagccctcacccggagctcctcacccggcaccacatctgtgttttcccaggacccacgcagccacccagcctcagcactcatctgcgcagccatggaggccctgggacctgggggcgaccgcgcctccccggcctcgtccactagcagcctggacctgtggcatctgtccatgcgcgcggactcggcctacagctctttctccgcagcctccggcggccccgagccgcgcacgcagtcgccggggacagacctccttccttacctagactgggactacgtgcgtgtggtttggggcggcccgggccccgccccgcccgacgctgccctttgcacatccccgcggccccggcccgcggttgcagcccgcagtgggccgcagccaacagaggtcccggggaccccgggaccactgaacaggcaggccaccccgctgctgtacgcgctggcggccgaggcggaggccgcggcgcaggctgtcgagccgcccagcccgccggcctcgagggccgcctaccgccagcggcttcagggcgcgcagcggcgagtgctccgggagacgtcgttccagcgcaaggagctccgcatgagcctgcccgcccgtctgcggcccactgtcccagcgcggcccccggcgactcacccgcgctccgcctcgctcagccacccgggcggggagggggagccggcgcgctcccgggctcccgcgccaggaactgccggccggggtcccctcgccaaccagcagcggaagtggtgcttctcagagccaggaaagctggatcgtgtgggtcggggcggtgggccggcgcgggaatgcctgggtgaggcctgctccagctctggcctccctgggcccgagcccttggagttccagcatccggcgctggctaagtttgaagatcacgaggtcggatggctgcccgagacgcaaccccaaggctccatgaacctggactccgggtccttgaagctcggtgatgccttcaggcccgccagtcggagtcggagcgcttcaggcgaagtcttgggttcctggggaggatcaggagggaccatacccattgtccaggctgttccccaaggagcagaaacccccagaccattgtttcagaccaaactttccaggttcttgcctcagaaagaggctgcggtgatgtatcctgcagagttaccccagagcagccctgctgacagtgaacagagggtctcagagacctgcattgtgcctgcctggctcccctcccttcctgatgaagtgttcctagaagaggccccactggtcagaatgagatcaccaccagacccccatgcctcccaggggcccccagccagtgtccatgcctctgaccagccgtatggaactggcttaggccaaagaactggccaggttacagtccccacggagtacccgctccatgagtgtccaggaactgcaggggcagatgactgctggcagggggtgaatggttctgtaggtatttccaggcccacaagccacacccccactgggactgcaaatgataacatcccaactattgaccccactggactgaccaccaatccccccacagctgcagagagtgacctcctcaaacctgtcccagctgatgccttgggactttcaggcaatgatactccaggtccctctcacaatactgccctagccaggggcactggccagcctggttccaggcccacatggcctagtcagtgcctcgaggagctggttcaggagctggccagattagatccctctctatgtgaccctcttgcttcccagcccagcccagagccacccctgggcctgctggatggactgattcctttagcagaggtccgggctgcaatgcggcctgcctgtggggaggctggagaggaggctgccagtacttttgagccagggtcctatcagttcagcttcacccagctcctgccggctcctcgggaggagacaaggcttgaaaaccctgccacccaccctgtgcttgaccagccatgtgggcaggggctccctgcaccaaacaacagcatccagggcaagaaagtggagctggccgcccgcctccaaaagatgcttcaggaccttcacacggagcaggagcggctgcagggggaggcacaagcatgggccaggcgccaagcggctctggaggctgcagtgcgccaggcctgtgcccctcaggagctggagcggttcagccggttcatggccgacctagagcgcgtgcttggccttctgctgctgctgggcagtcgcctggcgcgcgtgcgccgcgccctggcccgggcggcctcagacagcgaccctgatgagcagcgactccggctcctgcagcggcaggaggaggacgccaaggagctgaaggagcacgtagcgcggcgcgagcgggccgtgcgggaggtgctggtgcgagcactaccggtggaggagctgcgcgtctattgcgccctgctggcgggcaaggccgccgtcctggcccagcagcgcaacctggacgagcgcatccgcctccttcaggaccaactggacgccatcagggacgaccttggccatcatgccccgtctcccagcccggcgcggcccccagggacctgtcctccagttcagccgcccttccctcttctccttacatagttataggtggagagggtggggtgcaccgcccctatctctcacccacgtaagtggggtgatgctgatttagtctctgcttttcccttgagggattggggaggacccagtccaggcctttctaagatactcctccagccgggcgcggtggctcacgcctgtaatcccagcactttgggaggccgaggcgggcggatcacaaggtcaggagatcgagaccatcctggctaacacggtgaaaccccgtctctactaaaaatataaaaaattagccgggcgtggtggcgggtgcctgtattgccagctactcggaaggctgaggcaggagaatggcgtgaacctgggaggtggagcttgcagtgagcggacatcgcgccactgcactccagcctgggcgacagagcaagactccgtctcaaaaaaaaaaaaaaaaaaaaaaaaaaaaaagatacttctccaaagtgttctcatgtggcctc

SEQ ID NO: 23559 - DNA, 1516 bp, Homo Sapiens
ttggtctaagacatgggctgacaaactttttccataaagggccagaaagtaaatatttcaggctttgtgggatatctatttatgatttattttactcctagtattatttcatcttttatacaggttattaaggttagtattgctgcataacaaattactccaaaatttaatcatttatattcaagaagagttcagctgctaggttcttattttgggactctcatgatgctgaggtcaagatgccagctggaggccaggcgccgcagctcacgcctgtaatcccagcgttttgggaggccaggggcctcccaaattcaaaaggaagagacaaagtccacatctgtcaatgcgaagaatggaaaggtcacatatcatatgtggagcgggacataacaacttcggaaattaaatctcttccccaggtcagtgtgcgggccttccacgctgccagcggaacactggaatggcggaaggggaacgggtacggcagggggaaaggctgggggtggggtcgggtcgagtcgagggaagctggcccgagtgtggacagagatggcggtctgcgcgtctgttgttcccagcgctctgcgaagcctgaaaaggaggagcaacctgtccagaatccccgcaggtccgtgaaagacaggaaaaggaggggaaatctcgacatggaaaaactctacagtgaaaatgaaggaatggcttcaaaccaaggaaagatggaaaatgaagaacagccacaagacgagagaaagccagaagtaacttgtactctggaagacaagaagttagaaaacgagggaaagacagaaaacaagggcaaaacaggagatgaggaaatgttaaaggataaaggaaagccagagagtgagggagaggcaaaagaaggaaagtcagagagggagggagagtcagagatggagggaggatcagagagagagggaaaaccagagatagagggaaagccagagagtgaaggagagccagggagtgaaacaagggctgcaggaaagcgcccagctgaggatgatgtacccaggaaagccaaaagaaaaactaataaggggctggctcattacctcaaggagtataaagaggccatacatgatatgaatttcagcaatgaggacatgataagagaatttgacaatatggctaaggtgcaggatgagaagagaaaaagcaaacagaaattgggggcgtttttgtggatgcaaagaaatttacaggaccccttctaccctagaggtccaagggaattcaggggtggctgcagggccccacgaagggacattgaagacattccttatgtgtagtgtccctggcaggcatttaccaggccatgtgctttaacgttacggtaatactttactttaggcatccctcctgttgctagcagccttttgacctatctgcaatgcagtgttctcagtaggaaatgttcatctgttacatggaaaaaatgttgatggtgcattgtaaaattaaaaaacacaacttgcagaaccaaaaaaaa

SEQ ID NO: 23560 - DNA, 11189 bp, Homo Sapiens
gcgaccgagaagatgcccgccctgcgccccgctctgctgtgggcgctgctggcgctctggctgtgctgcgcgacccccgcgcatgcattgcagtgtcgagatggctatgaaccctgtgtaaatgaaggaatgtgtgttacctaccacaatggcacaggatactgcaaatgtccagaaggcttcttgggggaatattgtcaacatcgagacccctgtgagaagaaccgctgccagaatggtgggacttgtgtggcccaggccatgctggggaaagccacgtgccgatgtgcctcagggtttacaggagaggactgccagtactcgacatctcatccatgctttgtgtctcgaccctgcctgaatggcggcacatgccatatgctcagccgggatacctatgagtgcacctgtcaagtcgggtttacaggtaaggagtgccaatggaccgatgcctgcctgtctcatccctgtgcaaatggaagtacctgtaccactgtggccaaccagttctcctgcaaatgcctcacaggcttcacagggcagaaatgtgagactgatgtcaatgagtgtgacattccaggacactgccagcatggtggcacctgcctcaacctgcctggttcctaccagtgccagtgccttcagggcttcacaggccagtactgtgacagcctgtatgtgccctgtgcaccctcgccttgtgtcaatggaggcacctgtcggcagactggtgacttcacttttgagtgcaactgccttccaggttttgaagggagcacctgtgagaggaatattgatgactgccctaaccacaggtgtcagaatggaggggtttgtgtggatggggtcaacacttacaactgccgctgtcccccacaatggacaggacagttctgcacagaggatgtggatgaatgcctgctgcagcccaatgcctgtcaaaatgggggcacctgtgccaaccgcaatggaggctatggctgtgtatgtgtcaacggctggagtggagatgactgcagtgagaacattgatgattgtgccttcgcctcctgtactccaggctccacctgcatcgaccgtgtggcctccttctcttgcatgtgcccagaggggaaggcaggtctcctgtgtcatctggatgatgcatgcatcagcaatccttgccacaagggggcactgtgtgacaccaaccccctaaatgggcaatatatttgcacctgcccacaaggctacaaaggggctgactgcacagaagatgtggatgaatgtgccatggccaatagcaatccttgtgagcatgcaggaaaatgtgtgaacacggatggcgccttccactgtgagtgtctgaagggttatgcaggacctcgttgtgagatggacatcaatgagtgccattcagacccctgccagaatgatgctacctgtctggataagattggaggcttcacatgtctgtgcatgccaggtttcaaaggtgtgcattgtgaattagaaataaatgaatgtcagagcaacccttgtgtgaacaatgggcagtgtgtggataaagtcaatcgtttccagtgcctgtgtcctcctggtttcactgggccagtttgccagattgatattgatgactgttccagtactccgtgtctgaatggggcaaagtgtatcgatcacccgaatggctatgaatgccagtgtgccacaggtttcactggtgtgttgtgtgaggagaacattgacaactgtgaccccgatccttgccaccatggtcagtgtcaggatggtattgattcctacacctgcatctgcaatcccgggtacatgggcgccatctgcagtgaccagattgatgaatgttacagcagcccttgcctgaacgatggtcgctgcattgacctggtcaatggctaccagtgcaactgccagccaggcacgtcaggggttaattgtgaaattaattttgatgactgtgcaagtaacccttgtatccatggaatctgtatggatggcattaatcgctacagttgtgtctgctcaccaggattcacagggcagagatgtaacattgacattgatgagtgtgcctccaatccctgtcgcaagggtgcaacatgtatcaacggtgtgaatggtttccgctgtatatgccccgagggaccccatcaccccagctgctactcacaggtgaacgaatgcctgagcaatccctgcatccatggaaactgtactggaggtctcagtggatataagtgtctctgtgatgcaggctgggttggcatcaactgtgaagtggacaaaaatgaatgcctttcgaatccatgccagaatggaggaacttgtgacaatctggtgaatggatacaggtgtacttgcaagaagggctttaaaggctataactgccaggtgaatattgatgaatgtgcctcaaatccatgcctgaaccaaggaacctgctttgatgacataagtggctacacttgccactgtgtgctgccatacacaggcaagaattgtcagacagtattggctccctgttccccaaacccttgtgagaatgctgctgtttgcaaagagtcaccaaattttgagagttatacttgcttgtgtgctcctggctggcaaggtcagcggtgtaccattgacattgacgagtgtatctccaagccctgcatgaaccatggtctctgccataacacccagggcagctacatgtgtgaatgtccaccaggcttcagtggtatggactgtgaggaggacattgatgactgccttgccaatccttgccagaatggaggttcctgtatggatggagtgaatactttctcctgcctctgccttccgggtttcactggggataagtgccagacagacatgaatgagtgtctgagtgaaccctgtaagaatggagggacctgctctgactacgtcaacagttacacttgcaagtgccaggcaggatttgatggagtccattgtgagaacaacatcaatgagtgcactgagagctcctgtttcaatggtggcacatgtgttgatgggattaactccttctcttgcttgtgccctgtgggtttcactggatccttctgcctccatgagatcaatgaatgcagctctcatccatgcctgaatgagggaacgtgtgttgatggcctgggtacctaccgctgcagctgccccctgggctacactgggaaaaactgtcagaccctggtgaatctctgcagtcggtctccatgtaaaaacaaaggtacttgcgttcagaaaaaagcagagtcccagtgcctatgtccatctggatgggctggtgcctattgtgacgtgcccaatgtctcttgtgacatagcagcctccaggagaggtgtgcttgttgaacacttgtgccagcactcaggtgtctgcatcaatgctggcaacacgcattactgtcagtgccccctgggctatactgggagctactgtgaggagcaactcgatgagtgtgcgtccaacccctgccagcacggggcaacatgcagtgacttcattggtggatacagatgcgagtgtgtcccaggctatcagggtgtcaactgtgagtatgaagtggatgagtgccagaatcagccctgccagaatggaggcacctgtattgaccttgtgaaccatttcaagtgctcttgcccaccaggcactcggggcctactctgtgaagagaacattgatgactgtgcccggggtccccattgccttaatggtggtcagtgcatggataggattggaggctacagttgtcgctgcttgcctggctttgctggggagcgttgtgagggagacatcaacgagtgcctctccaacccctgcagctctgagggcagcctggactgtatacagctcaccaatgactacctgtgtgtttgccgtagtgcctttactggccggcactgtgaaaccttcgtcgatgtgtgtccccagatgccctgcctgaatggagggacttgtgctgtggccagtaacatgcctgatggtttcatttgccgttgtcccccgggattttccggggcaaggtgccagagcagctgtggacaagtgaaatgtaggaagggggagcagtgtgtgcacaccgcctctggaccccgctgcttctgccccagtccccgggactgcgagtcaggctgtgccagtagcccctgccagcacgggggcagctgccaccctcagcgccagcctccttattactcctgccagtgtgccccaccattctcgggtagccgctgtgaactctacacggcaccccccagcacccctcctgccacctgtctgagccagtattgtgccgacaaagctcgggatggcgtctgtgatgaggcctgcaacagccatgcctgccagtgggatgggggtgactgttctctcaccatggagaacccctgggccaactgctcctccccacttccctgctgggattatatcaacaaccagtgtgatgagctgtgcaacacggtcgagtgcctgtttgacaactttgaatgccaggggaacagcaagacatgcaagtatgacaaatactgtgcagaccacttcaaagacaaccactgtgaccaggggtgcaacagtgaggagtgtggttgggatgggctggactgtgctgctgaccaacctgagaacctggcagaaggtaccctggttattgtggtattgatgccacctgaacaactgctccaggatgctcgcagcttcttgcgggcactgggtaccctgctccacaccaacctgcgcattaagcgggactcccagggggaactcatggtgtacccctattatggtgagaagtcagctgctatgaagaaacagaggatgacacgcagatcccttcctggtgaacaagaacaggaggtggctggctctaaagtctttctggaaattgacaaccgccagtgtgttcaagactcagaccactgcttcaagaacacggatgcagcagcagctctcctggcctctcacgccatacaggggaccctgtcataccctcttgtgtctgtcgtcagtgaatccctgactccagaacgcactcagctcctctatctccttgctgttgctgttgtcatcattctgtttattattctgctgggggtaatcatggcaaaacgaaagcgtaagcatggctctctctggctgcctgaaggtttcactcttcgccgagatgcaagcaatcacaagcgtcgtgagccagtgggacaggatgctgtggggctgaaaaatctctcagtgcaagtctcagaagctaacctaattggtactggaacaagtgaacactgggtcgatgatgaagggccccagccaaagaaagtaaaggctgaagatgaggccttactctcagaagaagatgaccccattgatcgacggccatggacacagcagcaccttgaagctgcagacatccgtaggacaccatcgctggctctcacccctcctcaggcagagcaggaggtggatgtgttagatgtgaatgtccgtggcccagatggctgcaccccattgatgttggcttctctccgaggaggcagctcagatttgagtgatgaagatgaagatgcagaggactcttctgctaacatcatcacagacttggtctaccagggtgccagcctccaggcccagacagaccggactggtgagatggccctgcaccttgcagcccgctactcacgggctgatgctgccaagcgtctcctggatgcaggtgcagatgccaatgcccaggacaacatgggccgctgtccactccatgctgcagtggcagctgatgcccaaggtgtcttccagattctgattcgcaaccgagtaactgatctagatgccaggatgaatgatggtactacacccctgatcctggctgcccgcctggctgtggagggaatggtggcagaactgatcaactgccaagcggatgtgaatgcagtggatgaccatggaaaatctgctcttcactgggcagctgctgtcaataatgtggaggcaactcttttgttgttgaaaaatggggccaaccgagacatgcaggacaacaaggaagagacacctctgtttcttgctgcccgggaggggagctatgaagcagccaagatcctgttagaccattttgccaatcgagacatcacagaccatatggatcgtcttccccgggatgtggctcgggatcacatgcaccatgacattgtgcgccttctggatgaatacaatgtgaccccaagccctccaggcaccgtgttgacttctgctctctcacctgtcatctgtgggcccaacagatctttcctcagcctgaagcacaccccaatgggcaagaagtctagacggcccagtgccaagagtaccatgcctactagcctccctaaccttgccaaggaggcaaaggatgccaagggtagtaggaggaagaagtctctgagtgagaaggtccaactgtctgagagttcagtaactttatcccctgttgattccctagaatctcctcacacgtatgtttccgacaccacatcctctccaatgattacatcccctgggatcttacaggcctcacccaaccctatgttggccactgccgcccctcctgccccagtccatgcccagcatgcactatctttttctaaccttcatgaaatgcagcctttggcacatggggccagcactgtgcttccctcagtgagccagttgctatcccaccaccacattgtgtctccaggcagtggcagtgctggaagcttgagtaggctccatccagtcccagtcccagcagattggatgaaccgcatggaggtgaatgagacccagtacaatgagatgtttggtatggtcctggctccagctgagggcacccatcctggcatagctccccagagcaggccacctgaagggaagcacataaccacccctcgggagcccttgccccccattgtgactttccagctcatccctaaaggcagtattgcccaaccagcgggggctccccagcctcagtccacctgccctccagctgttgcgggccccctgcccaccatgtaccagattccagaaatggcccgtttgcccagtgtggctttccccactgccatgatgccccagcaggacgggcaggtagctcagaccattctcccagcctatcatcctttcccagcctctgtgggcaagtaccccacacccccttcacagcacagttatgcttcctcaaatgctgctgagcgaacacccagtcacagtggtcacctccagggtgagcatccctacctgacaccatccccagagtctcctgaccagtggtcaagttcatcaccccactctgcttctgactggtcagatgtgaccaccagccctacccctgggggtgctggaggaggtcagcggggacctgggacacacatgtctgagccaccacacaacaacatgcaggtttatgcgtgagagagtccacctccagtgtagagacataactgacttttgtaaatgctgctgaggaacaaatgaaggtcatccgggagagaaatgaagaaatctctggagccagcttctagaggtaggaaagagaagatgttcttattcagataatgcaagagaagcaattcgtcagtttcactgggtatctgcaaggcttattgattattctaatctaataagacaagtttgtggaaatgcaagatgaatacaagccttgggtccatgtttactctcttctatttggagaataagatggatgcttattgaagcccagacattcttgcagcttggactgcattttaagccctgcaggcttctgccatatccatgagaagattctacactagcgtcctgttgggaattatgccctggaattctgcctgaattgacctacgcatctcctcctccttggacattcttttgtcttcatttggtgcttttggttttgcacctctccgtgattgtagccctaccagcatgttatagggcaagacctttgtgcttttgatcattctggcccatgaaagcaactttggtctcctttcccctcctgtcttcccggtatcccttggagtctcacaaggtttactttggtatggttctcagcacaaacctttcaagtatgttgtttctttggaaaatggacatactgtattgtgttctcctgcatatatcattcctggagagagaaggggagaagaatacttttcttcaacaaattttgggggcaggagatcccttcaagaggctgcaccttaatttttcttgtctgtgtgcaggtcttcatataaactttaccaggaagaagggtgtgagtttgttgtttttctgtgtatgggcctggtcagtgtaaagttttatccttgatagtctagttactatgaccctccccacttttttaaaaccagaaaaaggtttggaatgttggaatgaccaagagacaagttaactcgtgcaagagccagttacccacccacaggtccccctacttcctgccaagcattccattgactgcctgtatggaacacatttgtcccagatctgagcattctaggcctgtttcactcactcacccagcatatgaaactagtcttaactgttgagcctttcctttcatatccacagaagacactgtctcaaatgttgtacccttgccatttaggactgaactttccttagcccaagggacccagtgacagttgtcttccgtttgtcagatgatcagtctctactgattatcttgctgcttaaaggcctgctcaccaatctttctttcacaccgtgtggtccgtgttactggtatacccagtatgttctcactgaagacatggactttatatgttcaagtgcaggaattggaaagttggacttgttttctatgatccaaaacagccctataagaaggttggaaaaggaggaactatatagcagcctttgctattttctgctaccatttcttttcctctgaagcggccatgacattccctttggcaactaacgtagaaactcaacagaacattttcctttcctagagtcaccttttagatgataatggacaactatagacttgctcattgttcagactgattgcccctcacctgaatccactctctgtattcatgctcttggcaatttctttgactttcttttaagggcagaagcattttagttaattgtagataaagaatagttttcttcctcttctccttgggccagttaataattggtccatggctacactgcaacttccgtccagtgctgtgatgcccatgacacctgcaaaataagttctgcctgggcattttgtagatattaacaggtgaattcccgactcttttggtttgaatgacagttctcattccttctatggctgcaagtatgcatcagtgcttcccacttacctgatttgtctgtcggtggccccatatggaaaccctgcgtgtctgttggcataatagtttacaaatggttttttcagtcctatccaaatttattgaaccaacaaaaataattacttctgccctgagataagcagattaagtttgttcattctctgctttattctctccatgtggcaacattctgtcagcctctttcatagtgtgcaaacattttatcattctaaatggtgactctctgcccttggacccatttattattcacagatggggagaacctatctgcatggacctctgtggaccacagcgtacctgcccctttctgccctcctgctccagccccacttctgaaagtatcagctactgatccagccactggatattttatatcctcccttttccttaagcacaatgtcagaccaaattgcttgtttctttttcttggactactttaatttggatcctttgggtttggagaaagggaatgtgaaagctgtcattacagacaacaggtttcagtgatgaggaggacaacactgcctttcaaactttttactgatctcttagattttaagaactcttgaattgtgtggtatctaataaaagggaaggtaagatggataatcactttctcatttgggttctgaattggagactcagtttttatgagacacatcttttatgccatgtatagatcctcccctgctatttttggtttatttttattgttataaatgctttctttctttgactcctcttctgcctgcctttggggataggtttttttgtttgtttatttgcttcctctgttttgttttaagcatcattttcttatgtgaggtggggaagggaaaggtatgagggaaagagagtctgagaattaaaatattttagtataagcaattggctgtgatgctcaaatccattgcatcctcttattgaatttgccaatttgtaatttttgcataataaagaaccaaaggtgtaatgttttgttgagaggtggtttagggattttggccctaaccaatacattgaatgtatgatgactatttgggaggacacatttatgtacccagaggcccccactaataagtggtactatggttacttccttgtgtacatttctcttaaaagtgatattatatctgtttgtatgagaaacccagtaaccaataaaatgaccgcatattcctgactaaacgtagtaaggaaaatgcacactttgtttttacttttccgtttcattctaaaggtagttaagatgaaatttatatgaaagcatttttatcacaaaataaaaaaggtttgccaagctcagtggtgttgtattttttattttccaatactgcatccatggcctggcagtgttacctcatgatgtcataatttgctgagagagcaaattttcttttctttctgaatcccacaaagcctagcaccaaacttctttttttcttcctttaattagatcataaataaatgatcctggggaaaaagcatctgtcaaataggaaacatcacaaaactgagcactcttctgtgcactagccatagctggtgacaaacagatggttgctcagggacaaggtgccttccaatggaaatgcgaagtagttgctatagcaagaattgggaactgggatataagtcataatattaattatgctgttatgtaaatgattggtttgtaacattccttaagtgaaatttgtgtagaacttaatatacaggattataaaataatattttgtgtataaatttgttataagttcacattcatacatttatttataaagtcagtgagatatttgaacatgaaaaaaaaaa

SEQ ID NO: 23561 - DNA, 976 bp, Homo Sapiens
agccattcctgaggaggactgccggtcgttcggacgtcttgcctgtcgctggaggagaggtccgggctctccaggaaggtggctgcggcgacaaaatgaagatattcgtgggcaacgtcgacggggcggatacgactccggaggagctggcagccctctttgcgccctacggcacggtcatgagctgcgccgtcatgaaacagttcgccttcgtgcacatgcgcgagaacgcgggcgcgctgcgcgccatcgaagccctgcacggccacgagctgcggccggggcgcgcgctcgtggtggagatgtcgcgcccaaggcctcttaatacttggaagattttcgtgggcaatgtgtcggctgcatgcacgagccaggaactgcgcagcctcttcgagcgccgcggacgcgtcatcgagtgtgacgtggtgaaagactacgcgtttgttcacatggagaaggaagcagatgccaaagccgcaatcgcgcagctcaacggcaaagaagtgaagggcaagcgcatcaacgtggaactctccaccaagggtatggttccgaccggcgtttagccgagctctctgattaccgccgtttatcagagtcgcagctttcgttccgccgctcgccgacaaagtcctcgctggattaccgtcgcctgcccgatgcccattccgattacgcacgctattcgggctcctataatgattacctgcgggcggctcagatgcactctggctaccagcgccgcatgtagggccatcctgggatggggcaccacagggagggagggagaaaagaggtgggtagggttacagatccaggttataactactctggcccatacctttcctggttgtggtttttcatgccctctaccatgtgggccttccccaggagatgatcctgttaagtgttcggcagtaacctactttgttccttcgcctcagcagcaaatcttgctactggctctagatctgcg

SEQ ID NO: 23562 - DNA, 2774 bp, Homo Sapiens
tcctgccgcttggccgcggggcgcctggctcagtggcttctgcgggcttcgaggagcgggatgttgcgggctgggtggctccggggcgcggcggcgctggcgctgctgctggcggcccgagtggtggcggcgttcgagcccatcaccgtgggcctagccatcggggccgcgtcggccatcaccggctacctgtcctacaatgacatctactgccgcttcgccgagtgctgccgcgaggagcggccgctcaacgcttcggctctcaagctggatttggaggagaagctgtttggacagcatctagccacggaagtgattttcaaggcgctgactggcttcaggaacaacaaaaatcccaagaaaccactgaccctttccttacacggctgggctggcacaggcaagaattttgtcagtcaaattgtggctgaaaatcttcacccaaaaggtctgaagagtaactttgtccacctgtttgtatcgactctgcacttccctcatgagcagaagataaaactgtaccaggaccagttacagaagtggatccgcggtaatgtgagtgcatgtgcgaactctgttttcatatttgacgagatggataaattgcaccccgggatcattgacgcaatcaagccgtttctagactactacgagcaggttgacggagtgtcttaccgcaaagccatcttcatctttctcagcaatgcaggcggggaccttataactaagacggctcttgacttttggcgggccggaagaaagagggaagacattcagctgaaggacctggaacctgtactgtctgtcggagtcttcaataataaacacagtggcctgtggcacagtggactgatcgacaaaaacctcattgattactttatccccttcctgcctttggagtacagacatgtgaaaatgtgtgtgagggccgagatgagggcccgtggttctgccatagatgaagacattgtcacaagagtggcagaggaaatgacgtttttccccagagacgagaaaatctactcagacaagggctgcaagactgtgcagtcgcggctggatttccactgagctcctatccagatggggtaggagacagctgggaggctccgcacgccagaggccttgcctttcagaagaaccctgaagaccgctttggggttttgcctgtttgcaccttagacttttgggtatagaatcttttttttgagaagaggtctcactccgtcatccaagctggagtgcagtggtgcaatcctcaactcactgcaacctccgctcccggtttgagtgattctcatgcctcagcctcccgagtagctgggattacaggcatgagccactgtgcccagctgggatatagaatctaagagttgattgtggaaaacacgtgaatctattgcgcgcatttgtcatttagcaagatggcagcagtccagctgttctttgcagctggagatgaacttttaaaaatccccttcacacttaatgtactgaccgagacagaagtacctgaaaacagctgtgcatggcaggcccggcaatagcttctgacccacagcacccgcgcctcagaagctacggtcacaactaaaggagtccagggacttgctgcaggctggggggcactgggtggttctcaccagcaggctgcggggcactgtgttctcattggccaaaaacatccttttgctctgtctcgttctttacacagagttcactgacttgaagtatactcagttaaaatcggggctggaggtgcagacggtgtctgaccggaggatgtggccgtgcccgccgagcactcttgatctgagctgacctgtgtgtgtgtgtgggggggggtggggccttcacctaagacctctgcagcagacctggacagacaggcccctcccgcctgtccatcgctctagctgctaatacagccctggctgtggaatccttcaccgtctcagctggtatcagccccagcctgccttgtgccatatctcagcttggatctctgctagagtccccccaaccatatatcatagagttgaatcacaatgagaccgttggctttgaatttgagtcgttggttcccatggtgagatgcttgttaagactttatacttgggtcaatctctcactttattttgtagaaccatttgaaatcctaggatgtgcttgttctggaaggatgacatgggcccagactgaacaagtcagcttgatgatcttaaatgatggaagtataggacgttgcttattttaaaacaagggaaggacacaaaatggaatgactgcttagtcctttctcagatactcttaaaacaattttttattgttaaatttgtggtaatacatggtcacaaccgtggatcaaacaaggtcagtctaaagtggcaggtcctaggtgtgacctgataccaccaccctttgtggcagcaccgggctggactgccctgatccctgggacgtgagacttagcttccagccagtgtgaatcattgtatctgtctcataatcacagcacagctgcagacacaacaacgtgcagcattttttacataaaaatatggtagaattaatttatgacatggaaatgccttacgtggtatcacacttagtcttgaaaaaaacaccaaggtgacgtttaaaatttttagtacatatcctcaaattggagctaagttatacttcttttataaccttttgggcatctggtcgagagaagacaagattttctctatttacagtgaggcaataaatatgtttgccacctttaaaaa

SEQ ID NO: 23563 - DNA, 3676 bp, Homo Sapiens
ggtccccggctgcccgcagcccgctcgcggcgcttctccggcccggctccttctccgctcgttaacgtcgccaaccccccccacccctcatatctctctccacccacccaaccgccccccgctccttctcgccgcctcgagtccgcttgggggaaaacttcaaagagccggatcgcaggctccctgcctactcccccaccggggatttcagactagacgcttgaagcaaagctgccatcccagaagacgacatgctctcagcaacccccctgtatgggaacgttcacagctggatgaacagcgagagggtccgcatgtgtggggcgagcgaagacaggaaaatccttgtaaatgatggtgacgcttcaaaagccagactggaactgagggaagagaatcccttgaaccacaacgtggtggatgcgagcacggcccataggatcgatggcctggcagcactgagcatggaccgcactggcctgatccgggaagggctgcgggtcccgggaaacatcgtctattctagcttgtgtggactgggctcagagaaaggtcgggaggctgccacaagcactctaggtggccttgggttttcttcggaaagaaatccagagatgcagttcaaaccgaatacacccgagacagtggaggcttctgccgtctctggaaaacccccaaatggcttcagtgctatatacaaaacaccgcctggaatacaaaaaagtgctgtagccacagcagaagcgctgggcttggacaggcctgccagcgacaaacagagccctctcaacatcaatggtgctagttatctgcggctgccctgggtcaatccttacatggagggtgccacgccagccatctaccctttcctcgactcgccaaataagtattcactgaacatgtacaaggccttgctacctcagcagtcctacagcttggcccagccgctgtattctccagtctgcaccaatggggagcgctttctctacctgccgccacctcactacgtcggtccccacatcccatcgtccttggcatcacccatgaggctctcgacaccttcggcctccccagccatcccgcctctcgtccattgcgcagacaaaagcctcccgtggaagatgggcgtcagccctgggaatcctgttgattcccacgcctatcctcacatccagaacagtaagcagcccagggttccctctgccaaggcggtcaccagtggcctgccgggggacacagctctcctgttgcccccctcgcctcggccgtcaccccgagtccaccttcccacccagcctgctgcagacacctactcggagttccacaagcactatgccaggatctccacctctccttcagttgccctgtcaaagccatacatgacagttagcagcgagttccccgcggccaggctctccaatggcaagtatcccaaggctccggaagggggcgaaggtgcccagccagtgcccgggcatgcccggaagacagcggttcaagacagaaaagacggcagctcacctcctctgttggagaagcagaccgttaccaaagacgtcacagataagccactagacttgtcttctaaagtggtggatgtagatgcttccaaagctgaccacatgaaaaagatggctcccacggtcctggttcacagcagggctggaagtggcttagtgctctccggaagtgagattccgaaagaaacactatctcctccaggaaatggttgtgctatctatagatctgaaatcatcagcactgctccctcatcctgggtggtgcccgggccaagtcctaacgaagagaacaatggcaaaagcatgtcgctgaaaaacaaggcattggactgggcgataccacagcagcggagttcatcatgcccgcgcatgggcggcaccgatgctgtcatcactaacgtttcagggtcagtgtcgagtgcgggccgcccagcctccgcatcacccgcccccaatgccaatgcagatggcaccaaaaccagcaggagctctgtagaaaccacaccatccgttattcagcacgtgggccagcccccggccactcctgccaagcacagtagcagcaccagcagcaagggcgccaaagccagcaacccagaaccgagtttcaaagcaaacgagaacggccttccaccaagctctatatttctatctccaaatgaggcattcaggtccccaccaattccctaccccaggagttacctcccttacccagcccctgagggcattgctgtaagtcccctctccttacatggcaaaggacctgtctaccctcacccagttttgttacccaatggcagtctgtttcctgggcaccttgccccaaagcctgggctgccctatgggcttcccaccggccgtccagagtttgtgacctaccaagatgccctggggttgggcatggtgcatcccatgttgataccacacacgcccatagagattactaaagaggagaaaccagagaggagatcccggtcccatgagagagcccgttacgaggacccaaccctccggaatcggttttccgagattttggaaactagcagcaccaagttacatccagatgtccccaccgacaagaacctaaagccgaaccccaactggaatcaagggaagactgttgtcaaaagcgacaagcttgtctacgtagaccttctccgagaagaaccagatgctaaaactgacacaaacgtgtccaaacccagctttgcagcagagagtgttggccagagcgctgagccccccaagccctcagttgagccggccctgcagcagcaccgtgatttcatcgccctgagagaggagttggggcgcatcagtgacttccacgaaacttatactttcaaacaaccagtcttcaccgtaagcaaggacagtgttctggcaggtaccaacaaagagaacctagggttgccagtctcgactccattcctggagccacctctggggagcgatggccctgctgtaacttttggtaaaacccaagaggatcccaaaccattttgtgtgggcagtgccccaccaagtgtggatgtgacccccacctataccaaagatggagctgatgaggctgaatcaaatgatggcaaagttctgaaaccgaagccatctaagctggcaaagagaatcgccaactcagcgggttacgtgggtgaccgattcaaatgtgtcactaccgaactgtatgcagattccagtcagctcagccgggagcaacgggcattgcaggtgagcccccccacctgaatttcagttactttaccagttgtcagttttttaatgtgtaaacaggattgggggagtatggtagggcagggcaccaggcagatttggtgaatgaagcttgtggtaatttgaatatatgcaatgtggccagtaagagaacgtgagtggtagcactgaggcgtgtctggatgctttaagttattctgtagattataagggaactccactcaattgctgataaccgatgttttaattattgtgaagggtatctaaagactgcatgacgtttacctatcaattgctttgatttctctgcctgtaagatagcaaatatacctagaagtgctgcttagaatgccttacttgatacctggtagagatgtgtagcagccgcatgtctgtgggattcatgcaaatttttcaccaaaaaa

SEQ ID NO: 23564 - DNA, 19153 bp, Homo Sapiens
ggctctgattcagttttctttttcttctcttttcctttttttttttttttttaggaatgcagagcagttgctggggtgattgacctaggcacagtggagatatttcccatcttcaaagccatgcaaaagggcctccttgaccaagacacaggcctagtgcttctggaatctcaggttatcatgtctggcctcattgcccctgagacgggtgaaaacctctctttggaggagggcatagccagaaacctcattaatccccagatgtaccagcagctccgggagctacaggatgccctggccttaataagcaggcttactgagagcagaggccctctttctgtggtggaagcaattgaaaagagaataatcagtgagacagttggactgaaaatcttagaagctcacctggcaactggaggtttcagtctttcccctagtgagaactgtattaacctggaagaggcttttcatcaaggcctcatttctgcatggcttcattcagtattagagtcttatcttagaacatccaagaatttgatagaccctaacacagctgagaaaattggtttgctggatctgatgcagcgatgtattgtccaccaggaatcaggattcaaattactgcctgtcaaacaattggcaggggggatggtgagcttgaaatcaggccggaaggttagcattttccgtgcagttcaggaagggctaatagataggcaggtcactgtccggttgctggaagctcagctttttgctggtggcatagtagatccaagaacaggacacagacttacagtggaagaggctgtaagacataatctgattgaccaagatatggcctgtgctatcctcataaggcagcttcagacaggaggcatcatagacactgtcacggggcaaaggctaacaatagatgaagcagtgagcaatgatctagtagctgctaagatcgcccttgtgattctggagtccctctggtcattcatggggttgctgtggcctgaatctggagagatcctcccaattacagatgccctagaacaaggtattgtgtctactgaactagcacataaaatccttagtaaccgacagcatattaaggctctgtttctaccagcaaccacagagattttgtcctggaagaaagcaatagaaagtggtatcctggatagagatcttgccaataacttaaaatcgatttgtatacctgatgtgatgccccacatgcaactagcagactctgcagaacaaaatattaatcctggagcagcagttctaccgtgcagcaagagccaccctaaggccacagcaagccagagtgagaatctgttgttccagctgatgactcacagctatattaatgtgcaaaatggacagaggctgcttctgttagataaagagctgatggagacactaacatccagagatgagtatcaaacaagtcctccaaaagtggttgaaattgggcatcaaaggcaaaaaactcctgagggattgcaagaatcagctaatgtgaaaatctcaggaactttcagcagtgggtggactgtgaggctgcctgagttccagttttcttctcagaacaaagaatatcccgatcgggaagattgcactacagaaaaaggcaaaaagaccactgtagaaacagaagattcttctgtagagaaccctgaacaggatctgtttgtagaacaaaaagagagaaatccaaacattgatgctttgaaggtaataaataaagtcaaattagaggtacaaaggcagttgataggtacccaaagggaagaccaaacagcagtgtctgtcagagaaaatgccagcaggggacacctcctgaccatacctcctgctgaggcggaaggtgtgccgttggtggttgacaaagatgttttttctgttgaaacaccaaagaaagaacatcaacctctaagaaacacttcctttacatgtcagaatgaacaagcacacactcttgagactgaatatattcatgatgaaactggaggatctcacataaaaccccaaagcaaaaagttacaagttcaggtaaagaaaactctaggtataaagttagaactaaagtctgaaactgatgggaatgttcatcctctggacaaaaaggaaatgttaaagaaaacatttctggctaaggatgaccataaagaaagtcaagaagcacagaacatcgcaggtggtagtatgatgatgtcagaaaagaccgatgaggaagatagtggcagggaaatttttctgtcatgcagtcatccattagaattgcttgaagaagctaccttaaatgtattatctgcacagttactagatggtggtatctttcatgaacaaacaggtcaaaagctcttactaaatgaagcaatatcccgaggcattgtgccaagtcacactgccgtgaagcttatggagaagctgaacatgtttcaggggttctttgactctcagacttgtgagtctttgacaactgaagaagtcattaatgaaggtctgatggatgagaaattattacataatgtcctcatggcagacaaagctataagtggtgtcttagacccccgtacccagacactgtgctctgtaaaggatgcagttacagttggacttcttgacaaggaaacagccaccagaattttagagaggcaggtggtgactggtggaattattgatctgaaacgaggcaaaaaagtttcagtaactttggcctcaactcttggcttggtggacgttgctgaccagccagaacttataaatctggagaaagcttccaaaggtagagatgctgaaaaaacagttagggagagattaattagtttacaaatggaaacaacaggacttatagaccctgatagtaaagcacctttaacagttgtgcagtccattgacagaggtcttttggagagagaggaggccgttcgtttgttgactaagcaagtggtagatggaggtatcattcaccatatatctgggatgagactttctgttgataatgccttcagacatggcttaattggtgaagatttagccgagaaactcaaaagagttgagaacttaaacatccatcagatttttaatcctgaaacgaaggaaaatatttccctccctaaagccataaaattagatcttattacctcagacctgaaaagagaaatccaggaggttcaggcctttactggaaactttgtggatctcatttctggtcagagattgaccttggcagaagctaaaaaagaaggactgttaactaatgaagcagtattgtctccaggaatgatgcatggcattgtagatcccgagaactgcagaattgtcccctactcagaattagtcaagaaatgtaagattgatattgaatctggacagagatatctagaagtaattcccttctcagacattaaagatggggtgagcgacaaagtgcttacattgtctcaagcaattcagcttggaaaagtagactttgcatctacgctgaaggttctagaagcccaggcaaatactggtggaatcatagatactgctactggaaaaagactgacattggcatcagctttggaagagaaactggtggatgaaaacatggtcagaattattgcatctcatcaggtgttaaatggaggaattgttgacatatttagtgatcagagagtgactttagtagaagctattgagaaaagactgatcagccctgaactggcaaatatgatccaaatagatagttcagagttcagcgatcacagggctcagattgaaaagcaagaagggattgaagtgtgtgcattacaaaatgaatttctaggaaaggatatgttaattgcttgtaatcagactgctgaaatgagttgtaataaagtagaagagagtgagagattatttcaagttgaaaatcagtctgcacaagaaaaggttaaagtgagagtttctgatggggagcaggcaaaaaagagcagggaaatttccttaaaggaatttgggtgcaaggatcaacgtaagccaagaatgtcttcagatgctaaagaatttatcagtatcataaatcctcataatcttaaaggtaaatccttgggccaagtgtcattgacacacccttactctgaatgtgattttaaacttaaagaagtggctagaaataacatgggaaatgatacaaatgaagagcaggaaaaagcagtgacaaaaatagaaattatttctcatatgaagcagtctacctcatgtctagattctgaagaaataagagaaaatcaaggggaagtgattttggaagtacaagaaacatattgtgaaacgtcaggcaaattgccgagtgagcaggttttgcagcaaccaatgaatgctcgggtgaaaagtaagagagagaagagggaggtgattgtagaagaaagtatcagaacatgcaaaccagcatttctttctgaagaaaagttgtatcaggaaactgccattagagatgagcatgactcccatataaagagccaacctagggaaatgacctcaagtgaaaaagggaaagaagctgatacagaaatgggattttctattacttttaaaattgaagagtcctcttcccaagtggtacctcaaggaatttctgtaaaacatttagatgctttaacactcttcagctctaaacaggccaatgaaggaaaagtaaacaatttaagtctctgcttgactttaaaaccagaagaaaacttatctcgagaaattgcctgtggggcccagagtgaaccattcccttgtatgaccccaagacctgaaggattgcactaccaggaatcagatggaaaagcccaagtgacaggcccatcccaaatttccaaaacagacaagtctttccaaggaaccaccagacaggagaccaactatcaagattcctgggttacttcgaaaactaaggaaaccaaacatcaaatttcctcatctaatgaatgtaaagaaaagtcataccaagaagtatcttttgacccagcaagaggtcttaaattggaagaaatcacagtttctagaccagattcaaaagaagtcaggtatctagaattctcagacagaaaagaccttcatcatcagggcagcaaaagtgatgataaactttgtggaactctcaaatctgaaatagcaacacaggaactaactggagagaaatttctagaaatggcaaaccctaatgttgcaggtctagaagcaggatccattgaggacatagtgactcagagaggttccagagtcttgggatcctttcttccagagaaactgttcaaaggagtgtctcaaaaagagaatacagggcaacagaatgccatcattagtcctactgttctagagaccagtgaagaaaagacagtgtccctaacagtatgctctgcagtgaagacagagaagacaccacaggaaaagctcagagaaagccctggcagtgaacaaactcccttcatgactgcacctgaaggaaagggaaatggaggtgtaaacccagagcccttcagagcaactcagaatgtatttacccggcaactctgtttagaacatgatgaaaagctagtatcctatctgtctctgttacggaacattgaaatgaggaccaaacagattcaacctttggagctaaacctggcagaactacaggatctgctgtgtcaggccaaggtattagaaagggagttaaaggatctgaccaccttggtcagtcaggagctggagtgtgtgaatcagattatcatcagccagcctcaagaagttcctgctcaactgttgaaggctctagagaaagatgccaagaatcttcagaagtctctcagctctgtgagtgacacttggaattccaggctactccacttccagaatgctgtggaaatagaaaagactaaagtgttaaatcagcacacacagctagaaggccgacttcaagatctgagagcctgggttggcaataaaaatcttattctgaacagcaagggatctaacagtgaaatagatgttgacagcctgaacctctgtctccaacagtatgaggatttgaaacagcccatggctgaaaggaaagctcagctggatgctcttgcttttgatattcagttctttatctcagaacatgcccaggacttgtcccctcagcagaatcgacagatgctgaggcttctgaatgaactgcagaggtccttccaggacattttggaacagactgcagctcaggtggatgccttgcagggccatcttcaacaaatggagcaggaagccctggtgaagaccctgcagaaacaacaaaatacctgtcaccagcaactggaggatctttgcagttgggtaggacaggcagaaagagcactggcaggccaccaaggcagaaccacccagcaggatctctctgctttgcagaagaaccaaagtgacttgaaggatttacaggatgacattcagaatcgtgccacctcatttgccactgttgtcaaggacattgaggggttcatggaagagaatcagaccaagctgagcccacgtgagttgacagctcttcgggaaaagcttcatcaggctaaggagcaatatgaggcactccaggaagagacacgtgtggcccagaaggaactggaggaagcagtgacctccgccttacagcaggagactgaaaagagtaaagcagcaaaggaactggcagagaacaagaagaagatcgatgctctcctggattgggtaacttcagtaggatcatctggtggacagctgctgaccaaccttccaggaatggagcagctctcgggagctagcttggagaaaggagccttggacaccactgatggttacatgggggtgaatcaagccccagagaaactggacaagcaatgtgagatgatgaaggcccgtcaccaagaattgctgtcccagcagcaaaatttcattctggccacccagtcagctcaggccttcttggatcagcatggccacaatctcacacctgaggagcaacagatgctgcaacagaagctgggagagctaaaggaacaatactctacttccctggcccaatcagaggcagaactgaagcaggtgcagacacttcaggatgagttgcagaaatttctgcaggatcataaagagtttgaaagctggttggaacgatccgagaaagagctggagaacatgcataagggaggcagcagccccgagacccttccctccctgctaaagcggcaaggaagcttctcagaggatgtcatttcccacaaaggagacttgagatttgtgactatctcaggacagaaagtcttggacatggaaaacagttttaaggaaggcaaagaaccatcagaaattggaaacttagtaaaggacaagttgaaggatgcaacagaaagatacactgctctccactcaaagtgtacacgattaggatctcacctgaatatgctgttaggccagtatcatcaattccaaaacagtgctgacagcctgcaggcctggatgcaggcttgtgaggccaacgtggagaagctcctctcagatactgttgcctctgaccctggagttctccaggagcagcttgcaacaacaaagcagttgcaggaggaattggctgagcaccaagtacctgtggaaaaactccaaaaagtagctcgtgacataatggaaattgaaggggagccagccccagaccacaggcatgttcaagaaactacagattccatactcagccacttccaaagcctctcctatagcctggctgagcgatcttctctgctgcagaaagcaattgcccaatctcagagtgtccaggaaagcctggagagcctgttgcagtctattggggaagttgaacaaaacctggaagggaagcaggtgtcatcactctcatcaggagtcatccaggaagccttagccacaaatatgaaattgaagcaggacattgctcggcaaaagagcagcttggaggccacccgtgagatggtgacccgattcatggagacagcagacagtactacagcagcagtgctgcagggcaaactggcagaggtgagccagcggttcgaacagctctgtctacagcagcaagaaaaggagagctccctaaagaagcttctaccccaggcagagatgtttgaacacctctctggtaagctgcagcagttcatggaaaacaaaagtcggatgctggcctctggaaatcagccagatcaagatattacacatttcttccaacagatccaggagctcaatttggaaatggaagaccaacaggagaacctagatactcttgagcacctggtcactgaactgagctcttgtggctttgcgctggacttgtgccagcatcaggacagggtacagaatctaagaaaagacttcacagagctacagaagacagttaaagagagagagaaagatgcatcatcttgccaggaacagttggatgaattccggaagctggtcaggaccttccagaaatggttgaaagaaactgaagggagtattccacctacggaaacttctatgagtgctaaagagttagaaaagcagattgaacacctgaagagtctactagatgactgggcaagtaagggaactctggtggaagaaatcaattgcaaaggtacttctttagaaaatctcatcatggaaatcacagcacctgattcccaaggcaagacaggttccatactgccctctgtaggaagctctgtaggcagtgtaaacggataccacacctgcaaagatctgacggagatccagtgtgacatgtcagatgtaaacttgaagtatgagaaactagggggagtacttcatgaacgccaggaaagccttcaggctatcctcaacagaatggaggaggttcacaaggaggcaaactctgtgctgcagtggctggaatcaaaagaggaagtcctgaaatccatggatgccatgtcatctccaaccaagacagaaacagtgaaagcccaagctgaatctaacaaggccttcctggctgagttggaacagaattctccaaaaattcaaaaagtaaaggaagccctggctggattactggtgacatatcccaactcacaggaagcagaaaattggaagaaaattcaggaagaactcaattcccgatgggaaagggccactgaggttactgtggctcggcaaaggcagctagaggaatctgcaagtcatctggcctgcttccaggctgcagaatcccagctccggccgtggctgatggagaaagaactgatgatgggagtgctggggcccctgtctattgaccccaacatgttgaatgcacaaaagcaacaggtccagtttatgctaaaggaatttgaagcacgcaggcaacagcatgagcaactgaatgaggcagctcagggcatcctaacaggccctggagatgtctctctgtccaccagccaagtacagaaagaactccagagcatcaatcagaaatgggttgagctgactgacaaactcaactcccgttccagccaaattgaccaagctattgttaagagcacccagtaccaggaactgctccaggacttatcagagaaggtgagggcagttggacaacggctgagtgtccagtcagctatcagcacccaaccagaggctgtaaagcagcaattggaagagaccagtgaaattcgatctgacttggagcagttagaccacgaggttaaggaggctcagacactgtgcgatgaactctcagtgctcattggtgagcagtacctcaaggatgaactgaagaagcgtttggagacagttgccctgcctctccaaggtttagaagaccttgcagccgatcgcattaacagactccaggcagctcttgccagcacccagcagttccagcaaatgtttgatgagttgaggacctggttggatgataaacaaagccagcaagcaaaaaactgcccaatttctgcaaaattggagcggctacagtctcagctacaggagaatgaagagtttcagaaaagtcttaatcaacacagtggctcctatgaggtgattgtggctgaaggggaatctctacttctttctgtacctcctggagaagagaaaaggactctacaaaaccagttggttgagctcaaaaaccattgggaagagcttagtaaaaaaactgcagacagacaatccaggctcaaggattgtatgcagaaagctcagaaatatcagtggcatgtggaagaccttgtgccatggatagaagattgtaaagctaagatgtctgagttgcgagtcactctggatccagtgcagctagagtccagtctcctaagatcaaaggctatgctgaatgaggtggagaagcgccgctccctgctggaaatattgaatagtgctgctgacattctgatcaattcttcagaagcagatgaggatggaatccgggatgagaaggctgggatcaaccagaacatggatgctgttacagaagagctgcaggccaaaacagggtcactcgaagaaatgactcagaggctcagggagttccaggaaagctttaagaatattgaaaagaaggttgaaggagccaaacaccaacttgagatctttgatgctctgggttctcaagcctgtagcaacaagaacctggagaagctaagagctcaacaggaagtgctgcaggccctagagcctcaggtagactatctgaggaactttactcagggtctggtagaagatgccccagatggatctgatgcttctcaacttctccaccaagctgaggtcgcccagcaagagttcctcgaagttaagcaaagagtgaacagtggttgtgtgatgatggaaaacaagctggaggggattggccagtttcactgccgggtccgagagatgttctctcaattggcagacctggatgatgagctagatggcatgggtgctattggcagagacactgatagcctccagtcccaaatcgaggatgtccggctattccttaacaaaattcacgtcctcaaattagacatagaggcctctgaagcagagtgtcgacatatgctagaagaagaggggactctggatttgttaggtctcaaaagggagctagaagccctgaacaaacagtgtggcaaactgacagagagggggaaagctcgtcaggaacagctggaactgacactaggccgtgtagaggacttctacaggaaattgaaaggactcaatgacgcgaccacagcagcagaggaggcagaggccctccagtgggtagtggggaccgaagtggaaatcatcaaccaacaattagcagattttaaaatgtttcagaaagaacaagtggatcctcttcagatgaaattgcagcaggtgaatggacttggccagggattaattcagagtgcaggaaaagactgtgatgtacagggtttagaacatgacatggaagagatcaatgctcgatggaatacattgaataaaaaggtcgcacaaagaattgcacagctacaggaagctttgttgcattgtgggaagtttcaagatgccttggagccattgctcagctggttggcagataccgaggagctcatagccaatcagaaacctccatctgctgagtataaagtggtgaaagcacagatccaagaacagaagttgctccagcggctcctagatgatcgaaaggccacagtagacatgcttcaagcagaaggaggcagaatagcccagtcagcagagctggctgatagagagaaaatcactggacagctggagagtcttgaaagtagatggactgaactactcagtaaggcagcagccaggcaaaaacagctggaagacatcctggttctggccaaacagttccatgagacagctgagcctatttctgacttcttatctgtcacagagaaaaagcttgctaactcagaacctgttggcactcagactgccaaaatacagcagcagatcattcggcacaaggctctggaagaagacatagaaaaccatgcaacagatgtgcaccaggcagtcaaaattgggcagtccctctcctccctgacatctcctgcagaacagggtgtgctgtcagaaaagatagactcattgcaggcccgatacagtgaaattcaagaccgctgttgtcggaaggcagccctacttgaccaagctctgtctaatgctaggctgtttggggaggatgaggtggaggtgctcaactggctggctgaggttgaggacaagctcagttcagtgttcgtaaaggatttcaaacaggatgtcctgcacaggcagcatgctgaccacctggctttaaatgaagaaattgttaatagaaagaagaatgtagatcaagctattaaaaatggtcaggctcttctaaaacaaaccacaggtgaggaggtgttacttatccaggaaaaactagatggtataaagactcgttacgcagacatcacagttactagctccaaggccctcagaactttagagcaagcccggcagctggccaccaagttccagtctacttatgaggaactgaccgggtggctgagggaggtggaggaggagctggcaaccagtggaggacagtctcccacaggggaacagataccccagtttcagcagagacagaaggaattaaagaaggaggtcatggagcacaggctggtgttggacacagtgaatgaggtgagccgtgctctcttagagctggtgccctggagagccagagaagggctggataaacttgtgtccgatgctaacgagcagtacaaactagtcagtgacactattggacaaagggtggatgaaattgatgctgctattcagagatcacaacagtatgagcaagctgccgatgcagaactagcttgggttgctgaaacaaaacggaaactgatggctctgggtccaattcgcctggaacaggaccagaccacagctcagcttcaggtacagaaggctttctccattgacattattcgacacaaagattcaatggatgaactcttcagtcaccgtagtgaaatctttggcacatgtggggaggagcaaaaaactgtattacaggaaaagacagagtctctaatacagcaatatgaagccattagcctactcaattcagagcgttatgcccgcctagagcgggcccaggtcttagtaaaccagttttgggaaacttatgaagagctcagcccctggattgaggaaactcgggcactaatagcacagttaccctctccagccattgatcatgagcagctcaggcagcaacaagaggaaatgaggcaattaagggaatctattgctgaacacaaacctcatattgacaaactactaaagataggcccacaactaaaggaattaaaccctgaggaaggggaaatggtggaagaaaaataccagaaagcagaaaacatgtatgcccaaataaaggaggaggtgcgccagcgagccctggctctggatgaagccgtgtcccagtccacacagattacagagtttcatgataaaattgagcctatgttggagacactggagaatctttcctctcgcctgcgtatgccaccactgatccctgctgaagtagacaagatcagagagtgcatcagtgacaataagagtgccaccgtggagctagaaaaactgcagccatcctttgaggccttgaagcgccgtggagaggagcttattggacgatctcagggagcagacaaggatctggctgcaaaagaaatccaggataaattggatcaaatggtattcttctgggaggacatcaaagctcgggctgaagaacgagaaatcaaatttcttgatgtccttgaattagcagagaagttctggtatgacatggcagctctcctgaccaccatcaaagacacccaggatattgtccatgacttggaaagcccaggcattgatccttccatcatcaaacaacaggttgaagctgctgagactattaaggaagagacagatggtctgcatgaagagctggagtttattcggatccttggagcagatttgatttttgcctgtggagaaactgagaagcctgaagtgaggaagagcattgatgagatgaataatgcttgggagaacttaaacaaaacatggaaagagaggctagaaaaacttgaggatgctatgcaagctgctgtgcagtatcaggacactcttcaggctatgtttgactggctagataacactgtgattaaactctgcaccatgccccctgttggcactgacctcaatactgttaaagatcagttaaatgaaatgaaggagttcaaagtagaagtttaccaacagcaaattgagatggagaagcttaatcaccagggtgaactgatgttaaagaaagctactgatgagacggacagagacattatacgagaaccactgacagaactcaaacacctctgggagaacctgggtgagaaaattgcccaccgacagcacaaactagaaggggctctgttggcccttggtcagttccagcatgccttagaggaactaatgagttggctgactcataccgaagagttgttagatgctcagagaccaataagtggagacccaaaagtcattgaagttgagctcgcaaagcaccatgtcctaaaaaatgatgttttggctcatcaagccacagtggaaacagtcaacaaagctggcaatgagcttcttgaatccagtgctggagatgatgccagcagcttaaggagccgtttggaagccatgaaccaatgctgggagtcagtgttacagaaaacagaggagagggagcagcagcttcagtcaactctgcagcaggcccagggcttccacagtgaaattgaagatttcctcttggaacttactagaatggagagccagctttctgcatctaagcccacaggaggacttcctgaaactgctagggaacagcttgatacacatatggaactctattcccagctgaaagccaaggaagagacttataatcaactacttgacaagggcagactcatgcttctaagccgtgacgactctgggtctggctccaagacagaacagagtgtagcacttttggagcagaagtggcatgtggtcagcagtaagatggaagaaagaaagtcaaagctggaagaggccctcaacttggcaacagaattccagaattccctacaagaatttatcaactggctcactctagcagagcagagtttaaacatcgcttctccaccaagcctgattctaaatactgtcctttcccagatagaagagcacaaggtttttgctaatgaagtaaatgctcatcgagaccagatcattgagctggatcaaactgggaatcaattaaagttccttagccaaaagcaggatgttgttctgatcaagaatttgttggtgagcgtgcagtctcgatgggagaaggttgtccagcgatctattgaaagagggcgatcactagatgatgccaggaagcgggcaaaacaattccatgaagcttggaaaaaactgattgactggctagaagatgcagagagtcacctggactcagaactagagatatccaatgacccagacaaaattaaacttcagctttctaagcataaggagtttcagaagactcttggtggcaagcagcctgtgtatgataccacaattagaactggcagagcactgaaagaaaagactttgcttcccgaagatactcagaaacttgacaatttcctaggagaagtcagagacaaatgggatactgtttgtggcaagtctgtggagcggcagcacaagttggaggaagccctgctcttttcgggtcagttcatggatgctttgcaggcattggttgactggttatacaaggtggagccacagctggctgaggaccagcccgtgcacggggaccttgacctcgtcatgaacctcatggatgcacacaaggttttccagaaggaactgggaaagcgaacaggaaccgttcaggtcctgaagcggtcaggccgagagctgattgagaatagtcgagatgacaccacttgggtaaaaggacagctccaggaactgagcactcgctgggacactgtctgtaaactctctgtttccaaacaaagccggcttgagcaggccttaaaacaagcggaagtgtttcgagacacagtccacatgctgttggagtggctttctgaagcagagcaaacgcttcgctttcggggagcacttcctgatgacacagaggccctgcagtctctcattgacacccataaggaattcatgaagaaagtagaagaaaagcgagtggacgttaactcagcagtagccatgggagaagtcatcctggctgtctgccaccccgattgcatcacaaccatcaaacactggatcaccatcatccgagctcgcttcgaggaggtcctgacatgggctaagcagcaccagcagcgtcttgaaacggccttgtcagaactggtggctaatgctgagctcctggaagaacttctggcatggatccagtgggctgagaccaccctcattcagcgggatcaggagccaatcccgcagaacattgaccgagttaaagcccttatcgctgagcatcagacatttatggaggagatgactcgcaaacagcctgacgtggaccgggtcaccaagacatacaaaaggaaaaacatagagcctactcacgcgcctttcatagagaaatcccgcagcggaggcaggaaatccctaagtcagccaacccctcctcccatgccaatcctttcacagtctgaagcaaaaaacccacggatcaaccagctttctgcccgctggcagcaggtgtggctgttagcactggagcggcaaaggaaactgaatgatgccttggatcggctggaggagttgaaagaatttgccaactttgactttgatgtctggaggaaaaagtatatgcgttggatgaatcacaaaaagtctcgagtgatggatttcttccggcgcattgataaggaccaggatgggaagataacacgtcaggagtttatcgatggcattttagcatccaagttccccaccaccaagttagagatgactgctgtggctgacattttcgaccgagatggggatggttacattgattattatgaatttgtggctgctcttcatcccaacaaggatgcgtatcgaccaacaaccgatgcagataaaatcgaagatgaggttacaagacaagtggctcagtgcaaatgtgcaaaaaggtttcaggtggagcagatcggagagaataaataccggttcttcctcggcaatcagtttggggattctcagcagttgcggctggtccgtattctgcgcagcaccgtgatggttcgcgttggtggaggatggatggccttggatgaatttttagtgaaaaatgatccctgccgagcacgaggtagaactaacattgaacttagagagaaattcatcctaccagagggagcatcccagggaatgacccccttccgctcacggggtcgaaggtccaaaccatcttcccgggcagcttcccctactcgttccagctccagtgctagtcagagtaaccacagctgtacatccatgccatcttctccagccaccccagccagtggaaccaaggttatcccatcatcaggtagcaagttgaaacgaccaacaccaacttttcattctagtcggacatcccttgctggtgataccagcaatagttcttccccggcctccacaggtgccaaaactaatcgggcagaccctaaaaagtctgccagtcgccctgggagtcgggctgggagtcgagccgggagtcgagccagcagccggcgaggaagtgacgcttctgactttgacctcttagagacgcagtctgcttgttccgacacttcagaaagcagcgctgcagggggccaaggcaactccaggagagggctaaacaaaccttccaaaatcccaaccatgtctaagaagaccaccactgcctcccccaggactccaggtcccaagcgataacactgtctaagcacccccaagccactatccactttgaatcctgctccatacattgggtgtatatttattctgaacgggagaagttatattgttaaaagtgtaaaagaataattgtgttatgaagctgccttattttttttctttttgtaagttactattttcatgtgaatatttatgtagataaaatttgcctcctggtaaccctgtaatggatggggcccagaaatgaaatatttgagaaaaacaagtgaaaaggtcaagatacaaatgtgtattaaaaaaaaaaaagcctattaatagggtttctgcgcggtgcagggttgtaaacctgctttatcttttaggattattcctaaatgcatcttctttataaacttgacttgctatctcagcaagataaattatattaaaaaaaataagaatcctgcagtgtttaaggaactctttttttgtaaatcacggacacctcaattagcaagaactgaggggagggctttttccattgtttaatgttttgtgatttttagctaaagagagggaacctcatctaagtaacatttgcacatgatacagcaaaaggagttcattgcaatactgtctttggatattgtttcagtactgggtgtttaaaggacaaatagctgctagaattcaggggtaaatgtaagtgttcagaaaactcagaacatttggggttttaaactgatttgttgctccctatccagcctagaacaccagtaaattcttgtgttcaaccagggacccagacccttggcaagggataggttcgttggtgacattgtgaatttcagatttgttttatccaatttttttgctatttatttaaatggtcgatcaacttcccacaaactgaggaatgaattccacgagcctgttctgaaaatgtggacgtaagacaaacacgtgctcgtcctttaatggagttcaccagcacacttgttaaccagtcctgtttgctttcgtctttttttgtgcgtaataaagtcaactgaccaagtgaccatgaaaaggggctgtctggggctcctgttttttagctgctgttcttcagctccgaccatgttgctgtgtgattatctcaattggttttaattgaggcagaaactgaagctctaccaatgaactgtttagaaacaagacacacttttgtattaaaattgcttgcagtaacaaataaaaaaaaaaaaaaaaaaaa

SEQ ID NO: 23565 - DNA, 1404 bp, Homo Sapiens
gccggattgcagcacctgggattggagtttggaatcctgccttcgatgtcaccccccacgacctcatcactggtggcatcatcacagaactgggggtctttgcccctgaggagctccggacagccctaaccaccaccatctcttccagggatggaaccctagatggaccccagatgtaaccaactcagctctccctagcctgcctctctaggtttttcaatacatttcttgaatggctacccaaaagctgaccgtccagcccctgaccacacttgttcctagtgcagggagctcagacagggccttccatctagagcccagcacctagagccaggctgcccagattcaaatcctgactccgccacttttcccaaagtgctgggactacaggcatgagccactgtgcctgaccttacagcagtattttttaaaaatcaaaattaatgcaaaaatccatgatgaggccaggcttggtggctcatgcctgtgattccagcactttgggaggatcccttgagcccaggtgtttgagaccagtttgggtaacataggaagagcttgtctctacaaacaaaaatttaaaaacaatgagctgggcatggaactcacacctctagccccagctactcgggctgaggtgggaggatggcttgagcccaggagttcaaggatgcagtgtgctttgattgcactactgcgcttcaccctgggcaacagagtgagaccccatctctttaaaaaaaaaaaaaaatccatgatgaacaaaacaagtatttgtttgagacggggtctcgctctgtcgcccaggctggagtgcagtggtgccatctcagctcactgcaacctccgccttctgggttcaagcgactctcctgcctcagcctcccgagtagctgggattgcaggagcctggcactatgcctggctaatttttgtatttttattggagacaccatgttggtcgtggctggtctccaactcctgacctcgggtgatccgcgccccgcggcctccgaaagtgctgggattacaggcgtgagccaccgtgcccggcctaaataaaattttgaagaggctagaaccccgcacttgtgccttgagcttactgacctcaacaccctggttccactaaaactttatttacaaaattatgctgccggtctgcaggatgtagtttaacaatttgattattttggatattaaaatattttttaagtcttgaaaatattgtttactattaccaaagtttttgaaccttcttaaattctgtaccagaggtgagtgccacaccctaacctagtctgagtttttatgtgtaaagatcataaaacgttgtaagttttctaaaacacataagctctcaataaacgttagcttatcattgaaaaaaaaaaaaaaaaaaaa

SEQ ID NO: 23566 - DNA, 1941 bp, Homo Sapiens
gtttcttctggtcaatccatctagtgttaatggttctgaaacatggattttattgtgtcgtatttctgcctgagtagtcaagcattcttctttgcctacagaataaattctgcattttttttgactcattttcagactctttcaccatctagtcagaggctgtaaactagtggcctgtgggccagtataatcctacatccccttttccccccatcattttcctttatcttctagtagaaatcttctcgttccagttaagttgttcctctttattttcccgataggaaatactgtattctcctcttgaagcatgtgctctggctctttccctctattatttgtcttctgtgtaaattatcttcacttgtcctagaaacctcctcatacacactgatatttaataaagatagccctcttttgtgaatttgcttgaaaatggaagcattagaagtaggtaaagttatgagccaaggaaataagttattcattgaacaaatattgagctgtaatataatattatatcatattatgtaacaaaatattgagtacctattatgtggtggactgtgttatctgattggggctgttacaatgatcaagaaagactatgttcctccctcattgagcttatatcccattgcaatcaatatgcaaaaataagtaggttgacagcctgccttcagagtgcttttataaacatcttacttgatctgaacagcaatcctgaagtacttgagaaaacagaagttcagctggtctcgaactcctggcctctagtgatctgcttgcctcaggctcccatagtgctgggactacaggtgtgagccaccacgcccggcctggcttcattgatttttccaattgtagtaataatcatgctcattgcttataattcaaccagtactagaaagttcaaacaaccctcatagtaatatagatttgtaaattccaaaattcgtattttattatgtctttctttgccaccttctcttttctccacttggtatatcaagaacatcatttttaaaggctaaatagacactgtatggctattccatagctgaatcaaccaaacctctgttgagaggctcttaaaatgtttcttcttgtataaaaaacaacattgttaaactttattctccatttatctttttataattatttcactcttaattccttagaaatagaattccttagtcaaattatcaggtttattcagtagtcatggtttgtgcaaaacctggtcttctgggagggataagtaagaaaaatggaccatttttctaatgaagcttaagagtttatttggggaaataacattcacttttggaatttcaaaagaaaagttaaaaattcttgacgatttaactttgttacctttgttagtaaaacaatataaaatgctgtggagctataagttaccaggatcaggtatagttatttggtccacatttcatgcagtaatggattcagaatggagaagacaaaatgcagaactgaacttaattacaaataagcattttttaaaaaatctacaatctaagcatttagatgtaaaaatattaaaaaccaagaataagcttgtggaaggaatttaattatgaagtaaactacttgtctttttttgagatggagtttcgctcttgttgcccaggctggagtgcaatggtgtgatcttggctcaccgcaacctctgccccccaggttcaagctattctgcctcggcctcccgagtagttgggattgcaggcatgcaccaccacgcccggctaattttgtatttttttagtagagacgaggtttctccatgttggtcaggctgttctcaaactcccaacctcaggtgatctgcccgcctcggcctcacaaagtgctggaattataggcgtgagcaactgcacccagcaactacttgttaaattaaaaaaaaaaaaaaaaaaa

SEQ ID NO: 23567 - DNA, 3094 bp, Homo Sapiens
gagacacgcggggcttcaggctgctgccccattggaagattactccccaggcttcccttgccccaagcagtgagctgactggaatggtaccccgggaggcccctgagtctgctcagtgcctgtgcccttccctcaccatcccaaatgccaaggatgtgcttcggaagaggcacaagagaaggagccgacagcaccagcggttcatggcccggaagccttgctgcaggagcaggggctgctgagcatgcctccagagccagggtcctccccactgcccacccctttcggggcagcgacacgaactgaagctgccagcagtgggaagcagtgtctgagggctggatctggcagtgccccatgcagcagaaggcctgctcccgggaaagcctcagggcccttgcccagcaagtgtgtggctatcgactgtgagatggtgggcacgggaccccgaggcgggtaagcgagctggcccgctgttccattgtgagctaccatggcgatgtcctctatgacaagtacatcaggcctgagatgcccatcgctgactaccgtacccgctggagtggcatcactcggcagcacatgcgcaaggctgtccccttccaggtggcccagaaagagatccttaagctcctgaagggcaaggtggtggtggggcacgcgctgcacaacgacttccaggcgctcaagtatgtccaccctcggagccagacccgggataccacctatgtcccaaacttcctcagcgagcccggcctccacacccgggcccgggtctctctaaaggacctggccctgcagctgctgcacaagaagatccaggtgggccagcacgggcactcatcagtagaagatgccacgacagccatggagctctaccggctggtggaggtgcagtgggaacagcaggaggcccgcagcctctggacctgccccgaggacagagaacctgacagcagcacagacatggaacagtacatggaggaccagtactggcccgatgacctggcccacggcagcagaggaggagccagggaggcacaggacagaaggaattgagaagggggcggggctccctggctgggcttccggtgtggccggtaggaagtgggggccaggagagcagcgggcactccttcctgggcagggtggggcaggatgcagtgagccagccccagggccagaggagttggggtcatctgttaccttgacaccctctgcacacagcatagccctctctctctccagggctgttggttctttctcctgactcctgtggttttgctaatggcactttacagactccatggagatgtcaggtggaccatcttctagggcccagcaggagtagggaatgtgccaacagactgcccaggttgccgtggccttccccaccccccagatctcctgagtcatcatgctgtgctaatgaaagggatcatatcatcctctctggggatggtgggtggggggtgtcaatatcctggagctcccttaccccaactcaatgacttgggggtaaagttctcttccttttgttgcctacctcttcctccactcatttgggttcagaataaacatgccctgaagttaaagaggagttaagtcctaaaggaggcatttcttccccacctccctgacctggaactctggctacagccattgtaggaactccgtgcctggcctgtcagctccctgctaggctacagtggaatagcagagcccacaggcttctcgtggggagttggctccttaacatttcttggcaacagaaagccccaggcacagctcagggaggagggaaggcaggtaagctttggacgagaactggcatatttattttgacccaaatcaagggatttccccagtccacccagtactgggctcttaagcaaaagtctgagaaacaagacagtggtttgaattctggggcctttgtgtaggattgtgcctgacctttatttatttattaacagcagggccactcgtctagggcagtggagtctgcgtgtctcctggggctggggcagggcattggcagttacgcagtggccctgaacctggtctggtgcccccgaacctggtctgatgccccctcagctctttgacaatcactgtggctgttgggttttctcctatttctaaaaatgttctcttctttcctaagtgacagttttgaagtattggataaccaagagctcaggtcacacagaccttggagccccatctttgcttgcagcttagctttgagatactaagcaagcgagggacttcactcttgagcctgttttttcctcatctgtaaagtggggatagtggtacggcctacctcatagggttgtaatgagcactaaatgtgaagtgcttggcacagtgcctggcacatggtgagccacagctactgtgagtttctgtttatcccccttttttttttttaagcccattgtttattctttgagaatttgttgtaacttcttcaggataacacctgagtccacaggctgagcagctgtggcccagacagaactgctccggcttggctgttccagcaggtggggcgctggcctcggtgagggcacagcagcaaggttcacggatatccgtgtgtcttgtctgtggccaccaggcacaggtttggcttccggtcagtgtcccgacactgtgcgggaggtgacaacagagcaaagcagcgcaggggtcagggaggtggagacactgctgaaatcacactaccccaccctcagctgaagccccacgttccacaaacttggggtcatagattgtccagtcactggctccctccctgtcagcacagcacagaggaaggggctaactgaatcttttaccacttctggcctggctccagaactttgttctagattccttaaaagtcggtagctgatgtcaaactcaattgagcagtagctttgatcccttggtctgggggtcgaaggaagatggcgctgttatcagcggggaaatgtactatttaagatcagctttgttgtaaaaccatttgttctagaataaaactcaattggaaacgtgaaaaaaaaaaaaaaaaaaaaaaaaaaaaaaactcgagactagttct

SEQ ID NO: 23568 - DNA, 2323 bp, Homo Sapiens
ggccggattcccagtggtggcgaggaggtggtatttttttaagtgtcagtgtggcattgtggttgcctcaataaaacagagtctttttttgtcttttttttttgagacagggtctcgctctcacccaggctggagtgcagtgacacagttgcagctcactgcagcctcgacctcctgggctcaagcaatcctcccgcctcagcctcccgagtagctgagtctacagatctccacaatggaagttcgaagcaagcaaaagccacgcaaaccacaggccgatctgtctgagccctaggatttggcccggttctgcttcagccaccagcaccgtctgctcctcctcagaatccttcctcccccgtggcccgcccgccgtgtccctcctcctccacgggccgcccaccgtgtccttccctcccccgtggcccacccaccatgtccttccctcccctgtggcccacccgccatgtccctgcctcccacccgacatgccccttgaagctgcctgggccctgctgttgtccccactgcctgtgtgactctgcgcccccttccctaccctgccccaccctggttcagggagcgtccaggcccattctcatcctcagggccttccctggcccttgccactctgtgccgtgtcatgacctgaagctgcaggtgggcgcctcccccttccgtcatggctgtcccccttctgtgaggtgtcccagccgcctgattgccggagtcccagggtgctcggtgctgtcgtggagcctgggacattcactgtctgggattgattccagggttggagccacacctggtctggggcattcgctgtcctgggtcagagcccctcctggtctgggacattcgctgtctggggttggagccacacctggtctggggcatttgctgtccggggtcggagcctcacctggtgaagatacagaacatgctgctgccctaaccccgtgtggtgtgccccctgtccccgggtgtcgttcccatagccagcccttgtctcatctcgtctcatcctctagatgctgtgggccctgagggaaaggatcacagaggcgctgagccgggatggctacgtgtacaagtacgacctctccctccctgtggagcggctctacgacatcgtgactgacctgcgcgcccgcctcggcccgcacgccaagcacgtggtgggctatggccaccttggagatggtaacctgcacctcaatgtgacggcggaggccttcagcccctcgctcctggctgccctggagccccacgtgtacgagtggacggccgggcagcagggcagcgtcagcgcggagcacggagtgggcttcaggaagagggacgtcctgggctacagcaagccaccgggggccctgcagctcatgcagcagctcaaggccctgctggaccccaagggcatcctcaacccctacaagacgctgcccagccaggcctgacggccactcctgctgctgccaaggcccactgggggtcggcgggtggctctcgggcgggggtgttgcggtggctctgagggatgagccggcagtgggcaggggaccaggcacctggttgaagggactgggagcccgcactggggaactgccggacgcaggccctcgggcaggagcatctggcagagtggggggcgtggcaggcaccctcctttgcagggcgaggtggggcctctgcagccatcctggacaggccggggtggcggcagctttgcccacgtggaagcggggtgggtctcacttgcgtggtggcccctggccccatcttgcctgctgcggcctggggagcaggcgctgggtggtggttctgcctgcttgctgctcgttccccgggcatgcgtgggcagcggggggcatgcgtgggcagcagggggcgtgggcagcgggggcatgggcaggaccacgtgggccgtgatcgtgggttgccgagaggacctgagcgctgcggctctgctgaatggagccgggtccctcaggccgtggacgccctcgggaggggggtgactgtggcttgtgtctggacaggaatgtgtcatttcccacatcttctagagggctgccagctgggaagacagttatcagggcaagctgtgctctgagtttcgggttctgctcctacaaagaacgtgcggtgctgcgggcgagggccccggcacggacaagggccactgcagagtgtgtttctgctcgtcagctgccctgggcagcggatgggctgggcgatgcagctggatgcacatctcattctgtcatgaatgtccagtaaaaatctgaattggttgcaaaaaaaaaaaaaaaaaaaaaaaaaa

SEQ ID NO: 23569 - DNA, 2140 bp, Homo Sapiens
gcggagccgggctcaccaggtcgctgctgcgagggagttgctgtgctggggcctgggtggcggctggaggcctgagttgggctcgcggcgggggtcggcagggggccgggtggcggaatgatggaggaggaggaactggagttcgtggaggagctggaagccgtgctgcagctcacgcccgaggtgcagctggccatcgagcaggtgtttccaagccaggaccctctagatcgagcagatttcaatgctgttgagtatatcaataccctgttcccaaccgagcaatctctggcgaacatagacgaagtcgtgaacaaaattaggctgaaaataaggagactggatgacaatattcgaactgttgtaagaggtcagacgaacgtggggcaggatggacggcaagcgcttgaagaggctcagaaagctatccaacaactctttggcaaaatcaaagatatcaaagacaaagctgaaaaatcagagcaaatggtgaaagaaatcacccgtgatattaagcaattagatcacgccaaacgccacctgaccacctcaatcaccacactgaaccacctgcacatgctggcaggaggtgtcgactccctcgaagccatgaccaggcgaagacaatacggagaagttgctaatctccttcagggtgtgatgaatgtcctggagcacttccacaagtatatggggattccgcagatccggcagctttccgaaagagtgaaggctgcacagactgagttaggacagcaaatcctggcagattttgaagaagcgtttccttcccagggcaccaagagaccaggaggacccagcaatgttctacgagatgcatgtctggttgctaatattctagatcccaggatcaaacaggaaatcatcaaaaagtttattaaacagcatctgtcagagtatctggtactttttcaagaaaaccaagatgttgcctggctggacaaaatcgacagacgctatgcctggataaaacgccagcttgtggactatgaggagaaatacggccgcatgtttccacgtgagtggtgcatggctgagaggattgcggtggaattttgccatgtgacaagggcagaacttgccaagattatgcgtaccagagcgaaggaaattgaagtgaaattgcttctttttgctattcaaagaacaactaactttgaggggtttcttgcaaaacgcttctccggctgcaccctgaccgatgggaccctgaaaaagcttgagtctccacccccatctaccaatcccttcctggaagatgagccaacaccagagatggaggaactggcaacggagaaaggagatttagatcaaccaaagaagcctaaagccccagacaatccatttcatggcattgtttccaagtgttttgagcctcatctctacgtgtatatcgaatcccaagacaagaacctcggagagctgatagatcggtttgtggctgatttcaaagcccaggggccacctaagcccaacactgatgaagggggtgccgtgctccccagctgcgccgacctctttgtctactacaagaagtgcatggtgcaatgctctcagctcagtactggggagcccatgatcgccctgaccaccattttccagaagtacctccgagaatatgcctggaaaatcctctctggcaacctgcccaaaaccacaaccagcagtggaggactgactatcagcagcctcctcaaggaaaaggagggctcagaagtagccaagttcactctggaggagctctgcctcatctgtaacatcctgagcacggcagagtacttgtctggccaccacccagcagctagaagaaaaactcaaagaaaaagtggatgtaagtctgattgaacgaatcaatctgactggagagatggacacgttcagcaccgtcatctccagcagtattcagctgctggttcaggatctggatgctgcctgtgatcctgccctgactgccatgagcaagatgcagtggcagaacgtggagcacgttggtgaccagagcccctacgtcacctctgtcattctgcacatcaagcagaacgtccccatcatccgtgacaacctggccaacatggcaaaatcccatctctactaaaaatacaaaaaaaaaaaaaaaaaa

SEQ ID NO: 23570 - DNA, 3722 bp, Homo Sapiens
ggaactagtctcgagttttttttttttttttttgcaattttaagctcatcagctatcactagtgttagcatattttatagtgtggcccaagacaattattttcctaatgtggtccagggaagccaaaagattggacaccctgatatacttaattaccagggtaatattcctaacaccatcacttttacttgacaattctcctgctctaaaagttatgaacctgacattcttggtcttacacaatctggacccagtctactcttctataaccatcttccacttaatttacaaatctttattaaggcacaggtactcctacttatcccctattgcctctctcatgctgaatcaatcatgccaaaagctaagaaaacatgagcatgcttgggactaaagaaacagaactgaggatttcctacacatcctaactgcaaggacagtccatcaaaagccagagataagtatttttatttgctctttatttcttaaaataatttccccaattttgttaacccctacctcaaatgactttagaggtattttaaaggatatgtaatatagttactaagcatttccactgattgtagctgaaggattttctaatgtctattacatgaaacttctccttaaactctcttttaacgaaactgtcattttcctctccagaacggtcttgtcttttctttctcctatatatcgcatataaaatcagcggccaaatcttctagatcaaacatattcatttcatccattccttcaattatccagtcattcaatcaacattattatgtgtaaagtatgacccacttgcattcctagacatggaagatccaaaattaatgtgaataataatctagtgaaaagataagcatggacaaaagtaattattagacaaaattgatgctataataaatgaacattggaagggctatggttaagtgattaagcttgacttggatctctaaaggtgaatggttctttaccaggctaagaagaaaaggaaacattctaggaaaagagaacagcaagcatgaaaaccataaaagggctgccgcagaagttcctcttcctcctcttcctctcgggcctggtcaccctgtgcttcggggccctcttcctgctgccccactcctctcgcctcaagcgcctcttcctggccccccggacccagcagcctggtctggaagtggtggctgaaatcgccggccatgccccggcccgcgagcaggagccgcctcccaacccggcccccgccgcgccggccccgggcgaggatgaccccagcagctgggccagtccccgccgcaggaaaggggggctgcggcgcacccgccccactggaccccgcgaggaggccacggcggcccggggcaatagcatcccggcctccaggcccggggacgagggcgtccctttccgctttgacttcaacgcattccggagccgtctccgccacccggtcctgggaacgagggccgatgagagtcaggagccccagagccaagtgcgagcccagcgggtagaaaatcaaggagacacagcggtcctggggttgccttccagatgaagatctatcaaagatttgaagtcttgtgtatgtggtcctagaggaccccaggctgttataccgatccatgaggcatctgaccccttccaaaggatgatgcagtttgcttggcagagctataagcgttatgcaatggggaaaaacgaactccgtccactaacaaaagatggctacgagggtaacatgttcggaggcctcagcggggcaacagtcattgactccctcgataccctctacctcatggagctgaaggaggagttccaggaggccaaggcctgggtgggagagagcttccacctgaacgtgagcggagaagcatccttgtttgaggtgaacatccgctacatcgggggactcctctcagccttctacctgacaggagaagaggtgttccgaataaaggccatcaggctgggagagaagctcctgccggcgttcaacacccccacgggaatcccaaagggcgtggtgagcttcaaaagtgggaactggggctgggccacagccggcagcagcagcatcttggcggagtttggatccctgcacttggaattcttacacctcactgaactctctggcaaccaggtcttcgctgaaaaggtcaggaacatccgcaaggtcctcaggaagatcgaaaagccctttggcctctaccccaacttcctcagcccagtgagtgggaactgggtgcaacaccatgtctcagttggaggactcggggacagtttttatgaatatttgatcaaatcctggttgatgtcgggcaagacagatatggaggctaaaaatatgtactacgaagccttggaggcgatagagacctacttgctgaatgtctctcccggggggctgacctacattgccgagtggcgaggggggattctggaccacaagatggggcacctggcctgtttctccgggggcatgatcgcccttggcgccgaggatgccaaggaagaaaagagggcccactaccgagagctcgcagcccagatcaccaagacgtgtcacgagtcatacgcccgctcagacaccaaacttgggcctgaggccttctggtttaactccggcagagaggccgtggccacccagctgagcgagagctactacatcctccggccagaggtggtggagagctacatgtacctgtggcgacagacccacaaccccatctacagggagtggggctgggaaggtggtgctggccttggagaaatactgtcggacagaagccggtttctctgggatccaagacgtgtacagtagcacccccaaccacggacaacaagcagcagagcttctttctagcggagacactaaagtatctctatcttctgttctctgaagatgacttgctctccctggaagactgggtgttcaacaccgaggcccacccactcccggtgaaccactcagacagctccggcagagcctggggcagacactgaccccatctcctgccgccgccctggggccgccgcagggatgccttgccttttcaggatttgagactgttctcaaagggattgggaacgaaggccccatctcgggcagacccccagcagatgtgtcggacaagcaacttcttttcctctgtgaggagacaagacttggagactcagcgatgtcaggccagggccatggccacactggcccacacattcctttctacagagaatttctatgaagcccactcacttgccattccagggccaaaggaccggaggtttgcatatccgccccttgtatttgatttgcttccttttggtttcttggtttttgtttttgcttgattttgtcttttctctacagtttagttttgtcacaattacacatatagttttcaaaatcatgcactttctaaaatggtgtcatcctgaaaaacaaaacccagtgtttgcacacacacaaaatcttgaccccgttatctatattttaaatgctttttgcccaacactgaccctatgttcaactttgtgtcatttaccttataatttgaggaggggtttccctttgggcctcagtgttacaaattactagtgctattttcattattattgtaatggaaaaatctgtggactagaataaaagagtttattgaattagaaaaaaaaaaaaaaaaaaaaaaaaaaaaaaaaaaaaaaaaaaaaaaaaa

SEQ ID NO: 23571 - DNA, 3008 bp, Homo Sapiens
gttgagctgggtcttgaaggatgagtagaagttcaccaagtgggaaaggacactctaggatggccgagcctcgatttaacaacccctacttctggccccctcctcccaccatgcccagccagctggacaacctggttctgattaacaagatcaaggagcagctgatggccgagaagatcaggccgcctcacctgccgcccacgtcggcctcgtcgcagcagccgttgctagtgccgccggcacccgccgagagcagccaggccgtcatgtcgctgcccaagctgcagcaggtgccggggctgcatccacaggcggtgccgcagcccgacgtggcgctgcacgcacggccggccaccagcaccgtcacaggtctggggctgtccacccggaccccgtctgtgagcacttctgagtcaagcgcgggcgcgggcacgggcacgggtaccagcaccccgtccacacccaccaccaccagccagagccgcctcatcgcctcgtcccccaccctcatctcagggatcaccagcccccctctcctggactccatcaagacaatccagggccacggcctgcttggcccccccaagtccgaacgcggcctcaaaaagatcaaggcggagaacccggggggtccgcctgtccttgtagtcccctatcccatcctggcctcgggcgagactgccaaggagggcaagacgtacaggtgtaaggtatgcccactgacctttttcaccaagtcagagatgcagatccactccaagtcgcacacagaggccaagccccacaagtgcccgcactgctccaagtcctttgccaacgcctcctacctggcccagcacctgcgcatccacctgggcgtcaagccctaccactgctcctactgtgataagtccttccggcagctctcccacctccagcagcacaccagaatccacacaggcgacagaccctacaagtgcccacatcctggctgcgagaaggctttcactcagctctccaacctccagtctcaccagcgccagcacaacaaggacaagccctacaagtgtcccaactgctaccgggcctattcggactccgcttctttgcagatccacctctcggcccacgccatcaagcacgccaaggcctactgctgcagcatgtgtgggcgggcctacacctcggagacctacctgatgaagcacatgtccaaacacacggtggtggagcacctggtgagccatcactcgccccagaggacggagtcccccggcatcccggtgcgaatctctctcatctgagcccactggaggcgccgccccacccggcccactggcagacacagacccaggcagcaccaggccccagctccctccgggggccctccaggaaccaccaagctctctcacgaccttcccaatcttccagaaagcttggtccgcagaagccctgcctggtccagtccgggggcggccaggccaactgcaagattctggactgttttggtggcatccaaagacgatctcagagcactttgaacctctctgttgagttttctttttgttccccacccttcacttgcttcactgtttttttttttttcgttttttttttttaagtttgttttggaaataacagaaaagatatttattggccaggaagttggtgctgctaagaccgagaaatttaaagaatcggacagatggacgcagagaaccagagggcaatgtgggaccttctcttgccatggcctcaggtcttgagggaaggctcgggcctaggtttctggactgcaaaggggacccccaggtgggaggggcaggaagcagccggagtgagcccttcgcccctgagtgcctggctcgcacctctcgagctgtgccctgggcatcactgagcagaggggtgcggcagcttcaggaggcagaaacgagaggggtgggagatccacaggaccaaagggtgcagtgatgggctgggtggcgggcccagggaaatggggtggggatgggctgggtaagacctggccctcccctgctgccctgaagaccaccccagtctacctcggtgctggccaggaaacctttcggctacctctcccaccatcccagactgtgggcagggggatggggagggagtgggcctggatctgggacctccctccagaatttcctccagatgggggcagtgcccagggaggggttatttgtcttccctgccatggagtgggaatccccagccgaggccctaggcccctcagcagggaagggatccccggggaggcaggtcccaggagcagaccctgcccccagcccccacagacacaccccaatctgaaagccatgcgtgtcggtgtatataggaaccatgtacagagcccagagaagccccctacatccccccgggaaaaaaaagaaaactagacagaaactcatctatatattctgtatctggagttccgttttgaatattaactgtgttatttttatacactttttaagccttaactcgccattgatttaccagtttaacgtttcctggggtttctttgcccatggggttctctgcccccacccccggccctttgtttgacttgcgtcgtctgatactcagtattgtagctttttgtccgcatgttactccctgtaaatacgctgttatacatactgttaacacccctttgctttttctatgggacctccaggccaccatatttagaactagttaccttattaaaaaagaaaaaacagtctgttggcttctcagtctgcatcttggaggcagggaggtgagggcaggtgcccctcagacacttcaggaaggtagtttgcattctatttaaaaaagggagtggggagcaaatgaaaatcaaatgtggggggaaaacactaaagggggcaagaaacaaaggaattacaaaccctctgctctttgtatttctctgttgtgaagaataaactgtacctgcacccggaaaaaaaaaaaaaaaaaaaaaaaaaaaaaaaaaaaaaaaaaaaaaaaaaaaa

SEQ ID NO: 23572 - DNA, 2820 bp, Homo Sapiens
gctgttcctgaggaaaggacctttgagctgagacctgcaggataagtctgggtggcacggagcaaagtggaggccaagagcccaggggcagcccagtttctccagcaggagggaacaggatgctttttggaaataaaagtgaggcacggtggcttgcacctgagtcccagctacgctactcgggaggccaaggcagtaagagcgcttgagcccagggagttcgaggacagcctgggccacagagtgcgacctccgtctctaagaacaaacacaaacatggtcaggaggctgtcactcagagacaggcagaatcaagagctggtcctggagagaccagtggggctgtgtagactgggagctttggttgtcttgctgagagcaggaagctgcaggaagaaggcagtggtccccagccagaatacggagtggcttggaggtggtcaaaggtttgaagacagccacagtaaagtggacagagacaagaaaaataggtaccaaaccgtgcatccaggtagtcacagaaaggaaatgggtttagattgaagcaatgtgggttaaagttagaccctggggaaaccttgcaggggtctgtaggcctgtgaagaactggactaggtgagaagaagaagcttttgacccatgtcactccctggcccagaactatatcctacccacaggtgggttgagttcaggactgctgcttccagcccccagcagcaaggttcaagtgagagctgactcacctagggccccttgttagagcctcagagccaggtgaaaagccacacacaggctgggcgcgatggctcacgcctgtaatcccagcactttgggaggccgaggcaggtggatcacctgaggtcaggagttcaagaccatcctggccaacatggcaaaatcccgtctctactaaaaatacaaaaattagtcctgcctggtggcacatgcctgtagtcccagctactcgggaggctgaggcaggagaatcgcttgaacccgggaggcggaggttgcagtgagccgagatcatgccactgcactccagcctgggtgacagagcgggactctgtctccaaaaaaagaaaagccacacaggtgtgtgtgtaggggcaagggagtttcctactgtcttcctagcagaaaatggggagaaactgttaaagccagaatgagggagggctgtgtgtggcctgggactggcaacagaagtgtcaagctgccaggtttcaggccagtacagagcacggttctacctgggttatgtgttgccggcactaatggttagagacatctgtcactggtgagggcagaaatgtatgcaggagtgggtgtgggaagctggcctcactggtgggtggggttggagactttgccaggcctggtcaggaaaagctgctacaaaacagcaaaactgctcctagtgcagcgatccccaacctttttggcaacagggagtattttcctggaagaccatttttccatggagagggagggcggggctggtttcgggatggaagtgttccatctcccatcatcaggcattagtcaaactctcctaaggagcacacaaaacctacactcctggtgtgcacagttcacaggagggcttctgcttctgtgagaaccaaatgtcccactgatgtgacaggatcagagcgccatcgctgctcacttcctgcatgcggccctgttcctgacaggccacggaccagtacctggggtttggggtcccccgccctaggggatgaaagaagggaaacctgggtctaatgggttactgtgattctccctgcgatgcagggaagagacaggacagaggtgggaaggaacatggtcaccaggagtcgggacagcactcttccaggtccttcccctggggctgagtaagcaccctgcgcgtagctcttcctggccgcctgtgggctctgggatctaaacggactatgcagccattctcactttcattcacagctcggacagggacagtgtgtgttgaggcggaaagacaaaacatgtatgtgagagactttgtatgagccggttcctgatgaagtcctatctttcagcctcgtatttactgcccaggcagatggggctcttttcttcaccctcccgctttttttttttgagacagaaaacttaatagaaattttgtttgcagttcttacattctcagtgtgagccaatctgtgacccaccgccccacccagaagtggcccagtcctggtgcagggtaggaagggaagggtggagtgagaagagccccatttttcctcagtgccagggggctggagacaccacccccttctcctgcctctgggctccaggaaggagtgcagatggactctcaggcctatggttcctcctccacaccactgtcccccaggttggaggggagtgagagatacagggagagaaggggacagaggcaagaaaaggtgttgatcaagaaaggcaagaaccaggggtgagggctgacagagaatcaaagataaaacactagtaggccgggcgcggtggctcatgcctgtaatcccagcactttcggaagccaaggcgggcagatcacctgaggtcgggaattcgagaccagcctgaccaacatggagaaaccctgtctctactacaaatataaaattagccgggtgtggtggcacatgcctgtaatcccagctgctcaggaggctgaggcaggagaatcgcttgaacctgggaggcagagattgcagtgagccaagatcatgccactgcactccagcctgggcaacaagagcgaaactctgttggaaaaaaacaaacagtaaaaaaaaaaaaaaaaaa

SEQ ID NO: 23573 - DNA, 2316 bp, Homo Sapiens
gccgctgcccgccggaagcctgcccccgtaccctccctacttcgaaggcgcccccttccctcacccgctgtggctccgggacacgtacaagctgtgggtgccccagccgccgcccaggaccatcaagcgcacgcggcggcgtctgtcccgcaaccgcgacccggggcgcctcatcctcagcaccatccgcctgcggccgcgccaggtcctctgtgagaagtgcaagagcacgctgagccccccggaggccagccccggacccccagccgcgcccagggcccgcaggaggctgggcagcggcccggacagggagctccgcaagccggaggagccggagaacggcgagcccacggctgcggccaccgccaggaggagcaagagggagaggcgcgaggaggacagggccccggcagagcaggtcccgcggagcccggtcatcaagatctcctacagcacgccccagggcaagggagaggtggtcaagatcccctcccgcgtgcacggctctctggagcccttccgtccccagcaggccccgcaggacgacggcagccaggaccccgaggtgctggacagagagtcccgggaccggccgtcctgcgcgccctcggcctccatccccaagttgaaactgacacggcctgtgccggccggcgcggacctgccgccccctaagatccgcctgaagccccaccgtctgggggacagcgagcacgagcccgtgtaccgggccgagctggtgggggagctgaacgggtacctgcgggacagctcgccggcgccctgtgcggacggccctgccggtgggctggcggacttgtcttctggaagttcgggtgaggacgatgacttcaagagctgtccccagggtccacagggacgcgagggcttggcttttctcgtcagctgccctgaggggagagcggactgtgccagtgagtcggcgtgcagcagcgacagcctggacgaggccagatcgtccggctcggaagggacgccggcagacacgggtgacctctcgcctggccacggcgcgtcagcgccctcggtgtccagagaggctcgccaaacggtgccgcccctgacggtcaggctgcacacacagagcgtgtcggagtgcatcacggaggacggcaggactgtggccgtgggggacatcgtctggggtaagatccatggttttccttggtggccggcgcgtgttcttgacatcagtctcggccagaaggaggacggagagccgtcttggcgagaagcgaaggtctcgtggtttggttctccgactacgtcgttcttgtctatttcaaaactctcccctttctctgaatttttcaaactgagatttaatcgtaagaagaaggggatgtatcggaaagctataaccgaggctgcaaatgccgcaagacacgtggccccggaaatcagggagctcttaacccagtttgaaacgtaactggttccctgaccaggtcaccgacgatgagggcgcacctgctgtcctggagcttccgatctctgttcggggaccctgtgagccttctggccggctgcgtgcagagcccactgggcacggtggtcggcctggtgtgaggccccccggggaccggcagtgtgtccagggaggggatggccctgagcccagcggctcctcccgctgagtgtatttcttcccaccactcagcgcatggctgccctggctcacgaggcagtcgggactcgtgacttgctggctgctggctgctgctgcctcgcgcgctggggttccatggaggaactgggcctgccgccccggcctcacctgctgcccgcatgctggggtcccatggaggaaccaggcctggcgccccggcctcgcccagcggctggtgtgggcagctgttccctgcctcgcagtgtcctggaggcagctgtctcgcagactcagcttggtctcccgcaggcttcagaaaaacccaattgcacgtgtgggattcttccccagcccttgggtgcggggtctctgtgcacttgagagctgggggacccacccaccgtctcccactccaagttcatcccagagcgtggggcccgctgggcacctggcacctggcctgcagatgctgctacgagtgaccagtgctgtgtggaggaggccaagggcggcccctgggaaaccgggcttcaacaagtacaaggaaaagaaacttgctctgttttgtaagaagcgtgttccttttcctcttttttgtcactttaaagacccaaaagaataaagaaagaaaagaaaaaattttaaaaaaaaaaaaaaaaaaaaaaaaaaaaaaaaaaaaaaaaaaa

SEQ ID NO: 23574 - DNA, 2423 bp, Homo Sapiens
gcagccgcggaactccgggccctgagagggggcgggggtgcaggggtcccagggccgggccggggtctttcctggcccgggggaaaccggcccaggcctcccggggggggcaatcgcccaacaaaggattcttggggcgcccgccctcgaggacttccctgcccctggatccggcccccccagcgctccgggcccggcatcccggggctctccatcgcggggtaccccagttcgcggtctgccatcgggcagcccgggcgctactcacctccgcccgcgtccgtgttccaggtccggcccggagcggccatgtcccacggccccaagcagcccggcgcggccgccgcgccggcgggcggcaaggctccgggccagcatgggggcttcgtggtgactgtcaagcaagagcgcggcgagggtccacgcgcgggcgagaaggggtcccacgaggaggaggtgagagtccctgcgctgagctgggggaggccccgggctcccgccccagcctcgaagccccgccccaggctggatttgaattgcttgtggctccgcccacagcccattttcctctggaagctgagaccccgccccgtgccagctgccacgcccctgacaggtcctctgccactctaagtccaggccccgcccaccgcacaatgccagctctgcccactctaaggtcccgcccacttccactccttgggggcggcaccctccccttggtcctgtgggcccgttctccagcagaaaaccacgcccaccaagcagaggccacgcccacaaccgaagtcaacgccaaccctgtactcaaacctcggcccatagttcctcagatcccctcacccctggccagggatccctctaacccaccgtgtcccgactgctgaccgggccctacctccatcttttccgggttcttcctcccagctaggccccgcccccatccccgcccatacgcgttaggccccgcccatgcccctctgagccctgccccagtacgccaggcccccctcccaacgacgcagcccggttctgcagccggtgaagaaacgcggctggcccaagggcaagaagcggaagaagattctgccgaatgggcccaaggcaccggtcacgggctacgtgcgcttcctgaacgagcggcgcgagcagatccgcacgcgccacccggatctgccctttcccgagatcaccaagatgctgggccccgagtggagcaagctgcagccaacggaaaagcagcggtacctggatgaggccgagagagagaagcagcagtacatgaaggagctgcgggcgtaccagcagtctgaagcctataagatgtgcacggagaagatccaggagaagaagatcaagaaagaagactgagctctgggctcatgaacactctcctgaatggacacaagggtggggactgcgatggcttctccaccttcgatgttcccatcttcactgaagagttcttggaccaaaacaaagcgcgtgaggcggagcttcggcgcttgcggaagatgaatgtggccttcgaggagcagaacgcggtactgcagaggcacacgcagagcatgagcagcgcgcgcgagcgtctggagcaggagctggcgctggaggagcggaggacgctggcgctgcagcagcagctccaggccgtgcgccaggcgctcaccgccagcttcgcctcactgccggtgccgggcacgggcgaaacgcccacgctgggcactctggacttctacatggcccggcttcacggagccatcgagcgcgaccccgcccagcacgagaagctcatcgtccgcatcaaggaaatcctggcccaggtcgccagcgagcacctgtgaggagtgggcgggcccacgatgcagaggagaagctgtgggcgcggccctgccacaccccaccccgtggacgagaggctgggggtccaccctttggggcctggtcccatcctgcaccttgggggctccagcccccctaaaattaaatttctgcagcatccctttagctttcaatctccccagccccctgaacccggaaaaagcactcgctgcgcgatacacccagaagaacctcacagccgagggtgcccctcctcggaggacagccacgcgctacactggctctccgggccacccccaggacacagggcagacgaaacccacccccagcacacggcaggaccccccaaattactcactacggggggctgtgccataggccacacaggaagctgccttgtggggacttacctggggtgtcccccgcatgcctgtaccccagatgggtgggggccggctttgcccatcctgctctcctccagccgagggaccctggtgggggtggctccttctcactgctggatccggactttttaaataaaaacaagtaaaatttgtgttttaaaaaaaaaaaaaaaaaaa

SEQ ID NO: 23575 - DNA, 6746 bp, Homo Sapiens
ggcacgaggcggggagctgtcgcgggcagcgcgccctcgggaggacgtggccccggcccccgcccgcagtgggcccgaccctcatggccctgagcaaagggctgcggctgctggggcgcctgggggccgagggggactgtagcgtgctgctggaggcgcgcggccgcgacgactgcctgctgttcgaggccggcacggtggccacgctggctccagaagaaaaggaagtcattaaaggacagtatggcaagctcacggacgcgtacggctgcctgggggagctgaggctgaaatctggtggcacgtctctgagcttcctggtgttggtgacaggctgcacatctgtgggcagaattccagatgctgaaatctacaaaatcactgccactgacttttaccctcttcaggaagaggccaaggaggaggaacgcctcatagctttgaagaaaatcctcagctcgggggtgttctatttctcatggccaaacgatgggtctcgctttgacctgactgtccgcacgcagaagcagggggatgacagctctgaatgggggaactccttcttctggaaccagctgttgcacgtgcccttgaggcagcaccaggtgagctgctgtgactggctgctgaagatcatctgcggggtggtcaccatccgcaccgtgtatgcctcccacaagcaggccaaggcctgcctcgtctctcgcgttagctgtgagcgcacaggcactcgcttccacacccgtggcgtgaacgacgacggccatgtgtccaacttcgtggagacagagcagatgatttacatggacgatggagtgtcatcttttgtccagatcagaggctccgttccgctgttctgggaacagccagggcttcaggttggctcccatcatctgagactccacagaggcctggaagccaatgcccctgctttcgacaggcacatggtgcttctgaaggagcagtacgggcagcaggtggtcgtgaaccttctgggaagcagaggcggagaggaggtgctcaacagagccttcaagaagctgctctgggcttcttgccacgcgggcgacacgcctatgatcaattttgacttccatcagtttgccaaaggtgggaagctagagaaattggagaccctcttgaggccacagttaaagctgcactgggaagacttcgatgtgttcacaaagggggagaacgtcagtccacgttttcagaaaggcactttgcggatgaactgtcttgactgcctggaccgaaccaacactgtgcagagcttcatcgcgctcgaggtcctgcatctgcagctcaagaccctggggctgagttcaaaacccatcgttgaccgctttgtggagtccttcaaagccatgtggtctctgaatggccacagcctgagcaaggtgttcacaggcagcagagccctggaagggaaggccaaggtggggaagctgaaggatggagcccggtccatgtctcgaaccatccagtccaacttcttcgacggggtgaagcaggaggccatcaagctgctgctggttggggacgtctacggcgaggaggtggcagacaaagggggcatgctgctggacagcacggcgctcctggtgactcccaggatcctgaaagctatgactgagcgtcagtccgaattcacaaatttcaagcggatccggattgctatggggacctggaacgtgaacggaggaaagcagttccggagcaacgtgctcaggacggcggagctgacagactggctgctcgactcgccccagctctcgggagctaccgactcccaggatgacagcagcccagctgacatatttgctgtggggtttgaagagatggtggaattgagcgcagggaatattgtcaatgccagtactaccaacaagaagatgtggggtgaacagcttcagaaagccatctcacgctctcatagatacattctgttgacttcggcacagctggtgggcgtctgtctttatatctttgtacgtccataccatgtcccgttcatcagggacgtagccatcgacacagtgaagacgggcatggggggcaaggcggggaacaagggcgccgtcggcatccgcttccagttccacagcaccagcttctgcttcatatgtagtcacctgacggccgggcagtcccaggtgaaggagcggaatgaagactacaaggagatcacccagaaactctgcttcccaatggggagaaatgttttttctcatgattatgtattttggtgtggcgatttcaactaccgcattgatcttacttatgaagaagtcttctattttgttaaacgccaagactggaagaaacttctggaatttgatcaactacagctacagaaatcaagtggaaaaatttttaaggactttcacgaaggagccattaactttggacccacctacaagtatgacgttggctcagccgcctacgatacaagcgacaaatgccgcacccccgcctggacagacagggtgctgtggtggaggaagaaacatccctttgataaaacagctggagaactcaaccttctagacagtgatctagatgttgacaccaaagtcagacacacctggtctcctggtgccctgcagtattatggtcgtgcggagctacaagcgtctgatcacagacctgtgctggcgatcgtggaggtggaagttcaggaagtcgatgtgggtgctcgggagagggttttccaggaagtgtcctccttccagggccccctggatgccactgttgtagtaaaccttcaatcaccgaccttagaagagaaaaacgagtttccagaggacctgcgtactgagctcatgcagaccttggggagttatgggacaattgttcttgtcaggatcaaccaagggcagatgctggtaacttttgcagacagtcactcggctctcagtgtcctggacgtggacggtatgaaggtgaaaggcagagcagtgaagattagaccgaagaccaaggactggctgaaaggtttgcgagaggagatcattcggaaacgagacagcatggcccccgtgtctcccactgccaactcctgtttgctggaggaaaactttgacttcacaagtttggactatgagtcagaaggggatattcttgaagacgatgaagactacttggtggatgaattcaatcagcctggagtctcggacagtgaactcgggggagacgacctctctgatgtccccggccccacagcactggctcctcccagcaagtcacctgctctcaccaaaaagaagcagcatccaacgtacaaagatgacgcggacctggtggagctcaagcgggagctggaagccgtcggggagttccgccaccgttctccgagcaggtctctgtcggtccccaaccggcctcggccacctcaacccccgcagagacccccccctccaaccggtttaatggtgaaaaagtcggcttcagatgcgtccatctcctccggcacccatggacagtattcaattttgcagacggcaagacttctaccaggagcacctcagcaacctcccaaggctcggactggaataagtaaaccttataatgtcaagcagatcaaaaccaccaatgcccaggaggcagaagcagcaatccggtgtctcctggaagccagaggaggtgcctccgaagaagccctaagtgccgtggccccaagggaccttgaagcatcctctgaaccagagcccacaccgggggcagccaaaccagagaccccacaggcgcccccactccttccccgtcggcccccacccagagttcctgccatcaagaagccaaccttgagaaggacaggaaagcccctgtcaccggaagaacagtttgagcaacagactgtccattttacaatcgggcccccggagacaagcgttgaggcccctcctgtcgtgacagcccctcgagtccctcctgttcccaaaccaagaacatttcagcctgggaaagctgcagagaggccaagccacaggaagccagcatcagacgaagcccctcctggggcaggagcctctgtgccaccacctctggaggcgccgcctcttgtgcccaaggtacccccgaggaggaagaagtcagcccccgcagccttccacctgcaggtcctgcagagcaacagccagcttctccagggcctcacttacaatagcagtgacagcccctctgggcacccacctgccgcgggcaccgtcttcccacaaggggactttctcagcacttcatctgctacaagccccgacagcgatggcaccaaagcgatgaagccagaggcagccccacttcttggtgattatcaggaccccttctggaaccttcttcaccaccctaaactgttgaataacacttggctttctaagagctcagaccctttggactcaggaaccaggagccccaaaagagatcccatagacccagtgtcagctggcgcttcagctgccaaggcagagctgccaccagatcatgaacacaaaaccttaggtcactgggtgacaatcagtgaccaagaaaagaggacagcactgcaggtgtttgacccactggcaaaaacatgactgagcagctttgaaggctgcagtcctatagaatgcataccttcctccctctagacatccctccaccagaagagacatctatttaaaggcacactggccaaaacgtttgtgcatctgtcactctcgtgtagtttacaaaaatcgtgtctcttattcagtaagatggttactcagccaccaaaatatatttcactcaaggcttgtacatctgaagtttgctcttcaaggaatgggaaccttcctgttaaattcggtgtatggattttaagaaaggaatctagccaatgaggtccaagaagttctcacccattgaatttttaaatggctgttcagttcatgttgtacgtgatggagatttgtcttttgttttatttgcattttacagatttggtataacattttggggagccacctgaaggttgatgtataaagtaaggattagagaaagaggtcgttgtgaccattaatagctgtcctggcccacttaaacaaggttacaaaaaatcagagtcggaagcagccaaataggtcaacctaatgactagactgtacattcccatgagccttcatgtttaagtgtgtacatgtgcgttaaccttgatgatgcgtgaatcccgagggagccggtggcatacaccgttagcttaaccttagcttaaactagctgaaggctcctgtgccatgtcttagacattgcatgccctatcaattactataatcctgagccatggtgtgctactgaaaccaatttttatccaccatctagtccttattaaatgaaacctcacggatcctttgttccgcttatattccatgcataccacataaaagcacacagtgcgaaaactcttgctgatacgcgatattgattctcattgttagaatatggagagtgtttcagcctcgtctgtccggctggagcttcgggatggaaagtgctatgtgtccctgcatataagaatcaccaggccagtgtttctgggtttgcttgtctatatgtttgtctatattttttgcctatacatttttcccacgtttccaacagcacttctcacctattcaataactgaaaaagacattaccatagtgctttacatttttaaagtaatgttacaaggtctggaatccatttggagcagataccgtgttttcgctatttaataagaagttcagtagtgaaatcttactgtaccgcctgttgtatctgggagcctcgtacagaggctcgcacagcagtgatcaagtgtcatcccttacgtgactgggggatgtctgtcctaaaagctgactgctaggatagtaaggatcatcttgcctgggctatgccactgtcttgttaccaattagacatctggaatttcataattagttttcattgtcactgtcaagatatattgcagattacttaaatatggccatcaaaacaaaagttacaacacgtatctcttttcatctgaaaactaatacctggaaaaggataaaaaaaaaaaggaatccgtgacccacagagctagacagataagatgcatagttgaccagtcataaaaggcggtgtttaagtgatcaggatgccgttggtggcatttacgtgctttatatgatttttacctctgtaacaaacacaagaaataaacagaatggtccttaacagagtttgggggagagagcaagatgggttccttggagaagctgatttgccaagatgcacatcgctattaacagccagagtcataaatgaaatgaaattgaagaattcattcaaatgctcttttccctataacctcttttctcaccaaaaaggagataaatttgaaaacagataaatgtaacaaccagtcaaagaagcaggggaaaagtaagctcctccaaagttgcttgcagtgctggaaatagatctcatttttaggttttctcttcgttccagataccaaataaatgggacagagaataaaatttttgttaaaatatgtgctcatctcctaagtagctcttcagagtctgaccgtaagtaaaaacacacagaattgtgttgactgggggaggtgaatcacaaaaaagttacgaggagtttaagagttaaatattatttgatcgtggctgtcaaatttagtgaacaacatagattggatttggagttggtagtaagtatggttctcataccagaattctctt

SEQ ID NO: 23576 - DNA, 8107 bp, Homo Sapiens
tgagggaagaagaggaagcgggaggagcttggcttcctcgcgtatttgaggacagcccatctcccttcaagaaccctacggagagtcggactgcatctccgcagcgagctcttggagcgccgccggccgggaggcgaaggatgcaggcggctccgcgcgccggctgcggggcagcgctcctgctgtggattgtcagcagctgcctctgcagagcctggacggctccctccacgtcccaaaaatgtgatgagccacttgtctctggactcccccatgtggctttcagcagctcctcctccatctctggtagctattctcccggctatgccaagataaacaagagaggaggtgctgggggatggtctccatcagacagcgaccattatcaatggcttcaggttgactttggcaatcggaagcagatcagtgccattgcaacccaaggaaggtatagcagctcagattgggtgacccaataccggatgctctacagcgacacagggagaaactggaaaccctatcatcaagatgggaatatctgggcatttcccggaaacattaactctgacggtgtggtccggcacgaattacagcatccgattattgcccgctatgtgcgcatagtgcctctggattggaatggagaaggtcgcattggactcagaattgaagtttatggctgttcttactgggctgatgttatcaactttgatggccatgttgtattaccatatagattcagaaacaagaagatgaaaacactgaaagatgtcattgccttgaactttaagacgtctgaaagtgaaggagtaatcctgcacggagaaggacagcaaggagattacattaccttggaactgaaaaaagccaagctggtcctcagtttaaacttaggaagcaaccagcttggccccatatatggccacacatcagtgatgacaggaagtttgctggatgaccaccactggcactctgtggtcattgagcgccaggggcggagcattaacctcactctggacaggagcatgcagcacttccgtaccaatggagagtttgactacctggacttggactatgagataacctttggaggcatccctttctctggcaagcccagctccagcagtagaaagaatttcaaaggctgcatggaaagcatcaactacaatggcgtcaacattactgatcttgccagaaggaagaaattagagccctcaaatgtgggaaatttgagcttttcttgtgtggaaccctatacggtgcctgtctttttcaacgctacaagttacctggaggtgcccggacggcttaaccaggacctgttctcagtcagtttccagtttaggacatggaaccccaatggtctcctggtcttcagtcactttgcggataatttgggcaatgtggagattgacctcactgaaagcaaagtgggtgttcacatcaacatcacacagaccaagatgagccaaatcgatatttcctcaggttctgggttgaatgatggacagtggcacgaggttcgcttcctagccaaggaaaattttgctattctcaccatcgatggagatgaagcatcagcagttcgaactaatagtccccttcaagttaaaactggcgagaagtacttttttggaggttttctgaaccagatgaataactcaagtcactctgtccttcagccttcattccaaggatgcatgcagctcattcaagtggacgatcaacttgtaaatttatacgaagtggcacaaaggaagccgggaagtttcgcgaatgtcagcattgacatgtgtgcgatcatagacagatgtgtgcccaatcactgtgagcatggtggaaagtgctcgcaaacatgggacagcttcaaatgcacttgtgatgagacaggatacagtggggccacctgccacaactctatctacgagccttcctgtgaagcctacaaacacctaggacagacatcaaattattactggatagatcctgatggcagcggacctctggggcctctgaaagtttactgcaacatgacagaggacaaagtgtggaccatagtgtctcatgacttgcagatgcagacgcctgtggtcggctacaacccagaaaaatactcagtgacacagctcgtttacagcgcctccatggaccagataagtgccatcactgacagtgccgagtactgcgagcagtatgtctcctatttctgcaagatgtcaagattgttgaacaccccagatggaagcccttacacttggtgggttggcaaagccaacgagaagcactactactggggaggctctgggcctggaatccagaaatgtgcctgcggcatcgaacgcaactgcacagatcccaagtactactgtaactgcgacgcggactacaagcaatggaggaaggatgctggtttcttatcatacaaagatcacctgccagtgagccaagtggtggttggagatactgaccgtcaaggctcagaagccaaattgagcgtaggtcctctgcgctgccaaggagacaggaattattggaatgccgcctctttcccaaacccatcctcctacctgcacttctctactttccaaggggaaactagcgctgacatttctttctacttcaaaacattaaccccctggggagtgtttcttgaaaatatgggaaaggaagatttcatcaagctggagctgaagtctgccacagaagtgtccttttcatttgatgtgggaaatgggccagtagagattgtagtgaggtcaccaacccctctcaacgatgaccagtggcaccgggtcactgcagagaggaatgtcaagcaggccagcctacaggtggaccggctaccgcagcagatccgcaaggccccaacagaaggccacacccgcctggagctctacagccagttatttgtgggtggtgctgggggccagcagggcttcctgggctgcatccgctccttgaggatgaatggggtgacacttgacctggaggaaagagcaaaggtcacatctgggttcatatccggatgctcgggccattgcaccagctatggaacaaactgtgaaaatggaggcaaatgcctagagagataccacggttactcctgcgattgctctaatactgcatatgatggaacattttgcaacaaagatgttggtgcattttttgaagaagggatgtggctacgatataactttcaggcaccagcaacaaatgccagagactccagcagcagagtagacaacgctcccgaccagcagaactcccacccggacctggcacaggaggagatccgcttcagcttcagcaccaccaaggcgccctgcattctcctctacatcagctccttcaccacagacttcttggcagtcctcgtcaaacccactggaagcttacagattcgatacaacctgggtggcacccgagagccatacaatattgacgtagaccacaggaacatggccaatggacagccccacagtgtcaacatcacccgccacgagaagaccatctttctcaagctcgatcattatccttctgtgagttaccatctgccaagttcatccgacaccctcttcaattctcccaagtcgctctttctgggaaaagttatagaaacagggaaaattgaccaagagattcacaaatacaacaccccaggattcactggttgcctctccagagtccagttcaaccagatcgcccctctcaaggccgccttgaggcagacaaacgcctcggctcacgtccacatccagggcgagctggtggagtccaactgcggggcctcgccgctgaccctctcccccatgtcgtccgccaccgacccctggcacctggatcacctggattcagccagtgcagattttccatataatccaggacaaggccaagctataagaaatggagtcaacagaaactcggctatcattggaggcgtcattgctgtggtgattttcaccatcctgtgcaccctggtcttcctgatccggtacatgttccgccacaagggcacctaccataccaacgaagcaaagggggcggagtcggcagagagcgcggacgccgccatcatgaacaacgaccccaacttcacagagaccattgatgaaagcaaaaaggaatggctcatttgaggggtggctacttggctatgggatagggaggagggaattactagggaggagagaaagggacaaaagcaccctgcttcatactcttgagcacatccttaaaatatcagcacaagttgggggaggcaggcaatggaatataatggaatattcttgagactgatcacaaaaaaaaaaaaaacctttttaatatttctttatagctgagttttcccttctgtatcaaaacaaaataatacaaaaaatgcttttagagtttaagcaatggttgaaatttgtaggtactatctgtcttattttgtgtgtgtttagaggtgttctaaagacccgtggtaacagggcaagttttctacgtttttaagagcccttagaacgtgggtattttttttcttgagaaaagctaatgcacctacagatggcccccaacattctcttccttttgcttctagtcaaccttaatgggctgttacagaaactagttcgtgtttatatactatttcctttgatgtcctataagtcggaaaagaaaggggcaaagagaacctattatttgccagtttttaagcagagctcaatctatgccagctctctggcatctggggttcctgactgataccagcagttgaaggaagagagtgcatggcacctggtgtgtaacgacacaatcagcacaactggagagaggcattaaagaaccagggaaggtagtttgatttttcattgaattctacaagctaatattgttccacgtatgtagtcttagaccaatagctgtaactatcagctgcaataccatggtgaccagctgttacaaaagattttttcctgttttatctgaaacatactggatttatatatgtataagcgcctcaatggggaattagagccagatgttatgatttgtttgctctttttcttttatagttatagcaaaaatatggataatttctagtgaatgcataaattaggttgcgtttcttattttgctttaaatctctggtagtttttccacccctgtgacacaatcctaatagacagtgtcctgtaaatggacacaacacaataaagtcaagttattattgctgttactctggatgatatggaaaacactgccatattttaaatcaactactccacgtgtttttccatccaatcacactgctgtgattcagggatctttcttctaaaacggacacatttgaacctcaggttcatcacaaacctggtacctgttgcttcccagaggatggagaagtgtagttaatcacacctcttagtttaatctgaaatcttgacccagttatttaacaaataaatacctcattgattatatttaaaagtaatacacttcctgtaaacaaatggggacaatgcatccaaaaaatctttttaaacagattacacaaaaattatttccagaaaggctaccatttatcatcattatatttcaagcctcttatacttaataagcactttctaaaaagtcttgagatcccaccattctgaggaattcaatatgatcactttttccttctttgcctgggagaggttaagaggcggtttcgaaggtatagatgctattgttctgatggcccggctgaataaaatggaaattctagtttgttagaattatgcattctttttcaagattctcagtgtgcctaacttattggagcacatcagtttcttgggtaatggaaaacattacctagagttgccagtggcacattacaccagtacagagcacattccaaaggagacattggaccagttaattcccatacaagtcaaggtaacagaacaaaagggaatcctgatgcccttttaccattgctggttgagctcaggcactgtcatggacacccttaattttaaaaggttttaatcattcttctataaaatacatttaaaatggaaaaatacttaatatcactaaatatcagaacaatgtaacatttacaaatgacatattgaaagcaaaggctgttttatttagccaagatgattaccattaggagttactttatgtattgttgaaagcaaattttaaacatgatgttttagaagtgtttctgatttttaaacctggtttacaggtattacttctgcacttaccaaataatgccagatggaaatttattatttcttgcaattcccgtgatagctctgttctttatgcattgtctcaacactttcccttttttcccaaaatgagtagagaattaaagccacccaaaacagcttctgctactaaaatgttctcatcctttctcctccctctccttttcctgccacaaaaggtgaaaaatgagatccaatcctctcaccaaaatttcaaacctaggacactggaatgactgcagggatcagtggttctcccatatcaccatcaattaagacatataggacactgtcttccttcaagagggttacaatgtggccatcagacaggaaaccaaacggtggataaagtattaagtaactaagtgccaaataaatgctggaaatcttgacctctccttgggattatgggtgtaacaaaaatccctacatctgtttatgaaggccatattcagtacattttaaatggtaaataatctgtttatgtgaagaaaaagaattaagtctttcttccaactctctccttggatagcctagcacagtgcagcctccataaccatgacattcccgcccaagctctcagtgcctaatcctgctttgtcattcacatctcacaaaatcttgacatcttacattccaatacattatcaagcaagcacaagtatgctggtagtagcctctttaaataatatgtatagacaacaacaacgacaaaaaatagactgttttaaagtttcagggaaagttggtggctgatttaaagttgtgcaggaaacatcttctgtgtatgaagcaaatgtcgatgttttgaaaagctaggagatgactttgaatgaatgcaaggttagtgagatcctaagctctcaaaatagcatattccctagagctcaagaaagctggtccaggaggttgaaaaagctattttgttgttaaattattttctggcccttcttaatatttaaaaatgtatttccccttgtggctttcaaccacctgctcaaaaaaagagacttgttacatgaaagttttcattaaagagctgaaaacaagaatttagagagccattcctagaaaatgtcctactgccctgcatttgacaaacaagcatcctttactaacaagagcaggaattcagaggcacaagaaaaagcattggcatgagccaaagagtctgtcttaatgttacttttgaaaatctgctgagcggccaccatatgcaggctgagagctgggcacaggcgaagccattggaagcacttcaggaacaagcacacagctgtgggacttgaacatgcaagtgttcaggttgtgtcaagaagcttttctttccttctatgatggaatctgttcttttctatcctacttttttctctcttcctctcctcaccacattataccctgctcttacgcagtaaacgttttaatggcccgtttatgtctcatgcctccaaacaacactgaatttgaaaccccccattttttcttttcaccaccctgttgagcaattttcccaaaaaaagggcagcaattattaaattgaattcaagtttctagattttactaagttttattttgtcaggttttttaaattttttcagtgagcgtggtgactgcagaggttagtgctgtgaaaagctgggctaaatattctttctgtaaagtcaaacaggattccatcccctgtgaaataacacaaaatttcactctctaaaagcaacagcatgtaaactagaatgaaagaaggaaattatgtacgtatgcctaatattctttgtgaatgtctttcatttaactaaaattatattagaaaccagattgataaataaaaaattcaaagtagttttaattatcct

SEQ ID NO: 23577 - DNA, 3555 bp, Homo Sapiens
tgggatgtgaccgacagcaccgccccctagggctgggcctgattttctcattggcttcccccgtgttcgcgttatggccgctgccgcggctgtggaggcggcggcgcctatgggtgccctatggggcctcgtgcacgacttcgtcgtgggtcagcaagagggccccgctgaccaggtggctgcagatgtgaaatctggcaactatacagtgttacaagttgtggaagcccttgggtcctctctagagaatccagaaccccgaactcgggcacgaggaatccagcttttgtcacaggtgctactccactgtcacaccttgctcctggagaaggaagtggtacacctgatactgttctatgagaaccggctgaaggaccatcatcttgtgatcccatctgtcctgcagggtttgaaggcacttagcctgtgtgtggccctgcccccagggctggctgtttctgtgcttaaagccatcttccaggaagtgcatgtacagtccctgccacaggtggaccgacacacagtctacaatatcatcaccaattttatgcgaacccgggaagaagagctaaagagcctaggagctgacttcacctttggcttcatccaggtgatggatggggaaaaggatccccgtaatcttctggtggccttccgcatcgtccatgacctcatctccagggactatagcctgggaccctttgtggaggagttgtttgaagtgacatcctgttatttccctatcgattttacccctccacctaatgatccccatggtatccagagagaagacctcatcctgagtcttcgcgctgtgctggcttctacaccacgatttgctgagtttctgctgcccctgttgattgagaaagtggattctgaggttctgagtgccaagttggattctctacagactctgaatgcttgctgtgctgtgtatggacagaaggaactgaaggacttcctccccagcctttgggcttctatccgcagagaggtgttccagacggcaagtgagcgggtggaggcagagggcctggcggccctccactccctgactgcgtgtttgtctcgctctgtgctgagggctgatgctgaggacctccttgactccttccttagcaacattctacaggactgcaggcaccacctgtgtgaaccggacatgaaactggtgtggcctagtgccaagctgttgcaggcagctgcaggtgcatctgcccgggcctgtgactctgtcaccagcaatgtactgcctttactgctggaacagttccacaagcacagtcagagcagccagcggcggacaatccttgaaatgctcctgggtttcttgaagctgcagcagaaatggagctatgaagacaaagatcaaaggcctctgaatggcttcaaggaccagctgtgctcactggtattcatggctctaacagaccccagcacccagcttcagcttgttggcatccgtacactgacagtcttgggtgcccagccagatctcctatcttatgaggacttggagctggcagtgggtcacctgtacagactgagcttcctgaaggaggattcccagagttgcagggtggcagcactggaagcatcaggaaccctggctgctctctaccctgtggccttcagcagccacctcgtacccaagctcgctgaggagctgcgtgtaggggagtcaaatttgactaacggagatgagcccacccaatgctcccggcatctgtgctgtctgcaagccttgtcagctgtatcaacacatcccagcatcgtcaaggagacactgcctctgctgctgcagcatctctggcaagtgaacagagggaatatggttgcacaatccagtgacgttattgctgtctgtcagagcctcagacagatggcagaaaaatgtcagcaggaccctgagagttgctggtatttccaccagacagctataccttgcctgcttgccttggctgtgcaggcctctatgccagagaaggagccctcagttctgagaaaagtactattggaggatgaggtgttggctgccatggtgtctgtcattggcactgctacaacccacctgagccctgagttagctgcccagagtgtgacacacattgtgcccctcttcttggatggcaacgtgtcctttctgcctgaaaacagcttcccgagcagattccagccattccaggatggctcctcagggcagaggcggctgattgcactgcttatggcctttgtctgctccctgcctcgaaatgtggaaatccctcagctgaaccaactcatgcgggagcttttggaactgagctgctgccacagctgccccttttcttccaccgctgctgccaagtgctttgcaggactcctcaacaagcaccctgcagggcagcagctggatgaattcctacagctagctgtggacaaagtggaggctggcctgggctctgggccctgtcgtagtcaggccttcactcttcttctctgggtaacaaaggccctagtgctcagataccatcctctcagctcctgccttacagcccggctcatgggcctcctgagtgacccagaattaggtccagcagcagctgatggcttctctctgctcatgtctgactgcactgatgtgctgactcgtgctggccatgctgaagtgcggatcatgttccgccagcggttcttcacagataatgtgcctgctttggtccagggcttccatgctgctccccaagatgtgaagccaaactacttgaagggtctttctcatgtacttaacaggctgcccaagcctgtactcttgccagagctgcccacgcttctttccttgctgctggaggccctgtcctgccctgactgtgtggtgcagctctccaccctcagctgccttcagcctcttctactggaagcaccccaagtcatgagtcttcacgtggacaccctcgtcaccaagtttctgaacctcagctctagcccttccatggctgtccggatcgccgcactgcagtgcatgcatgctctcactcgcctgcccacccctgtgctgctgccgtacaaaccacaggtgattcgggccttagccaaacccctggatgacaagaagagactggtgcgcaaggaagcagtgtcagccagaggggagtggtttctgttggggagccctggcagctgagccctcagtcctggcctagactgttctgacaatctaacctgggattactaactgttgagccatcttccccaaagcagggaaaccactggtctctgactgcctttcccacagacacagcacaaatgctaggcctctgttgcatggctgtacaaagaacataagagtccatatttctagtggatttgtaaaataagtgtgtgtgagacacttgcgtttgaagaaagatctagggtcctgggtctcttgcatttatatgtcagaaaaggggcgatatgctgctgaggggtgagtgcatatgagtgtggccctgaggaccagggctggcagatgttgtctacctgctgaagaataaagatttcttttggtaaaaaaaaaaaaaaaaaaaaaaa

SEQ ID NO: 23578 - DNA, 2157 bp, Homo Sapiens
gggcagtggctcgtgggagccaagatggcggcggcggcggcagcgacagcagcagcagcagccagtattcgggaaaggcagacagtggctttgaagcgtatgttgaatttcaatgtgcctcatattaaaaacagcacaggagaaccaatatggaaggtactcatttatgacagatttggccaagatataatctctcctctgctatctgtgaaggagctaagagacatgggaatcactctgcatctgcttttacactctgatcgagatcctattccagatgttcctgcagtatactttgtaatgccaactgaagaaaatattgacagaatgtgccaggatcttcgaaatcaactatatgaatcatattatttaaattttatttctgctatttcaagaagtaaactggaagatattgcaaatgcagcgttagcagctagtgcagtaacacaagtagccaaggtttttgaccaatatctcaattttattactttggaagatgatatgtttgtattatgtaatcaaaataaggagcttgtttcatatcgtgccattaacaggccagatatcacagacacggaaatggaaactgttatggacactatagttgacagcctcttctgcttttttgttactctgggtgctgttcctataatcagatgttcaagaggaacagcagcagaaatggtagcagtgaaactagacaagaaacttcgagaaaatctaagagatgcaagaaacagtctttttacaggtgatacacttggagctggccaattcagcttccagaggcccttattagtccttgttgacagaaacatagatttggcaactcctttacatcatacttggacatatcaagcattggtgcacgatgtactggatttccatttaaacagggttaatttggaagaatcttcaggagtggaaaactctccagctggtgctagaccaaagagaaaaaacaagaagtcttatgatttaactccggttgataaattttggcaaaaacataaaggaagtccattcccagaagttgcagaatcagttcagcaagaactagaatcttacagagcacaggaagatgaggtcaaacgacttaaaagcattatgggactagaaggggaagatgaaggagccataagtatgctttctgacaataccgctaagctaacatcagctgttagttctttgccagaactccttgagaaaaaaagacttattgatctccatacaaatgttgccactgctgttttagaacatataaaggcaagaaaattggatgtatattttgaatatgaagaaaaaataatgagcaaaactactctggataaatctcttctagatataatatcagaccctgatgcaggaactccagaagataaaatgaggttgtttcttatctattatataagcacacagcaagcaccttctgaggctgatttggagcaatataaaaaagctttaactgatgcaggatgcaaccttaatcctttacaatatatcaaacagtggaaggcttttaccaagatggcctcagctccggccagctatggcagcactaccactaaaccaatgggtcttttatcacgagtcatgaatacaggatcacagtttgtgatggaaggagtgaagaacctggttttgaaacagcaaaatctacctgttactcgtattttggacaatcttatggagatgaagtcaaaccccgaaactgatgactatagatattttgatcccaaaatgctgcggggcaatgacagctcagttcccagaaataaaaatccattccaagaggccattgtttttgtggtgggaggaggcaactacattgaatatcagaatcttgttgactacataaaggggaaacaaggcaaacacattttatatggctgcagtgagctttttaatgctacacagttcataaaacagttgtcacaacttggacaaaagtaacacagaagaaccttactatgataatctacttggaatgtggataaatgtaaaaagaagaaaagttagaagagcaatatgtttccttctctgtaacagtgtcctaacagtgaaaatcagagttatttgttaatttttaaggaaattatatacttaatatgtattgattaaaagaaacatttcagaaataaaatttcaacattgtaa

SEQ ID NO: 23579 - DNA, 1332 bp, Homo Sapiens
cccccgccccaccagccatggtggtttctggagcgcccccagccctgggtgggggctgtctcggcaccttcacctccctgctgctgctggcgtcgacagccatcctcaatgcggccaggatacctgttcccccagcctgtgggaagccccagcagctgaaccgggttgtgggcggcgaggacagcactgacagcgagtggccctggatcgtgagcatccagaagaatgggacccaccactgcgcaggttctctgctcaccagccgctgggtgatcactgctgcccactgtttcaaggacaacctgaacaaaccatacctgttctctgtgctgctgggggcctggcagctggggaaccctggctctcggtcccagaaggtgggtgttgcctgggtggagccccaccctgtgtattcctggaaggaaggtgcctgtgcagacattgccctggtgcgtctcgagcgctccatacagttctcagagcgggtcctgcccatctgcctacctgatgcctctatccacctccctccaaacacccactgctggatctcaggctgggggagcatccaagatggagttcccttgccccaccctcagaccctgcagaagctgaaggttcctatcatcgactcggaagtctgcagccatctgtactggcggggagcaggacagggacccatcactgaggacatgctgtgtgccggctacttggagggggagcgggatgcttgtctgggcgactccgggggccccctcatgtgccaggtggacggcgcctggctgctggccggcatcatcagctggggcgagggctgtgccgagcgcaacaggcccggggtctacatcagcctctctgcgcaccgctcctgggtggagaagatcgtgcaaggggtgcagctccgcgggcgcgctcaggggggtggggccctcagggcaccgagccagggctctggggccgccgcgcgctcctagggcgcagcgggacgcggggctcggatctgaaaggcggccagatccacatctggatctggatctgcggcggcctcgggcggtttcccccgccgtaaataggctcatctacctctacctctgggggcccggacggctgctgcggaaaggaaaccccctccccgacccgcccgacggcctcaggccccgcctccaaggcatcaggccccgcccaacggcctcatgtccccgcccccacgacttccggccccgccccgggccccagcgcttttgtgtatataaatgttaatgatttttataggtatttgtaaccctgcccacatatcttatttattcctccaatttcaataaattatttattctc

SEQ ID NO: 23580 - DNA, 3931 bp, Homo Sapiens
attcggctcgagttcacctggtgctgctttgacttcaggctcttccttctgcccagctccgtcccacccagcagcccgcagagaaaggaggcagctggcaccacactgggctttggagacactgcggggactgtggaccccaccctgctgcacggagctcctgcaaaagcaaacctgagaaccttgggtcctcccagcgcccagccatgggggaactgtgccgcagggactccgcactcacggcactggacgaggagacactgtgggagatgatggagagccaccgccacaggatcgtacgctgcatctgccccagccgcctcaccccctacctgcgccaggccaaggtgctgtgccagctggacgaggaggaggtgctgcacagcccccggctcaccaacagcgccatgcgggccgggcacttgctggatttgctgaagactcgagggaagaacggggccatcgccttcctggagagcctgaagttccacaaccctgacgtctacaccctggtcaccgggctgcagcctgatgttgacttcagtaactttagcggtctcatggagacatccaagctgaccgagtgcctggctggggccatcggcagcctgcaggaggagctgaaccaggaaaaggggcagaaggaggtgctgctgcggcggtgccagcagctgcaggagcacctgggcctggccgagacccgtgccgagggcctgcaccagctggaggctgaccacagccgcatgaagcgtgaggttagcgcacacttccatgaggtgctgaggctgaaggacgagatgctcagcctctcgctgcactatagcaatgcgctgcaggagaaggagctggccgcctcacgctgccgcagcctgcaggaggagctgtatctactgaagcaggagctgcagcgagccaacatggtttcctcctgtgagctggaattgcaagagcagtccctgaggacagccagcgaccaggagtccggggatgaggagctgaaccgcctgaaggaggagaatgagaaactgcgctcgctgactttcagcctggcggagaaggacattctggagcagagcctggacgaggcgcgggggagccgacaggagctggtggagcgcatccactcgctgcgggagcgggccgtggctgccgagaggcagcgagagcagtactgggaagagaaggaacagaccctgctgcagttccagaagagtaagatggcctgccaactctacagggagaaggtgaatgcgctgcaggcccaggtgtgcgagctgcagaaggagcgagaccaggcgtactccgcgagggacagtgctcagagggagatttcccagagcctggtggagaaggactccctccgcaggcaggtgttcgagctgacggaccaggtctgcgagctgcgcacacagcttcgccagctgcaggcagagcctccgggtgtgctcaagcaggaagccaggaccagggagccctgtccacgggagaagcagcggctggtgcggatgcatgccatctgccccagagacgacagcgactgcagcctcgtcagctccacagagtctcagctcttgtcggacctgagtgccacgtccagccgcgagctggtggacagcttccgctccagcagccccgcgccccccagccagcagtccctgtacaagcgggtggccgaggacttcggggaagaaccctggtctttcagcagctgcctggagatcccggagggagacccgggagccctgccgggagctaaggcaggcgacccacacctggattatgagctcctagacacggcagaccttccgcagctggaaagcagcctgcagccagtctcccctggaaggcttgatgtctcggagagcggcgtcctcatgcggcggaggccagcccgcaggatcctgagccaggtcaccatgctggcgttccagggggatgcattgctggagcagatcagcgtcatcggcgggaacctcacgggcatcttcatccaccgggtcaccccgggctcggcggcggaccagatggccttgcgcccgggcacccagattgtgatggttgattacgaagcctcagagcccttgttcaaggcagtcctggaggacacgaccctggaggaggccgtggggcttctcaggagggtggacggcttctgctgcctgtctgtgaaggtcaacacggacggttataagaggctactccaggacctggaggccaaagtggcgacctcgggggactcattctacatccgggtcaacctggccatggagggcagggccaaaggggagctgcaggtgcattgcaacgaggtcctgcacgtcaccgacaccatgttccagggctgcggctgctggcatgcccaccgcgtgaactcttacaccatgaaggatactgccgcgcacggcaccatccccaactactccagggctcagcagcagctcatagccctcatccaggacatgactcagcagtgcaccgtgacccgcaagccatcttctgggggaccacagaagctggtccgcatcgtcagtatggacaaagccaaggccagccctctgcgtttgtcctttgacaggggccagttggaccccagcaggatggagggctccagcacgtgcttctgggccgagagctgcctcaccctggtgccctataccctggtgtggccccatcgacccgcccggccccggcctgtgctcctcgtgcccagggcggttgggaagatcctgagcgagaaactgtgcctcctccaagggtttaagaagtgcctggcagagtacttgagccaggaggagtatgaggcctggagccagagaggggacatcatccaggagggagaggtgtccgggggccgctgctgggtgacccgccatgctgtggagtccctcatggaaaagaacacccatgccctcctggacgtccagctggacagtgtctgcaccctgcacaggatggacatcttccccatcgtcatccacgtctctgtcaacgagaagatggcaaagaagctcaagaagggcctacagcggttgggcacctcagaggagcagctcctggaggctgcgaggcaggaggagggagacctggaccgggcgccctgtctatacagcagcctggctcctgacggctggagcgacctggacggcctgctcagctgtgtccgccaggccatcgccgacgagcagaagaaggtggtgtggacggagcagagcccccgatgatgcaccgtgccccttcccgggactgtgggggcttctgtgtgcctgttaatgcagtcctgttcctcagcccaggccctcttggcacagctgtgggctccttggcacatgaggccggctctccccactggctggggtctaaccttgaaccctcaccacgtgcaggtcacacacagtgaagccacttgtaactgcacacttttctgtggaaacatcttcaccctttaccaggcttggcatggtctgaactggaaaccctgagaatgtttctgcagtaggacaggagggacatcttcccatgccttccctagaaccggaggccccggacttctctggaaaaccgcctgtctgcaggcccgattcaaatctatgggggctgcacttcccttttacattttgatgtgtcaaaggcttttggagtgaccaaaagcacagaggcagcgggtggggcgcctgggtggtccccaaggtcgctgccacccttgcccggggcagaggcataagcccacatatgctgtgacgctggccaccttttctcagcttctgaggctgcgatgcctcaggaactccagtttacagagaccagtgtgtttacttgtaaataaagcctctgggtggtggagacggtactttcagtgggtctgtgccccgtggcccctgtgcctgttcggtgggggtgtcccagagaagcctggcaccagtacccccgtcaa

SEQ ID NO: 23581 - DNA, 2210 bp, Homo Sapiens
aggacgcctgggattctgggggaatagggtctgggctctggattttttaggtcctggagagtgacactcaagaaccgaaggggacagggtgaaggactgaggcctgggttccgagtggggcggctaggaaaggaaaaggctaggtgctccctgacccaggtcttctctacccgttgctttccagccatgcctccgccgcagggtgacgtgaccgccttgttcctggggcctccgggcttggggaagtccgcgctgatcgcagcgctgtgcgacaaggatgtggagacgctcgaggcccccgagggacggccggactccggggttcccagcctaagagctgcgggcccaggcctttttctgggcgagctgagctgcccacccgcagcgccggggccctgggcggcggaagccaacgtgctggtactggtgctgcccggacccgaggggaacggggaaccgttggctccagccctgggagaggcagcgctggccgccctggcccgagggaccccgctactggctgtgcggaacctccgtcctggggattcacagactgccgcccaggcccgtgatcagacagcagctctgctgaacagcgcggggttaggagctgcggatctgtttgtgctaccggcgaactgcggcagcagcgacggctgcgaggagctagagcgcctccgggcggcgctgcagagccaggcagaagcgctgcgcaggctcctgccaccggcgcaggatggcttcgaggtgttgggtgcagcagagctagaggctgtgcgtgaggcctttgagaccggcggccttgaggctgcgctgtcgtgggtgcgctcaggcctggagcgcctgggcagcgcacggctagacctggccgtggctggcaaggctgacgtgggccttgtggtggacatgctgcttggattggatcctggcgacccaggcgctgcgcctgcttcggtccccacagcacccactcccttcccagccccagagcgcccgaatgtggtgctctggaccgtgcctctgggccacacgggcactgccaccaccgcggccgccgcctctcacccaacgcactacgacgccctcatcctcgtcacccctggggcccccactgagaaggactgggcccaggtccaggccttgctgctaccagatgcgcctcttgtctgcgtgcgcacagacggcgagggcgaggatccggagtgtctgggagaaggcaagatggagaatcccaagggcgagagcttaaagaacgcaggtggagggggattggagaatgcactcagtaagggaagggagaaatgtagcgctggatcgcagaaagcaggcagcggggaaggtcctgggaaagctggcagcgagggtttgcagcaggttgtcggcatgaagaaatcaggtggtggcgactcagagcgggccgctgcgttaagcccggaggacgagacgtgggaggtgctggaggaggcgccgccgccagtgttccccctacggcctggcggactcccagggctatgcgaatggctgcggcgagcgctccccccagcccaggcaggggcactgctgctggcgttgccaccagcatctcccagcgctgcccgaaccaaggctgcggcgttgcgagccggggcgtggaggccagctctgctggctagtctggcggcggcggcggcaccactcccagggctgggctgggcatgcgacgtggcacttctgcggggtcagctggcggagtggcgacggggcctggggctggaacccacggcactggctcgacgtgagcgtgccctgggcctggcttctggagagctggcagcgcgcgctcatttcccaggcccggtgacgcgcgccgaggtggaagcaagactgggcgcctgggcgggcgagggcactgctgggggcgcagcactgggggctctctccttcctgtggcctgcgggtggtgcagcggcgacaggtggcctgggctaccgagcggctcacggcgtcctgctgcaggctctcgatgagatgcgggctgatgctgaggctgtgctggcaccccctgagcctgcccagtgaggagtgggagggggcttgggagtccagactctgacaggggatgcctgggcttaatcctgggtgcttgaaggggatgtggactcttgacttccagctgggatgtgtgacttcttatcacctggattcagagagtctgggggacaggaatcctg

SEQ ID NO: 23582 - DNA, 1131 bp, Homo Sapiens
atggcccggctgtggggcgcgctgagtctttggccactgtgggcggccgtgccgtggggcggggcggcagccgtcggtgtccgggcttgcagctccacggccgccccggacggcgtcgagggcccggcgctgcggcgctcctattggcgccacctgaggcgtctggtgctgggtcctcccgaaccgccgttctcgcacgtgtgccaagtcggggacccggtgctgcgcggcgtggcggccccggtggagcgggcgcagctaggcgggcccgagctgcagcggctgacgcaacggctggtccaggtgatgcggcggcggcgctgcgtgggcctaagcgcgccgcagctgggggtgccgcggcaggtgctggcgctggagctccccgaggcgctgtgtcgggagtgcccgccccgccagcgcgcgctccgccaaatggagcccttccccctgcgcgtgttcgtgaaccccagcctgcgagtgcttgacagccgcctggtcacctttcccgagggctgcgagagcgtcgccggcttcctggcctgcgtgccccgcttccaggcggtgcagatctcagggctggaccccaatggagaacaggtggtgtggcaggcgagcgggtgggcagcccgcatcatccagcacgagatggaccacctgcagggctgcctgtttattgacaaaatggacagcaggacgttcacaaacgtctattggatgaaggtgaatgactaaagctttgctactggggctgaggattccggataccaagacgcaaacactttcactttgagctgggcaaatcttacttggcatcaacttggatggctcgcatatgacaggaaactggattgccaaggcatggcagactgagctggaggaagatgtcagaaatgtttgccctgaaatcagttacggacaaaatgttggctacaacttgaggagaaaaatcacccccaaaggagtggacatttcctaacaattctgtatggaggaaggtggggtaattgcattcgtctgcagtagacacgagttcctcggacctgtataatctcccaaagccaaggtttggtaataatgtagtccccaaatacctgaaagctgtctttaaaaatgcaggtaagcatgtgaaaa

SEQ ID NO: 23583 - DNA, 4428 bp, Homo Sapiens
gcactccgcagcctttaaggttcgcgcgggggccaggcaagagttagccatgaagagcctcaagtcccgcctgaggaggcaggacgtgcccggccccgcgtcgtctggcgccgccgccgccagcgcgcatgcagcagattggaataaatatgatgaccgattgatgaaagcagcagaaaggggggatgtagaaaaagtgacctcaatccttgctaaaaagggggtcaatccaggcaaactagatgtggaaggcagatctgtcttccatgttgtgacctcaaaggggaatcttgagtgtttgaatgccatccttatacatggagttgatattacaaccagtgacactgcagggagaaatgctcttcacctggctgctaagtatggacatgcattgtgcctacaaaaacttctacagtacaattgtcccactgagcatgcagacctgcagggaagaactgcacttcaaaaaaaagcaatggcagattgtccttctagcatacagctgctttgtgaccatggggcctctgtgaatgccaaagatgtaaaagggcggacaccacttgttctggctactcagatgagtaggccaacaatatgtcaactgctgatagatagaggagcggatgttaattccagagacaaacaaaacagaactgccctcatgctaggttgcgaatatggttgcagagatgcagtagaagtcttaattaaaaatggtgctgatataagcttgctggatgcgcttggccatgatagttcttactatgcaagaattggtgacaatctggacattctaaccttgttgaagactgcatcggaaaataccaacaaagggagagaactttggaagaaaggaccatctttgcaacagcgaaatttgacacacatgcaagatgaagtaaatgtgaagtcacatcagagggagcatcaaaatattcaggatttggagattgaaaatgaagatttgaaagagaggttgagaaaaattcagcaagaacaaagaatacttttggataaagtcaatggtttacagttacagctgaatgaggaagttatggttgctgatgatctggaaagcgagagagaaaagctgaagtcccttttggcagctaaagaaaagcaacatgaagaaagcttaaggactattgaggctctgaaaaatagatttaaatattttgagagtgatcatttaggatcaggaagtcatttcagtaaccgaaaagaagatatgcttcttaaacaaggtcagatgtatatggcagactcacagtgtacttccccaggtataccagcccatatgcaaagcagatctatgttaagacctctggaactatctttacccagtcaaacgtcatactctgaaaatgaaattttaaagaaagagttagaagcaatgcgaactttctgtgagtcagcaaaacaagaccgactgaagctccaaaatgaactggcacacaaagtggcagaatgcaaagctttagcattagaatgtgaaagggtcaaggaggattcagatgaacagataaagcaattagaagatgcattaaaagatgtgcagaagaggatgtatgagtcagaaggtaaagttaaacaaatgcagacccattttcttgcccttaaagaacacttaacaagtgaagcagcctcagggaatcacagactaaccgaggaactgaaggatcagttgaaagacttgaaagtaaaatatgaaggtgcttcagcagaagtggggaaattaagaaaccaaatcaaacaaaatgagatgatagtagaagagtttaagagggatgaaggcaagctgatagaagaaaataagcgattacagaaggaacttagtatgtgtgaaatggagcgagagaagaaaggaagaaaggtcacagagatggaaggccaggcaaaagaattgtcagcgaagttggccctttccattccagctgaaaaatttgaaaacatgaagagctcattatcaaatgaagtgaatgagaaagcaaaaaaattagtagaaatggaaagagaacatgaaaaatcacttagtgaaattagacagttaaagagagaacttgagaatgttaaggccaagcttgctcagcacgtcaaaccagaggaacatgaacaggttaagagcagattagaacagaaatcaggagaacttgggaagaagatcactgagttaacattgaaaaatcagacactacaaaaggaaattgaaaaagtttatttggataataagctcctcaaggagcaagcacataacttaacaattgaaatgaaaaatcattatgttcctttaaaagtaagtgaagacatgaaaaagtcacatgatgcaattattgatgatcttaatagaaagcttttagatgtaacacaaaaatatacagaaaagaagttggaaatggagaaattgctactggaaaatgacagcttaagtaaggatgtaagccgcctagaaactgtgtttgtacctcctgagaaacatgaaaaagagataatagctctgaaatccaatattgttgaacttaagaaacagctgtctgaacttaagaaaaaatgtggtgaagaccaggagaaaatacacgctctcacatctgaaaacactaacttgaagaagatgatgagtaatcagtatgtgccagttaaaacccatgaagaggttaaaatgacactgaatgacacgttagccaaaactaacagagaattattagatgtgaagaaaaaatttgaagatataaatcaggaatttgtaaaaataaaagataagaatgaaatattaaaaagaaacctggaaaacactcagaaccaaataaaagctgagtacatcagcctggcagagcacgaggcaaagatgagctcgctaagtcagagcatgagaaaggtgcaggatagtaatgctgaaatcttggccaactacagaaaaggccaagaagagattgtgacactgcatgccgaaattaaagcccagaagaaggagctcgacacaatacaagaatgcattaaggtaaaatatgccccaattgtcagctttgaggagtgcgagagaaaatttaaagcaacagagaaagaactaaaagaccagttatcagagcagacacaaaagtatagtgtcagtgaagaagaagtcaagaaaaacaagcaagagaatgacaagttaaagaaggagatttttacccttcagaaagatttgagagataagacagttctcattgagaagtctcatgaaatggaaagagcattaagcagaaaaacagacgagctaaacaaacagttaaaagacttgtcacagaaatacacggaagtaaagaatgtgaaagagaagctagtagaagaaaatgccaaacagacttctgagatacttgcagtgcaaaatcttttgcaaaaacaacatgttccattggaacaggttgaggctctgaaaaaatctcttaatggcacaattgaaaatctaaaggaagaactgaagagtatgcaaaggtgttacgagaaagagcagcagacagtgaccaaactgcatcaattgttggagaatcaaaagaactcttctgtacccctggcagagcatttgcagattaaagaagcatttgagaaagaagttggaatcataaaagccagcttgagagaaaaggaagaagaaagccaaaacaaaatggaagaagtctccaaacttcagtcggaggttcagaatactaaacaagcattaaaaaaattagagactagagaggtagttgacttgtctaaatataaagcaacaaaaagtgatttggagacacagatttctagcttaaatgaaaaattggccaatctgaatagaaagtatgaggaagtatgtgaggaagttttgcatgccaaaaagaaggaaatatctgcaaaagatgagaaggaattactgcatttcagcattgagcaagaaattaaggatcagaaggaacgatgtgataagtccttaacaacaatcacagagttacaaagaagaatacaagaatctgctaaacaaatagaagcaaaagataataagataactgaactgcttaatgatgtggaaagattaaaacaggcactcaatggcctttcccaactcacctacacaagtgggaaccccaccaagaggcagagccagctgattgacactctgcagcaccaagtgaaatctctggagcaacagctggccgatgctgacagacagcaccaagaagtaattgcaatttatcggacacaccttcttagtgctgcacagggtcacatggatgaagatgttcaggaggctctgctccagatcatacaaatgcggcaggggcttgtgtgctagccgttagcactgactgccagtatctgttttatcttgctggtgctgaacattctttgtgcaactccatggtctttctgggccttactgtgctggtataattaaaataaaatatattttgttctgggtgt

SEQ ID NO: 23584 - DNA, 1932 bp, Homo Sapiens
atgggagaaccaaatcgtcatccaagcatgtttctcttacttttggtgttggagagactctacgcttccccgatggatggtacttcttctgctctcagcatgggaccttttgttcccttcattatgaggtgtggtcactcacctgtctaccactcccgtgaaatggcagctcgtgccttggtcccatttgttatgatagatcacattcctaataccattcgaactctgttgtccacactccccagctgcactgaccagtgtttccggcaaaaccacattcatgggacacttctccaggtttttcatttgttgcaagcctactcagactccaaacacggaacgaattcagacttccagcacgagctgactgacatcactgtttgtaccaaagccaaactctggctggccaagaggcaaaatccatgtttggtgaccagagctgtatatattgatattctcttcctattgacttgctgcctcaacagatctgcaaaggacaaccagccagttctggagagtcttggcttctgggaggaagtcagagggattatctcaggatcagagctgataacgggattcccttgggccttcaaggtgccaggcctgccccagtacctccagagcctcaccagactagccattgctgcagtgtgggccgcggcagccaagagtggagagcgggagacgaatgtccccatctctttctctcagctgttagaatctgccttccctgaagtgcgctcactaacactggaagccctcttggaaaagttcttagcagcagcctctggacttggagagaagggcgtgccacccttgctgtgcaacatgggagagaagttcttattgttggccatgaaggaaaatcacccagaatgcttctgcaagatactgaaaattctccactgcatggaccctggtgagtggcttccccagacggagcactgtgtccatctgaccccaaaggagttcttgatctggacgatggatattgcttccaatgaaagatctgaaattcagagtgtagctctgagacttgcttccaaagtcatttcccaccacatgcagacatgtgtggagaacagggaattgatagctgctgagctgaagcagtgggttcagctggtcatcttgtcatgtgaagaccatcttcctacagagtctaggctggccgtcgttgaagtcctcaccagtactacaccacttttcctcaccaacccccatcctattcttgagttgcaggatacacttgctctctggaagtgtgtccttacccttctgcagagtgaggagcaagctgttagagatgcagccacggaaaccgtgacaactgccatgtcacaagaaaatacctgccagtcaacagagtttgccttctgccaggtggatgcctccatcgctctggccctggccctggccgtcctgtgtgatctgctccagcagtgggaccagttggcccctggactgcccatcctgctgggatggctgttgggagagagtgatgacctcgtggcctgtgtggagagcatgcatcaggtggaagaagactacctgtttgaaaaagcagaagtcaacttttgggccgagaccctgatctttgtgaaatacctctgcaagcacctcttctgtctcctctcaaagtccggctggcgtcccccaagccctgagatgctctgtcaccttcaaaggatggtgtcagagcagtgccacctcctgtctcagttcttcagagagcttccaccagctgctgagtttgtgaagacagtggagttcacaagactacgcattcaagaggaaaggactttggcttgcttgaggctgctggcctttttggaaggaaaggaaggggaagacaccctagttctcagtgtttgggactcttatgcagaatcgaggcagttaactcttccaagaacagaagcggcatgttga

SEQ ID NO: 23585 - DNA, 4486 bp, Homo Sapiens
cggccagcccctccccctcccgctgcacgcggcccgcgcccccaattcgcccgccgctgcacccggccacggccccccggcccacgcccggctccgggaggaaaaggccccgcccctatctgttggagccgcgaccccgcccccttcccgcccctccgaggctccatccaatagtgagcgtggctgggcgggacgccgaggctgtcgtgagggggtcctgaccaatggggaagcgtgccgggcctggtgggcggggcggcaaggccttgtcacgctcgggtccgtgtgaaaacgggggttccgagtgcaaagcaaagtttttttgtaaaccgtctgcaaaggcgggggggcgaagaaggcgcccgagaccgggccgagtgcagctgccgtggccgccgcctctctagctcctcagccatccgctcctcagtccagccgccgcagaggagaccagcaagcagagccctcagatgctcggagctttctcggcgcgaagctgcccgtcgccctctcctgccgccctcgcccgccgccctcctgctcctgctccggctgcggctcttggtaccccggctccgggagcccagctccccgccaccgccgccgcctgggtgtgggggctgctgaggctgagccgggcctcggcgccggctctgaggacggacgcctgaggagctgcgcggcgcggcgccgccggctggcggagaacgcccacaggcgcggggctcggcggcttgacccgggcttgtccccgtgcggccgcgggggcccctcagcggtttcccgaacggcccgactcgggcgctcctccgtgtcgcggtcgccgaccctccgcgtcccgccaacgccgccgctgcaccagtctccgggccgggctcggcgggccccgcaaccacagccatggggtgttggggtcggaaccggggccggctgctgtgcatgctggcgctgaccttcatgttcatggtgctggaggtggtggtgagccgggtgacctcgtcgctggcgatgctctccgactccttccacatgctgtcggacgtgctggcgctggtggtggcgctggtggccgagcgcttcgcccggcggacccacgccacccagaagaacacgttcggctggatccgagccgaggtaatgggggctctggtgaacgccatcttcctgactggcctctgtttcgccatcctgctggaggccatcgagcgcttcatcgagccgcacgagatgcagcagccgctggtggtccttggggtcggcgtggccgggctgctggtcaacgtgctggggctctgcctcttccaccatcacagcggcttcagccaggactccggccacggccactcgcacgggggtcacggccacggccacggcctccccaaggggcctcgcgttaagagcacccgccccgggagcagcgacatcaacgtggccccgggcgagcagggtcccgaccaggaggagaccaacaccctggtggccaataccagcaactccaacgggctgaaattggaccccgcaggtgagccgggaaagtcgctgccgcaggtggttgggtttggggtgcccagagcctcgcctggccttcggcggggtggcccgcacgccccctgctgcccgagcgggcctgcgccgcgccgcccctgcctgctccctccccgtcctgcacacgccccgctgctgctccaggaaatcagaaccccctcagtcgggtgcaaggagccggcgacgcgtctggcatatttgtaggtgggggctgtgggtcagaccctaagaaaaagggtcaggaggtgatcatcatcccgctgcagtccacacccgcacttggctgtctttacaggctgcagcaactttgctggagacttgtctggttatggttataacagcgtcagaaatgcttcccaattcaattccttggccctcttgggaaacggagagaatccccaattcgtccccagtagttgggtgctggaaaccttgctctgccaaagtagttcttatgcccattgaactccgtttcataatatgcattcagagcgtgtaaaccctggttaaaggtttcttttatgaacagcagtgtatgcttcagctaattgatccctaatcctggaaatcatagatttaggacctgtctgggcatgtttaacattttcccaggacttttcataatcgtactgaactaaaagtgatggtaatttattcatcttatatttttagtggatgctttttatatttaacattaagtgctcttgaaggaaatttgaaaataaatgttgaaagaaaggagatggaaatgactcaaccagtgtcctactacccaagctcaatggtgcttaacaatttggtcttatttccttcacttacgtttatttaccttgtatcattataaattatgctacataattttccttttcgagtgcagaatatgaagttagtgaaattcaagttgtacattggaaaggtttaataagtaattggttttcctctcactccactcggcaaggtgttattccaaagaaaattaagtttctctggtgtgtaatttcaaaagatcaatactttttatctttttgaatacttttgatcaatactttttgaaaagatcaatacttttgatttaaaagttagtagggcaggtagtcatttagtttcaatttttctaataatctctgtgattattgatttttattgttgatttgtcagtttttaaacccccctaccaagaaacttttatattcataataaaagtttaaaagttaaaattggttttattctcaagcaattggcctcagtgacaaagagtgactagagagtgcccgagtgtcaaatcaggtattttgtattagtagacttattcctagctgcatttaattttggtgttagcattcaattttatgttttcctttgtatataccataaagtatagcagaatggttgcaggactccacccccatagaaaatatacactattttggagaggaggaggcaggagagtggttaggagggtgaagaagcagtatcacaatgacttaatttagccctggctattatgtcctggctcattcccagaatgtcaatttatattaaattgctctgagcacatttttttaattgtactttctgaaaaaattttcaccttcatcaccacttaaaaagaattagacaaggatgtttatataaacactttaaatgtatttgatataaaatttttatttctttgtagacccagaaaaccccagaagtggtgatacagtggaagtacaagtgaatggaaatcttgtcagagaacctgaccatatggaactggaagaagatagggctggacaacttaacatgcgtggagtttttctgcatgtccttggagatgccttgggttcagtgattgtagtagtaaatgccttagtcttttacttttcttggaaaggttgttctgaaggggatttttgtgtgaatccatgtttccctgacccctgcaaagcatttgtagaaataattaatagtactcatgcatcagtttatgaggctggtccttgctgggtgctatatttagatccaactctttgtgttgtaatggtttgtatacttctttacacaacctatccattacttaaggaatctgctcttattcttctacaaactgttcctaaacaaattgatatcagaaatttgataaaagaacttcgaaatgttgaaggagttgaggaagttcatgaattacatgtttggcaacttgctggaagcagaatcattgccactgttcacataaaatgtgaagatccaacatcatacatggaggtggctaaaaccattaaagacgtttttcataatcacggaattcacgctactaccattcagcctgaatttgctagtgtaggctctaaatcaagtgtagttccgtgtgaacttgcctgcagaacccagtgtgctttgaagcaatgttgtgggacactaccacaagccccttctggaaaggatgcagaaaagaccccagcagttagcatttcttgtttagaacttagtaacaatctagagaagaagcccaggaggactaaagctgaaaacatccctgctgttgtgatagagattaaaaacatgccaaacaaacaacctgaatcatctttgtgagtcttggtgagtcttgaaaaagatgtgatatttgacttttgctttaaactgcaagaggaaaaagactccactgaaattctaagtttgccaagtagtgtaattgaagtccttgtctggtcacacagtttaattctatttttgtaagaacataatgggactgcataacagagttctatattacaattttgtgattattagtacagagtacagctatgctgtgactgttttggaaagccagttttaacactatgttacatttttgtttaaagtaagttaaaccttatataacataatgacatttgatttctggatttttcccatgataaaaattagggggataaataaaattgttactggaatt

SEQ ID NO: 23586 - DNA, 4089 bp, Homo Sapiens
ccgtggtcccggcgccgggtcccggagacagacgttacgcgggctcgagcgtcctcggggagtgccagccagagttggtgacgaccacttcctcgacgtggggcgggcggacgggaagcctggggtcgtggccaccgcctcgggagctctgggagcccgggtgaccgcgtagaaatgaacacagaagcggagcaacagcttctccatcacgccagaaatggcaatgctgaagaagtaagacaactattagagaccatggcgaggaatgaagtgattgctgacattaattgcaaaggaagaagtaagtctaacttgggctggacacctctacatctggcatgctattttggacacagacaagtggtccaggatctgttgaaggctggtgcagaagtgaatgtgttgaatgacatgggagacacgccgcttcatcgagctgcctttacaggacgaaaggagttggtaatgcttctcttagaatataatgctgatactactattgttaatgggagtggacagacagcaaaagaagttactcatgctgaagaaatcagaagcatgcttgaagctgtagaaaggactcaacaaagaaagcttgaagaattacttttagcagcagcaagagaaggcaaaacaacagaactcacagctctgctcaacaggcccaatcctcctgatgttaactgttcggatcagttaggaaatacacccttgcattgtgcagcttaccgggcccataaacaatgtgccttaaagcttctaagaagtggagcagaccctaatctgaagaacaaaaatgatcagaaacctcttgaccttgcccagggtgctgaaatgaaacacattcttgttggtaataaggtcatctacaaagcattgaaacgatatgagggccctctctggaagagttcaagattttttggctggagattattctgggtagtgttagagcatggagtcctttcatggtataggaaacagcctgatgcagttcataatatttatcgccagggatgcaaacacctgactcaagcagtatgcacggtaaaatccactgatagctgcctcttctttattaaatgctttgatgacaccattcatggcttccgggttcctaagaatagccttcagcagtcaagagaggactggctggaagcaatagaagaacattctgcttacagcactcactactgttcccaggaccagctgactgatgaggaggaggaagatacggtttccgctgcagacctgaagaaatcattagagaaagcacagtcatgccaacagcgactagatagggaaatttccaactttctcaaaatgattaaggagtgtgacatggctaaagaaatgcttccatcatttcttcagaaagttgaagttgtctcagaagcttctagagaaacttgtgtagctttgactgattgccttaatctcttcaccaaacaagaaggggtgaggaattttaaattggaacaagagcaagaaaaaaacaaaatcttgtcagaagcactggagacgctggccactgaacatcatgaattagagcagtctctggtgaaaggctctccacccgccagcatccttagcgaggacgagttctatgatgcgctgtcagattccgagtccgaaaggtccctgagtagattggaagcagtgacagcacgctcctttgaagaggaaggagagcatttgggcagtagaaaacacagaatgtccgaagaaaaagactgtggtggcggagatgctctctccaatggcatcaagaaacacagaacaagtttgccttctcctatgttttccagaaatgacttcagtatctggagcatcctcagaaaatgtattggaatggaactatccaagatcacgatgccagttatatttaatgagcctctgagcttcctacagcgcctaactgaatacatggagcatacttacctcatccacaaggccagttcactctctgatcctgtggaaaggatgcagtgtgtagctgcgtttgctgtatctgctgttgcttctcagtgggaacggactggaaaacctttggtcagccatcacccaccaatcagtgcatttcatgctgaaggattaaacaatgacttcatctttcatggctctatctatcccaaactgaaattctgggggaagagtgtagaagcagaacccaaaggaaccatcaccttggagctccttgaacacaatgaggcatatacatggacaaatcccacctgctgtgtgcataatatcattgtgggtaaactgtggatcgaacagtatggcaatgtggaaattataaaccacaagactggggacaaatgtgtgttgaattttaagccatgtggcctttttggtaaggaattacacaaagttgaaggctacattcaagataaaagcaaaaagaagctctgtgccctctatgggaagtggactgaatgtttatacagtgttgaccctgccacgtttgacgcttacaaaaaaaatgataagaaaaatacagaagagaagaagaacagcaaacagatgagcacctctgaggagttggatgaaatgccagtgccggattctgaaagtgtattcattatccctggaagcgttcttctatggcgaatagccccacggcctccaaattctgcccagatgtataattttactagttttgcaatggttttgaatgaagtagacaaagacatggagagtgtgattcccaagacagactgcaggttacggcctgacatcagagccatggaaaatggagagatagatcaagctagtgaagaaaaaaaacgacttgaggaaaaacaaagagcagcccgcaaaaacaggtccaagtcagaagaggactggaagacgaggtggttccatcaaggtcctaatccctacaatggagcacaggactggatttactctggcagctactgggacagaaattacttcaatttgcctgacatttattaaaatgcatacaagtcagggtgtttggctaatctacaaataagtcttaaacctatgtttttaaatttttttcccttggtttctacttatcttttaaaaaaaaaatgaaaaaacactcatgagataactgcatttcacccaacaaaagcagggtataaggcgatattggtgatgaaagtcttaggaaaaatgcataattttgctataaaatgtacttatttggaatactattttatatagaggtaagagaacactgctggggaatatgctttttatggttgctgttgccatatttactgaaggtttatacctaaatgtaactttagctttatggaactatatagtaatcccaaatcaagttattttgaatatttttatgctgtcatgcttgaatgttttagatgtaacctttgacatatttagaactctcctcctatacaatgtttattctcagatatagaggttatgtcattttataaagacttcattgataagatggcttttattcatactaatcctcccaatgttacccccttccatcttccaagaagaaaaaaatgcctgaatattcagaatagatatttctgatttgaaattctaagattaactggaaagtatttcattacttagtgctctgaatttacttttacagtttttctgcagtcagtatcattaaaatggttaagtttcacatttgaactgaaaatatgtataaaatctagcaattcacaaaaatgccctagaaatatagattttaatcaccattacataatgacaaaccttgttaaatgcttcacttccatgggcaaatgccactagggaaagtaagttgcactcatgtaagtatcaaactatataaaaggaggccttgtgcatttcaagtttgcaaagtacctgtgtacttaaaatatgtgtggagacctactgtacagtagttttgcccctttaattggggcacattcatcttaaatcttatagtatttatccacccaaaccccagactgagatactgctccagggcctaggtagctgccagtccgtgattttaattgctgtcttgaagttaacaagtgttataatgaaataatctacctgatgctaaataaaggctttagaatgttccccaaaaaaaaa

SEQ ID NO: 23587 - DNA, 2886 bp, Homo Sapiens
gcccccgcctcgcgccgcgcgcacgtgactgcgcccccggccccgcccccggcctgccccccgcccccactggccgctcggccgcgcgcgggtcggccggctctatggggaaagcggcggctccgagccgaggcggcggctgtggcggccgctcccgcgggctctcgtcgctgttcacggttgtcccctgcctgtcgtgccacacggcggcgccgggcatgagcgcttccacgtccggctccgggccggagcccaagccccagccccagcccgtgcccgaaccggagcggggaccgctgtcagaacaggtgtcggaggcagtttcggaggcagtgccaagatcggaacctgtgtccgagacgacgtctgagccggagccaggggctgggcagccatcggaactgctgcaggggtcgcggccggggtcagagtcaagctcaggtgtaggggctgggcccttcactaaggccgcatcggagccgctctcccgggcggtggggagcgcgacctttctcagacccgagtcaggatcgctgccagcgttaaagcccctgcctcttctgcgaccaggacaggcgaagactcctcttggggttccaatgtcggggactggcacgacctccagtgccccactggccttactgcctctggacagcttcgagggctggcttctcaagtggaccaactatctgaagggctaccagcgccgctggttcgtgctgggcaatggtttgctctcttactacagaaatcagggtgaaatggcccacacgtgccgtggaaccatcaacctgtccaccgcgcacattgacacggaggactcttgtggtatcttgctgaccagtggggccaggagctaccacctcaaggccagctcagaggtggaccggcagcagtggatcaccgccctggagctggccaaggccaaggctgtccgcgtgatgaacactcattcagatgactctggggacgacgacgaggctaccaccccagccgacaagagcgagctgcaccacaccctgaagaatctttccctgaagttagatgacctcagcacgtgcaatgacctcatcgccaagcacggcgctgcactccagcgctccctgacagagctggacggcctcaagatcccatctgagagtggggagaagctgaaggtggtgaatgagcgggccaccctcttccgcatcacatccaatgctatgatcaacgcctgcagggacttcttggaactagcagagatacacagtcggaaatggcagcgggcactgcagtatgagcaggagcagcgcgtgcacttggaggaaaccattgagcagctggcgaagcagcacaacagcctcgagcgggccttccacagtgcccctggccggccggccaacccctccaagagcttcattgagggaagcctcttgactcccaaaggagaggacagtgaggaagatgaagataccgagtactttgatgccatggaagactccacatccttcatcaccgtgatcaccgaggccaaggaagacagcagaaaagctgaaggtagcaccgggacaagttccgtggactggagctcagcagacaatgtactagatggtgcctcgctcgtgcccaagggttcatccaaagtcaagaggcgagtccgcattcccaacaagcccaactacagccttaacctctggagcatcatgaagaactgcatcggccgggagctctccaggatccccatgccggtgaacttcaatgagcccctgtccatgctccagcggctgacagaggacctggagtaccaccacctgctggacaaggcagtgcactgcaccagctcagtggagcagatgtgcctggtggccgccttctctgtgtcctcctactccaccacagtgcaccgcatcgccaagcccttcaaccccatgctgggggagaccttcgagctggaccgcctcgacgacatgggcctgcgctccctctgtgagcaggtgagccaccaccccccctcagctgcgcactacgtgttctccaagcatggctggagcctctggcaggagatcaccatctccagcaagttccggggaaaatacatctccatcatgccgctaggtgccatccacttagaattccaggccagtgggaatcactacgtgtggaggaagagcacctcaactgttcacaacatcatcgtgggcaagctctggatcgaccagtcaggggacatcgagattgtgaaccataagaccaatgaccggtgccagctgaagttcctgccctacagctacttctccaaagaggcagcccggaaggtgacaggagtggtgagtgacagccagggcaaggcccattacgtgctgtccggctcgtgggatgaacaaatggagtgctccaaggtcatgcatagcagtcccagcagccccagctctgacgggaagcagaagacagtgtaccagaccctgtcagccaagctgctgtggaagaagtacccgctgccggagaacgcggagaacatgtactacttctcagagctggccctgaccctcaacgagcacgaggagggcgtagcgccaaccgacagccgcctgcggcccgaccagcggctgatggagaagggccgttgggacgaggccaataccgagaagcagcggctggaggagaagcagcgcctgtcgcggcgccggcggctggaggcctgcgggccgggcagcagctgcagctcggaggaagagaaggaggcggatgcctacacgccactgtggtttgagaagaggctggatccgctgaccggggagatggcctgtgtgtacaagggcggctactgggaggccaaggagaagcaagactggcatatgtgccccaacatcttctgagcgccacccttgcaacaaatacaggcgcctg

SEQ ID NO: 23588 - DNA, 1783 bp, Homo Sapiens
cggcgggtcacgtgagcggaaaatggcggccccggcaggcggcggaggctccgcggtgtcggtgctggccccgaacggccggcgccacacggtgaaggtgacgccgagcaccgtgctgcttcaggttctggaggacacgtgccggcggcaggacttcaacccctgtgaatatgatctgaagtttcagaggagcgtgctcgacctttctctccagtggagatttgccaacctgcccaacaatgccaagctggagatggtgcccgcttcccggagccgtgaggggcctgagaacatggttcgcatcgctttgcagctggacgatggctcgaggttgcaggactctttctgttcaggccagaccctctgggagcttctcagccattttccacagatcagggagtgcctgcagcaccccggcggggccaccccagtctgcgtgtacacgagggatgaggtgacgggtgaagctgccctgcggggcacgacgctgcagtcgctgggcctgaccgggggcagcgccaccatcaggtttgtcatgaagtgctacgaccccgtgggcaagaccccaggaagcctgggctcgtcagcgtcggctggccaggcagccgccagcgctccacttcccttggaatctggggagctcagccgcggcgacttgagccgtccggaggacgcggacacctcagggccctgctgcgagcacactcaggagaagcagagcacaagggcacccgcagctgccccctttgttcctttctcgggtgggggacagagactggggggccctcctgggcccacgaggcctctgacatcatcttcagctaagttgccgaagtccctctccagccctggaggcccctccaagccaaagaagtccaagtcgggccaggatccccagcaggagcaggagcaggagcgggagcgggatccccagcaggagcaggagcgggagcggcccgtggaccgggagcccgtggaccgggagccggtggtgtgccaccccgacctggaggagcggctgcaggcctggccagcggagctgcctgatgagttctttgagctgacggtggacgacgtgagaagacgcttggcccagctcaagagtgagcggaagcgcctggaagaagcccccttggtgaccaaggccttcagggaggcgcagataaaggagaagctggagcgctacccaaaggtggctctgagggtcctgttccccgaccgctacgtcctacagggcttcttccgccccagcgagacagtgggggacttgcgagacttcgtgaggagccacctggggaaccccgagctgtcattttacctgttcatcacccctccaaaaacagtcctggacgaccacacgcagaccctctttcaggcgaacctcttcccggccgctctggtgcacttgggagccgaggagccggcaggtgtctacctggagcctggcctgctggagcatgccatctccccatctgcggccgacgtgctggtggccaggtacatgtccagggccgccgggtccccttccccattgccagcccctgaccctgcacctaagtctgagccagctgctgaggagggggcgctggtcccccctgagcccatcccagggacggcccagcccgtgaagaggagcctgggcaaggtgcccaagtggctgaagctgccggccagcaagaggtgagagctgccagcctgaggtgcccactccgccagccacaggaccacctcctctgccagcaggaataaagacttgtgcatccctcaaaaaaaaaaaaaaaaa

SEQ ID NO: 23589 - DNA, 2098 bp, Homo Sapiens
atgacgacctccgcactccggcgccaggtgaagaacatcgtgcacaactactccgaggcagaaatcaaggtgcgcgaggccaccagcaatgacccctggggcccccctagttcgctcatgtccgagatcgctgacctgaccttcaacacagtggccttcaccgaagtcatgggcatgctgtggcggcggctcaatgacagcggcaagaactggcggcacgtgtacaaggctctaacattgctggactacctgctcaagacgggctccgagcgggtggcccaccagtgccgcgagaacctctacaccatccagacactcaaggacttccagtacatcgaccgcgacggcaaggaccagggcgtcaacgtgcgcgagaaggtcaagcaggtgatggccctgctcaaggatgaggagcggctgcggcaggagcgaacccacgccctcaagaccaaggagcgcatggcactggagggcatcggcattggcagtgggcagctgggcttcagccgccgctacggcgaggactacagccgctcccggggctccccgtcctcctacaactcctcctcttcgtcaccccgctatacctccgacctggagcaggcccggcctcagacgtcaggggaagaggaactgcagctgcagctggccctcgccatgagccgtgaggaggcagagaagcctgtccccccagcctcccacagggacgaggacctgcagctgcagctggctctgcgcctgagccggcaggagcacgagaaggaggtgaggtcctggcagggtgatggctcccccatggccaatggtgcaggggccgtggtccaccatcagcgggacagagagcctgagagagaagagagaaaggaggaggagaagctaaaaaccagccagtcctccatcctggacttggctgacatcttcgtacctgccctggccccgccctccacacactgctctgctgacccatgggacatcccaggttttaggccgaacacagaggccagtggatcctcctgggggccttctgcagacccctggtctccgatcccctcaggaaccgtcctgtcccgaagccagccctgggatctgactcccatgctctcctcctctgagccctggggcaggaccccagtgctgcctgctgggccccccaccacagacccctgggccctgaactctccccaccacaaactccccagcactggggctgacccttggggagcctccctggagacctccgacacacctggtggtgcctcgacctttgacccatttgccaaacctccagaatccacagagaccaaggaggggctggagcaggccctgccctctgggaagcccagcagccctgtggagctggacctgtttggagaccccagccccagttccaagcaaaatggcacgaaggagccagatgccctggacctgggcatactaggggaagcactaacccagccaagcaaagaggcccgagcttgccggactcccgagtccttcctgggtccctcagcttcctccttggtcaaccttgactcgttggtcaaggcaccccaggttgcaaagacccggaaccccttcctgacaggtctcagcgctccgtcccccaccaacccgttcggcgcgggcgagccgggcaggccgacgctaaaccagatgcgcaccggctcgccggcgctgggcctggcaggcgggcctgtgggggcgcccctgggctccatgacctacagcgcctctctgcccctcccgctcagcagcgtgccagctggcttgaccctccccgcctcggttagcgtcttcccgcaggccggagccttcgcaccgcagccgctgctgcccacgccgagctcagccgggccgcggcccccgcccccgcagaccggcaccaaccccttcctctgagccccgccccgtcccataccggcctgcgcctgcgccggacgctccgcggccccgcctccggacccggggctgggcggggcgccggtgctagtggaacgccgagccagtggcggctggtatcccgcggcggctctggaagctggacgcggaccacggcccgggagctagaaactgaacgcccgcataataaagactggaa

SEQ ID NO: 23590 - DNA, 11102 bp, Homo Sapiens
ggcgggaggagtaaagatggcggcgcgagggtctccgccctctgctccgggctgaagcgctctgagagaggcggcagcggcaactcgagccccaacagtaatttagtgttggtagttttggcagcagctgccgaggccggagcaatggcggaactggagcacctaggagggaagcgggcagagtcggcgcgaatgcggcgggcagagcagcttcggcgctggcggggctcgctgacagagcaggagcctgcggagcgacgaggcgcggggcggcagccgctgaccaggcgcgggagccccagggtccgcttcgaggacggtgctgtctttctggccgcctgctctagcggggacaccgacgaggtgagaaagcttctggcaagaggtgctgatatcaacacggtcaacgtggacggcttgacagccctgcaccaggcatgtattgatgaaaatttggacatggtgaagtttctggtggagaacagagccaatgtaaaccagcaagacaacgagggctggacaccccttcatgcagcagcttcctgtggctatctcaacatagcagagtatttcattaatcacggagccagtgtaggtattgtcaatagtgaaggtgaagttccctctgaccttgcagaagagccagccatgaaggatcttcttctggagcaagtaaagaagcaaggaattgatctagagcagtcaagaaaagaagaagagcagcagatgttgcaggatgcccgccagtggctcaacagtgggaaaatagaggatgtgaggcaggctcgctcaggggctacagcccttcatgtggctgctgccaagggctactctgaagtcctcagacttttaattcaggctggctatgaactcaatgttcaggattatgatggctggactcccctccatgctgctgcacactggggagtgaaggaggcttgctccatcctggcagaagcactttgtgacatggatattcgaaataaactgggccagacaccatttgatgtggctgatgagggtctcgtggagcatttggagttgctccagaagaagcagaatgtgcttcgaagtgaaaaggagacacggaataaactcattgagtcagatctgaacagcaagattcagagtgggttctttaagaacaaagagaagatgctctatgaggaggagacacctaagtcccaagaaatggaggaagaaaataaagaatctagtagctccagctcagaggaggaggaaggtgaagatgaagcttctgagtcagaaactgagaaggaggcagataaaaagccagaagcctttgtcaatcattccaactctgaaagcaagagtagtatcacagagcagataccagcaccagctcaaaataccttctctgcctcttctgctaggaggttctcttctggcctttttaacaagccagaagagcccaaagatgaatctccttcttcatggagattgggactgagaaaaactggcagccacaacatgctgagtgaggtggccaattccagggaacctataagggaccgaggctcttccatctatcgctcctcttcaagccctcgaatttctgctctactggacaacaaagataaggagagagaaaacaaaagctatattagttcactagcaccccggaagctcaacagcacaagtgatattgaagaaaaggagaacagagaatcagctgttaatctagtgaggagtggctcctatacccggcagctatggagggatgaagcaaaaggaaatgaaatcccacagacaattgctccctccacctatgtatcaacttacttgaaaaggactcctcacaaatcccaggccgacacaacagcagagaaaacagcagacaatgtctcttctagcaccccgctctgtgtgatcaccaatcgccctcttcctagcactgccaatggggttacagctactcctgtgctctccattactggaacagattcctctgtggaagccagggagaagaggaggtcctatctgactcctgtacgggatgaggaagcagagtctttacggaaagcacgctccagacaagctcggcagacacgaaggtctactcaaggtgtcaccctaacagaccttcaagaagcagaaaggacattcagccggtcgagggcagagaggcaagctcaggagcagcctcgtgagaagcccacagacactgaagggcttgaggggagccctgagaagcatgagccctcagcagttccagcaacagaagctggggagggccagcagccctggggcaggagtctggatgaagagcctatctgtcatcgcctgaggtgcccagctcagccagacaaacccaccacgccagcatctccttctacgtcaagaccctcactctacaccagttcccacctgctatggacaaatagattttcagtccctgattctgagagttcagagactaccacaaacactacaactgcaaaggaaatggacaaaaatgagaatgaagaagcagatttggatgagcagtcctctaagaggctgtccatccgagagaggaggcggcccaaggaacgacgaagaggcacaggcatcaatttctggacaaaggatgaggatgaaactgatggctctgaagaggtcaaagaaacgtggcatgaaagactttctaggttggaatcgggaggtagtaatcctacaaccagtgattcttacggtgaccgggcttcagcaagagcccgtcgggaggcccgggaggcccgcctagccaccctgaccagccgtgtagaagaagacagcaacagagattataaaaaactctatgagagtgctctgactgaaaaccaaaaactgaaaacaaaacttcaggaagcccagctagagctagcagatataaagtccaagcttgagaaggtggcccagcagaaacaagaaaagacctctgaccgatcatcagtgctggagatggagaaacgggagaggcgagccttggagcgcaaaatgtcagaaatggaggaagaaatgaaggtgttaacagaactgaaatccgacaaccagaggctgaaagatgaaaatggtgccctcatcagagtcatcagcaaactgtccaagtaggctaggctccagatttatgaggaaagaaagggacagcatttgctgcccccacccctcttttccagtccttgccttccaaccaaaagaaatggatgttttggtggaaggacacttctttctatcaccctctttagtcacctctatacactctacattttctctgcactttcaatgccctgttcttccaaacccctatcccaagttttatgacagttttaattgaagcatgattgtggtaattcgagccatctggagaatgctctggggagtacaccaggctcagctgtggacccctcaacttcctgctgctcagctactttgtccacattggatttggtccaaacatgtaagacttctaccctaatcagtatccttcagctttttacattaacccagtgtcctctgatataggtgagtcttgtggtagccactccaggatcctgattggggtgccaagagaaacagcaggatgttgaattgatcatcagatgccctctggaatggttagcatccaaggtgacagtgactgcattgaggcgctctattcttcttcacctctcaggaactgacttttattttttctrtcaacacccagtaatctccctaactagttttaacccttattcctccctcatacctagccatttctccaaggcgcaaatggccctggcttcatttattcctttcctttctatccttttatatttttcccttccccaccccctcactcaatggtataaaagctaggacagagcacctgacctcagttgtctttggccattgtgggaagtcattattctggagacaagaaaatcatcactctggtgccttggtggcagcaccactgcctgctccctggaaggtagactatggcataagtgtcagctcattgttttcgtctcccacttatcttcccccttcaaagtgattttctttataagaaaatttgggctctgaatactccattctgcctcacttccttgaccttgttttcctctcttcgccctgacacctgcttctaatgagaaatgaagtcagtgcaaggaggaatgagaggtggggaggggagattgttgagagatggactaggaagtggaagcaggctggaaagacacatatggcgaaagtcaagtatctgaggccacttgcaacattgtgacaaagaagatggaagatagcagcctactgggctgtgagaatagtggtgaatttgattatttccagtggttagatttagcagagagatttactttcttagaaattaataggggaaatggcacttaatagaggtttaatggaatgaagtactttcaacccattgatgagagtcatggaagtttagagtggcaagacccagaggtcattaggtccagctttctattattgtgtcacagggacccctgctaccacagctttcacccatgggcatggtcaggtagcctctggtggctatgcatttattactcaaaagttgggcaactctaataacgagagagtttttcctcatatcagctgaagtctgcctgtggattctccttgtagtccagatctactatctgcaactctttaacggcacttgagatatgtgcagtgggtggtctccccctcagtcttactttgagctgctgttactctagtcctttaagtcattcctcatatggcatgcttttcttacctgtcacatcttggccatcctcctctagacaaaaccagcctttaaaatatcatgtccaggcctggaaagaatacaaatccagtgcaaaattaaaccattagttcttgatgataacctagcattaatacttacagtattttctttttgtaggagttttatcccttggttcacttgagtgtgcaagtcattaaatcctcatcattttagggttgccagtgatattcagtgtttagagtggttcattcccttaatatatactacctctgtctgttaattctttcctaacatgacatgtagctctccatggtcctccctctgaaacaccacatgctgtttaaactagaagctgtaattcaagatcccaattccaccaggtgcagtggctcatgcctgtaatcccagcacttcaggaggccgaggtggacagatcacgaggtcaggagttcgagaccatcctggctaacacggtgaaacccaatctctactaaaaatacaaaaaattagccaggcgtggtggcaggcgcctgtagtcccagctactcaggaggctgaggcaggagaatggcgtgaacccgggaggcggagcttgcagtgagccttgatcacgccactgcactccagcctgggtgacagagcaagactccatctcaaaaaaaataataataataaataaataaaaaatcccaattacagaacaggagatatgtttcctctgacaaaaccccatttttagagtgtataaaattctgtctttcatttccaaccatttttcaagagaagctgctactatcttgagacttcgtattatcatgggagtactgtaagttcagttctcagggaatgctaaattagagtaataagttttatatccttcattctgggagaggaaatcaacataaggtgttgactaattgattatcctggaacattttgaatattggggaaggaagatgatacttctttctcaagaaaagaaaattggattattaggaatacatcttgacccttttccactcaatagaccagggaaaggggttacagagagcctcctcagatctgtttgtgcctttcaaaagtactgggggcagattctcaaaactcttagattggtgttgcatccctgccacttcacatgacccttccatgttaaagctgacttttcttgccagaaagttttccttgtgacaagaaatttgcaagcttttcaatctcaggaatactggattctatagccaagaactcatgaaagtaagtgtaaactatcctaggtaatttcaggtactttctcttatgcaattaattttattaactgatttctggtctatctccagagataaaataccattccttcacaactgtattgtctggaagccccatgagatggtaattataggccttctactagccagcagttctctctggatactggcatcagcaggtctcctttttcttgtgctgcttggacaggtacctactgctggcctcttcagtggccacaatcctcagtcctcacctgctggtttggagactcatgagcaccccaggcagctcaagctgaataaatagctgcagacatggccaacaacatggggctcaggtctgtcacttaacttagagtctttacatgaaatatcagaatgggaaagagaatgttcctggtaaaactctgttttcattaatttgttatttttcaaaaaccgagccacacctttggaagtaatgatttggccattccagagattctggggctaaagtttgtttttccagggctgctgatccttttccagatagctccagagtatgatgaccccagccccatcccaatctctagcgaaagggttatgcaaatctcagggtgttgcctctaaagaatctaaagaatagacatgctttgggcttactcagtgtaccagattctctagtgggccattctcatttgatgttccctagaacctccctgtcttccaactgcaggatgtgtttacttctcttctgggcttcccctggtttctgtcctagttcccaccccaagtttaagaagacttagattcatttattgctatctgaggccactagtgagatttcagatctctcttttgcaacattttacccatttcccttccccaaaccatgtgcttattagatggttccactcaggaagcaaggaagctaaaactcaagttaatggtctgtggatcccacgaaagtgtgtgtaaactactgactgtttctccactagaggcatttaattgagccaaagatgatggaagaagaaactctcaaagccatgtactttgttaggtgtctggatttttggcctgtttgcagcctctcctagccacagacagacactgtctcctctcagagaaaggccagtgtttcggtccaggccactggtgagtgtcggcacccttgaggtgggcatggagtgagcagaagaagcctggagaagagagaactatttaaaagtgttgccagttattcagcttccaggcggctttgcacctccaaaggtgcaaaaaggaaaaagaaagcagaaaggattcagcatttaagcagaaagaaaagggaaattctactctaccagatgagccactggttccactggagcttatcagtgaagtaacactgcaggagccctggtatccttccctcagagatatcatcaggggccctcaaaccccattgtttatgccagcactgaccgcactttaagcacacacttaccaatcagaggtcgtgtaattggcctaaatctaggcccagttattactacaaatcttagtcaccatactctctcgcccaggctggagtgcagtggtgtgatctcagctcactgcaacctccacctcccaggctcaagggatcctctcacctcagctcccgagcagctaggactgcaggtgtgcaccaccatgcccagctaatttttgaatttttttgtagagatggggttttgccatgttgcccaggctggtctgaagctgctgggctcaagcaatccacctggctgggcctcccaaagcgataggattacaggcgtaagggcccacgcccagcctaccatactgattttcaaggcagggtctaacccttcataagatgtgagttcttccaacccaataagcaggcagctttgaggacaaaaaggcaacattaaaagataagaccctagaagtcagaacatctgtattccaaggccaccccttctccttttagtcatgtgactttgggcaggtcaccctccctgtctgtaaaatgaggttggactggataatctttatgtgccctttccttttggcttaaaattctgtgatttattcattcttaggaagatcagcatatttattgggatttctgcttcaaaaattctttctaacctcaaaaatccaagtccagaattttttgttttcttctggatttaaactgtttaatatgagcacatcaaggttgacttctcatcctttttgggaagtgaatttaatattgagggtaattgaatgatgttgcaatggctttccctcctgctggcttggtaagaatattaaagcctgcagaggtggaaattggagctcatggagaaatggatagaaagcaatttgttgcaggcagcctttggacaagttgttttaataggaaatagacctgctgcttcataggtttcctcaaccacctttcctcagctttcttaaaatgggatctacattggctcttcacacccaaatagcagactaatcgtttttctgcttagcaccgtctggttcattgtcttgaactctgccttacagcagcaagaaaattttcctcgacaagaacctcaatctttagttccattgagctccccctctggattttggacttaccagaagtaggaggttctgataccattcaagatggtctttccttcaaagcaggtctgaagaggagactaccaaagcagtgtttacaaacccagagtccacacaaccatattgcatagaacagcacttggctttcacaagcctcctacaggacctggtgtaattggagtgaaagggcagagaccctggaagtggaggtggctgtgtgctgcgatgggaagaaggcagaaggcccaggggctttggacatagagcagggtggaagctgcaagtactgggaaggaagagagtttcacagaaacaaagctttgtcacacagaaatgagttctgtctcactggtgacttcatccctcaggctccagctgagcagagattttaatcagcttccttaatgggtattgacactgctcaggaagcagtagaccctgtcagggacagctattgatcttttgtgttctgattagattggaaaatagatcaacttcattgtagtccaggaactgttggtcacagctactaggaatgaggtgatttctgagggctgagaaaaaacacagaatcttggccagcagccagcagctgcatggtgaaagatgcattcacttctcctttgagagttggggttgagggcaaacatagaacccaggtttggcttacaacccagtgtcccggaagccctccttcgggagaactgtaagtaagaggtgggtgtgtctaaagacaataccattaatgaatgttctggccttacctaaaaaggtttagcaatttggggataactcttggatctagcttatgtgcgttcacatgcacatttgctagcccagagcttttaaaatgaggtctggcatatacttgattacaaatgaaaactcagaaaccaattttatttattaaatcatatcttttgtttttccccctcccttctaatcccccaaaggacctatttgagctgttccccaattcatctgcttattttggaccatgaatctgccagagtgatattttctgttatttctcctccaaatttttccctgatgtttccaataaagatttacttgggtggccccttaaggtgacatcaggatgctcttatgtccttccagaataagcatacacttcactcctctccctttcatctccctctgcattcttaattccttgcttttctcacttggagccgagggtgctttagagaggtggttttccatgaatcagccaagattcctgtagaagttgggtataccaaccaccaccaccaccgccccctattccagtttcaaagctcctcggctatgctaatgtcccctcagagatgaggtttgacttttaggcccgtatgactcctccatagcctggccaaggagaccatgagtagccatgtctggtttactctttatcctgagactgtttatagcttaaaacagaagtgtgtcttcccagcacaaacctaatcaatcagtgtatcagtgcatctggtggcaacagctcagcccattcaaagagcaaggattcaggaaaggcacactgatggtggggagcctcttaagagcctctaatgttctcccaaaaccagagttgagagtcggagtgccagtcgtcggggcccactattcctgaataagggacatgcaagggccagaagtagcttgactctcgcctaaatatctgtgcctttgcctgtcctttctcccactctactgaaacccggaacagattcccgcttgccttctgatgaagagaggttaggtaaagagagtttggaggaaaaaagacaccaggaggcaggctgcggggtaggagagggttctgagaggaggcagcaatccagaatacctccttttctagccagcatcccttgaacttttgaaaggttgtgcctaccactggctggcacaccagggcaatgatttccctgcagaaggaaggaaagaatgtttcacccttgcatccttcttggagaagctacagcctgtgctcagttgagtggttcacactcagactttggctttatggttttccttcctccttgtctttgccctgaccttgatcaacaggggtgaaaagaaccaccctgaggtttccatgcctctcccattttagtggtagcattttgtgtctttactccacccttcaccctagttccaccaaggttcacacaccagatgtaactgtttttcagctgagttgtatggattaacttcagtccactgtaaatacacctgggatggggtggggttggggttgtttagggagaagcagccagacttgctttgtgaactgaatgtatttttatgcaattttgagtggcctttcaaccctaagatgaatggttttgttttactggttgttgttatatagttttgagtattctgtgtttgaaagtttgggaataataatattcacttctatatgatgcctgtaaacacaacagtatttataaatgagtaaataaaactgtgttttaactttg

SEQ ID NO: 23591 - DNA, 150000 bp, Homo Sapiens
ctgcttgccccacactgtctaggctcacttcctgccacagtgtaataaagcctcctaccctgcaaaaaaaaaaaaaaattcagtatggcctaagaggttctctgggctttgagtccaaattaagctcaggcaaattagtacttagaaaaaaaaaatttttaacttgtcattctttcattaatatggaaaatgtggttaggctaacttcacacatagtttgtgtattcattcaagattagtaaatttttattttcttcactttttagttccagattttataggactctctttgtgcttttctctggggtcacatcttccttgtaatcacagtcctcttgctttatatctctggagactactgaaagagatgaggcatattggttgaattaactctgcagcatactattgtacatattcctaaggaagctgtatttcaaggaaaagatgtactggggactattggggactacataaatcttatttcatcaagaatattagagtggagctttctgtttgtgtcttcaaaggctttcctcctctcttgacagaggtgctgctttgcataatttgtgctgctgttttctttatttactcatcctgactttcccatgagaattatttcccttcatactgttttttaatggaagaaagttaggaataagcttttgaaagctaaccttttgtaaataccactcaaaatagaattagtgttggatccagaaataagatgatataggtatattaagttctgcttttttactcaaaatgttttatgctgtgccagtattgtacctttcttgtgctttacttgtttttattttacaggagagagaaaacaaaagctatattagttcactagcaccccggaagctcaacagcacaagtgatattgaagaaaaggagaacaggtaatcctaaaaccagccaaaagatggtcctcatcctcttaggtctactggacatagtcatctcctgggcattactcttctgcatttttccctcaggtgtccttaccacattatgaattgtttattccttctgcttagaacacctctcaactcttatatccttgctttgctggttctttatttttcaaattctaactccaggttagacattaccttctttaggaagtcttccctgatttttccacacatgcattagttttattctaccagcaggctctgtaaaggtagggtctgagtctgtctggtttcttaaggacccctagttcctagcacagtgcctaacacatagtaaacactaaaataatgttatttaattaaattgaccaacttctaatttgtcagaaggtaaaattaaagtcttcctaattagttaaaataaatatagggattttgaagtattgctgcatctcagggcaaatgtgatctcaaaccttagccagcggtattggcatcacccgggtacattttatttttattaaaaataattttctttaatagaagcagggttttgctatgtttcccaggatggtctcaaactccagacctcgagtggtcctcctgacttgccctcccaaagtgctgggattgtaggtgtgagccactgctcctggcctgggtgcatgttaggactccagaatctcaggccctactccagatctactgaattagaatctgcattctaacgaaattccctaggtgattcaaatattaatacacattaaagtttgagaaggattgttctagagaaccttgtgaagcatggaaacccataggttttgcaacaaagaccctgagttatcaattgtggatcaaaaatcctagtacagcactttcctggataccttttcatttataatgctaaagaggcttccagcaagacttctttccctttccccttctgtagtaactttttttctcggtaacagacttcttcatcttcccccatcatttccttatctgcttaacttaaaagccacgtgctactaagactgattgcaacacacttttttctttatttttttttttgagacaaagtctcactctgtcgcccaggctggagtgcagtggcatgatcttggctcattgcagcctctgcctcctgggttcaagcgattctcgtgcctcagcctcccgagtacaggcatgtgccaccatgcctggctaatttttttgtatttttagtagagatggggtttcaccatgttggccaggctggtcttgaactcctgacctcaagtggtctgcctgcctcagcctcccaaagtgctggaattatagatgtgagtcactatgcccagctgcaaagcactttttaagtgaggatcaaaagtgacttcttattacaaaagggttagagacctttgacatgaggaatttggtacctgttgaaattaattggttcaaagttgataaaagaaagcaggcagtaatacttctcttctgtacagaaaactggtatataaaacagaataacctgaagaatgtgtctattagccatgttatagtttgcctgtctggctcttctctctctgcattgtatcatggacaaaaactggtggtaggaatcagtgttttgttttcctttcatgcttctacagagaatcagctgttaatctagtgaggagtggctcctatacccggcagctatggagggatgaagcaaaaggaaatgaaatcccacagacaattgctccctccacctatgtatcaacttacttgaaaaggtaccaggctcaaagggggtgggagatgtttctttcactctagccatgggaaatgggtaatgattgtatgcctttttatgtccaattaacaccgcagaaatgaatcaaaatgaattactttcaggtttcttagaattaacatcttgaataatttaaaatttattatcttaataattgaattaaagtaagctaatttcagattctcactacagatctggctttatactttatcctctccatcctattaaaactttcaatcagaagtggctttcagtaatctctgggcaagactgaatttaagttatccttgtccagtagctggttctccttatctgaaacagagtagttctcatcccatgtgctatttttggggggaggaagggagggacactataaagtggtggggggtgggaaatggggacagttttctattgcattaaagaagtttcatactgaagcctgttaatttagggacttgagttgttttttttcttatgactttaatggccctcagatccatcaagatgtgaaactcgcaagtttggtgcagagaaggtacatgggtttccttcttttctcatctgtattcccttttctgcaattattttctttgccacatactagccagcaaaccaggcacctttgccagagccattaagctacaaaaatacttaatattttaatttgaactctgctgctaatgtggaagaatctgttttttattgcttactttgaattctttcttcacttccactgtcttctcacaccatagccttcatcattaggttttttagatgattggttggctaccttagaaacaggccctggcctagactagatgaacacattaactctttggaatcaacacttatttccacttgacagaaagacttgtcaactagttattgttgaaacatgggaaatagctagaaaacaaacagtcactgttgccttttaatgttcttcagttctgtagatacattctataagaaagggctcaactttggaagtatgaaagtttgatgatctcactgatgctttattacacaaaagaggtgtttcttgctttatgaggctatcacctatttgtcttaatggctaaggccttggtcttcctggatgcattattattcattatagttgaatccaagatcaagaaaacttttctaagaaaacaatgttctagatcaagggaagggagaaagctgccatttaatttccaggcatggagttattctgtggcgaggttgttgatttttgtgatccaaataatcagcaaatgggttgagaggcatttggtttgatagatgtagtttggcaaagttacggtgaacagtgaagggacaggctgcctctatttaggatcaaaagcatgcttaatgatatgagcactttttgaggaaaagatgtacaacttgcttcatatcttggatttccaaagcttttctcctgtaaccctaaagcattttttgattttataaaaacctcttatggtctttttaaaaggaaagaatcatatgccatcaccatttaaaagagcaagtgtaaggagaaatttgtcatttcccagctatgccaaaccttcatatacattccattttcatctttgaaaatgagaatgagagttcatctcttgtgtataggcagaaattcctttcatatggcccatattaaaatacctcttttccaaggaaggctttatagctttttttggttatctgctcaagtgtctcatttctattatagtcaagaagtatttttgaaatttgaacccaaataattttttcctgcaattgagatggttcttacctgtcttcaatcaaaacaaatacaagttgccctttattgctcatacagtattactttctagacttaaaactaaatcctcccagagacaattttgctttaggctgaataactgcagttctcaaagtcattttttttcacagagcttctttactctttccacttttaaattttaaatctctgctccacaacctctccaaattctctggtcttacttttgcttttgcagtgctaattctgtatcaggtagacatttggggttgcatgattatttgccttgggtttgttgggaattacttttttctaataaaattatcctttttcctattattccctttcttagcctctcctcttatcatatattctactttcctgctttccctcattcagtatcatctctcttcctccacgttccttcactcttttggatgattgaccaaaaagaccatccttcaaagagtgatgattccttcattcttttggatgattgcctgcttgctgccagtgactcagctctagctggagttgatcacttcacttcccagttgtcataccctttctttggtctatattcatttcaagtgcacaatctgggtgggaaggtggtgctgggaaatggtgggtgagcagcatgtcctgaagaaagtgactgtgtgctgttttgcagtgcttcatttggtagaagtagtgaccccacaagtccctacatttcagccaatcgcaattcatctcctgctacctcacccattaccattggttcatctacctctcggggcagccagtggcaacctgcctcttcttgccctgcaccaatcagtgcaaacactactgcatctgtacatcatggcaggtaaggcttcttgaagccatttgagttgcattcatcaaagttaatggctctgaaaacacatatgaaatttgaaccaaagagactttatcactataaaaacaagttagaactcctgagaaaatgtctgaatttaatgaagatgcttttgctttgacttgtattaaccagtcaacagttgcatattgaataatcaaagggtatgtataattgtacttggtgtttggacatcagcttaatgtgactgatttcatccctcaacaacctaaccagttgtgattacaatttaaggatcatactattgtggtaaattaaatattgaaaacattttcatattttacttctattaattttccagtaattataataggaatctcttgtatttagtcttttaaatgacatgcaaacccaaatcagaaagaaagctaactcattttccaaaagcctatgataaccttctgaaaactcccagccaatgagagtattttgctggaaacattgtgagaagggacagatttgtgtttgtctaaactgtgttgtgggggcagtatcttcttggtttctagttcatctaagggatagcatggtagaatgttactgtgaaagtacattaggactttagctgtagttttaactgtggcttttaatcctttatgtgtgctggcaaagggtctcttttttttgggtctgtgtctacaactgataaagaaaatgaaaaaaatcttaatgatagtgttgttgcaggaacaccagtgatggtgcttgattgatatttgtcagtttactagatttctttccctaaaataagcggtaatcattaattcagccaggagggaagggtttatgatggattattaataataatactgtataattataggtaaatttattaggtccttataataatccagttgcatagacatgttaactattatcaccatagctgaagaaacaaacatagagaggttattattactatattatattactctctctctctctctctctctctatatatatatatatatatatttttttttttttttgagatggaatatcgctctgtcacccaggctggagtgcagtggtgcagtcttggctgactgcaaccttcacctcccgggctcgagcaattcttctgcctcagcctcccgagtagctgggactacaggcgcatgccaccatacccggctaattttttgtatttttagtagagacggggtttcaccgtgttatccaggatgaggatgatctctatctcctgacctcatgatccgcccacttcggcctcccaaagtgctaagattacaggcgagagccactgcacccggccgtattactatattttacatatataatattatatattatataataatactatattgctattactataactattaagagctgcaactgagagaaaataattacagctgccatttgttggaccccattatgtgacaggcatttggttggctattatactgggatttagtttgctcatatgtaacgataaatctaaatagtagtggcttaaataaggtaaaggtttttttttttttcttgcacttaagaaagtccagaaatatgcagagctggcttagtagctccacagtcattaaaggatccaggttctttcgctccacagttcttgcatcatggctgccatttccatgggttgcctgatggtccagaataactgctgaagctatagctatcatggctgtactctagggaagaaggaagaggaaagaaggaagcagacaaagaaaaaatgcttctgaactgagaattttcccagaagtactagttgtctgcatatgtctcattggatacctctagtggccaggagactttgagaagtgtggacttttaactaggtatattgctgccctcaatgatatagggattcagttcataaagaagaaagggacaatggatatgggttagacaactagctgtctcatgcatacatatatcatctattctcttataatgagccccctattatatgaagtattattttatagacgaggaaactcagaccaaatggttaatcatctgcccaaggtcacacagctagtgagggcctgagataggatttgaactcagatttgtacatttcaaagctcttacctattttgtcactgtttgtatctgctgagtttatattttattctgggtactattttaggtgtcctgcagacattattttatttaatcattagaagaaccctgtattttaaggtgccactatctctattttatcaatgaagaagagatcagagagtctacatttaagcaaatgttgtgtttccaaagcccatatttatcctactccattgcatatcctctgatctctgctctagggctgttcttattctaacaatctacttgtaaaattacactgcatttcaaaataatagtaaaagtcctattatgtaatttaataaaataaaatccttggcatttcaaaagcataagaaattacagtgagaccaaaacatgttagtaacctaaaaagaacttcaggtaaggtttggttaagtgtaattttttatagctgtgtgtctagctaattttattagtacttcctatagattcgtatcttgtaagtctgaggaattttttgccttttctttttttgttaaaaaagactataaaatttcaccttttttcttagtcattaattgcttctggagaagtagcatgtgtttttttagatattacatgtatcttttaaaatattctgcctttatgtttgtatctaggtaccatatttatatttttatgtttttattattttttttcaagcttgtaatttgattatttggaagtaagcttagagctacccgtgaacatttctgctaataattgtgagtaggtgaaaaaaatagatttttaatatttgtgcttttcattgctttctccatctctgtatcagttttggacctctgttaccccagcaacagctgtgacatcacaaatgatagctttttgggtggagagccaatggttgctcccaactcttcgataagaaacaaaggtcttgttttcatgtaaatgagtttaattatacagcttgctgttgaaaagtctgtggttaaggatacttatagaatccggtttggtttttgtttcaatttctcacttttgcagttatgaatatagacaattaggcatttggttaaatgggaagagagagcagttgctgaattaggtgagggagaactaagcatactgagactgtagagtatcagttgtctctggataatccaagaagatggtcatcaaatctaggctgaggactaccacaaagactcccactgccaagaattaaggaacaggtggagactaatattgtaagtgactttaatgtctttttcttgtgtagagaggccatgtctccgtgtgcatgtgcagagaccaggtgctactggggtgtcatttaaaacactcttgcatatgtcactatcttgccttgtgccatagctaatgatttttgttaaaacaaaatctcaggcacacacatacacatacaagtctcataaaatgtgactcctcaggcaaaggatgtcagactaaacatgtaattatactattccaagctgtaagagctcaaaattaagaaaccaacaaacaaaatcagagcgagatttcctagatgaaccactctttaatccttctgtctctgtgccagtgctttgttgtatagcatgcctaaccatttcctttctgcttgtatctttttaaatttcaggactcctcacaaatcccaggccgacacaacagcagagaaaacagcagacaatgtctcttctagcaccccgctctgtgtgatcaccaatcgccctcttcctagcactgccaatggggttacagctactcctgtgctctccattactggaacagattcctctgtggaagccagggagaagaggaggtatgttgagttactgatttcatttgtggggctctgctttgaggtagacgataaaggaatgggcataaagtgtttttcccaatttcaaatacgtttatgaaaatatgtctttttttttttttgagacagagcctcactctgtcgcccaggctggagtgcagtggcgccatcttggctcactgcaacctcctcctcccgggttcaaacgattctcctgcctcagcctcccaagtagctgggactgcaggcgtgtgtcaccccacccggctaatttttttgtatttttagtagagacggggtttcaccatgttagccaggatggtctcgatctcctgacctcatgatctatccacctcggcctctcaaagtgctgggattacaggcctgagccactgcgcccagcctgaaaatatatctttatattattgttctgtattttgtctctgagcagtcagtttttggtgactcaattatttatgattatttagcatagacacttaacgccgttatggatttattttttttatttttttgagacggagtcttgctctgtcgcccaggctggagtgcagtggcgcgatctcagctcactgcaggctctgcctcccgggttcatgccattctccttcctcagcctcctgagtagctgggactacagctacctgccaccatgcccggctaatcttttatatttttagtagagacggggtttcaccatgttagccaggatggtctcgatgtcctgacctcgtgatccgcccgcctcggcctcccaaagtgctgggattacaggcgtgagccaccgctcccggctgtcgttatggatttaagcatatcttttttctgtttgtcttgtgatagagacaattgttaggcattatttcaccattttgtaatggagaacctgtgaagcacagagaaggatcttttgttttgttatggatagtctacgttgacttctctggcagcaaagaaaggaaacagtatgacacaaggctcaaagaaatagaactaggatataaacttttgattaatttgagaagaataccagaaaaagaaatgaataatatgtgatgatatggtagaagaatagtgactagatattctgtaatttctttagagagaagttatgagagaatattgtgaattgacatagaagagatttaaggtagaagctaagaaaaactttttgattgccagcattaagagaaacattagaaaatgtgaccgagcaagaatgggtcattttctcctacttgaggaagtattaaaaatagaatgtactgcatttgggagtttcaaatgtacttaaagactaaggctataattatcccttgttaagattagaccaggtgaaatcttatcaaaatttagatttcagtttgacttcatattattttgaatatccaaaggaaggagcttttatatttgtgtgtattaagagattgtcttttctccaatgtatgttcttggcacctttgtcaaaaatgagttcactgtagatgtatggatttatttctgagttctctactctgttccactggtctatatgtctgtttttatgtcagcactatgctattttggttataatagctttgtggtatcatctgaagtcaggtaatgttattccagttttgttctttttgcttagggtggctttgctattctgggtcttttgtagttccatatgaattttaggattattttttctatttctgtcaagaatagcattggtattttgatagggattgtattgaatctgtagattgctttgggtagtatggacgttttaacaatattgattcttccagtccatgaatatggaatatctttcctttatttgtgtgctgtttaatttcttacaccagtgttttatagttttcattgtaaagatcttttagttatttgattaattcctaggtattttattttatttgtaactactgtaaatgggtttacttttttttttaatagtagtatgatttatttattttttattttttatttatttattttttattgatcattcttgggtgttcctcgcagagggggatttggcagggtcataggacaatagtggagggaaggtcagcagataaacaagtgaacaaaggtctctggttttcctaggcagaggaccctgcagccttccacagtgtttgtgtccctgcgtacttgagattagggagtggtgatgactcttaacgagcatgctgccttcaagcatctgtttaacaaagcacatcttgcaccgcccttaatccatttaaccctgagtggacacagcacatgtttcagagagcacagggttgggggtaaggtcatagatcaacaggatcccaaggcagaagaatttttcttagtacagaacaaaatgaaaagtctcccatgtctacttctttctacacagacacggcaaccatccgatttctcaatcttttccccacctttcccccttttctattccacaaaaccgccattgtcatcatggcccgttctcagtgagctgttgggtacacctcccagacggggtggtggccgggcagaggggctcctcacttcccagtaggggcggccgggcagaggtgcccccgacctcccggacggggcggctggcagggtgggggctgaccccccacctcccttccggacggggcagctggcctggtggggggggacccccacctcccttccggacggggtggctgctgggtggagacgctcctcacttcccagacggggtggctgccgggtggaggggctcctcacttctcagacggggcggctgctgggcggaggggctcctcacttctcagacagggcggccgggcagagacgctcctcacctaccagatggggtcgcggccgggcagaggcgctcctcacatcccagacggggcggcggggcagaggcgctccccacatctcagacgatgggcagctgggcagagacgctcctcactttccagacggggtggcggccgggcagaggctgcaatctcggcactttgggaggccaaggcaggcagctgggaggtggaggttgtagcgagccgagatcacgccactgcactccagcctgggcaccattgagcactgagtgaacgagactccatctgcaatcccggcacctcgggaggccaaggctggcggatcactcgcggttaggagctggagaccagcctggccaacacagcgaaaccccgtctccaccaaaaaaatacgaaaaccagtcaggcgtggcggcgtgcgcctgcaatcacaggcacttggcaggctgaggcaggagaatcaggcagggaggttgcagtgagccgagatggcagcagtacagtccagcttcggcttggcatcagagggagaccgtttaaagagggagagggagaccgtggggagacgggagaggaggagggggagggggagagggagagggagaagggggtttactttcttgatttctttttcagattgttcactgttggcaaataaaagtgctagtgacttttgtatgttgattttgaattctgcaactttattgaatttttcagttctaatagtttttttggtggagtctttaggtttttccaaatataagattatctatctgcaaacttcttcctttccaatttgtatgtcatgtattactttctctctctctctctttttttttttttaaatagagatggggtctcactgtgttgtccaagctggtctcaaactcctggggtcaagccattttcccacctctgccttccgaaatgctaagattacaggcgtgagccactgtgcctggcctattgctttctcttgtccgattgctctaggtaggacttccagcactatattgaataacagtggttgaaagtggacatccttgtcttgtttcagatcttagaggaaaggctttcagtttttcgccattcagtatgataatagctgtgggtttgtcatatatggcttttagtgtgttgaagtatgttccttctgtacccagttttttgagggtttttatcatgaaaggatgttgaattttatcaaatgctatttcagcatcaattgaaatgatcatagtgtttttatctttcattctgtcaatatgatatatcacattgattgacttgtgtatctttgaaccatccttgcatccctgggataaatcccacttggtcatgatgaattatctttttaatgtgttgttgaacttggtttgctagtattggcctgtagttttctttttttgatgtgtctttgtctgatttggtatcaaggtaatgttggcctcatcagataagtttggaagtattccttccttttctgtttttcagaatagtttgagtaagattggtattaattcttctttaggtgtttggtaaaattcagcagtgaagccatcaggtcccacgtgagtatgtatgtatgtgtagtaagtataaaagatacaatacaaattaaacaagatgcaagatacaatacaaatcgaactttttatgtttgcttattgtaaggacaggtctaatatgtctattataaagacacttttttttttttttataaagacacattttgagaaggaagggagatgttgagttggaaaatagtgtttttcttcttcttttctttcctgtcctttcttttttctttttttcatttctttacataaaatggaaggaaactaatttctgggctaacaggtttcagagccaataactgtcttttcaaaattggtctccagccaaggaaatagtaataaatcaatgttgaatagtaaatgcttctatacttaatagctcaaatgtaatttagatactattagtttcacctagaaactaaatgcaaaagtaatctctagctgacaaaaactctctttaaaaaatctttctgagctgaaagaagtaaaatgagttaaattcatcattaagagcatgatcccagaaaggatgggggaaatcaggtagtttataaaactgcattattaaataccttgttgcatgaactgttatttggagaaacttagttttactgccttctggaaatgttgtaacctacaatcaataagatagtacctgtaacagagaccagatatatgaatcaaagggttaaatcaaaatattagtgaattatgagttgaatgtggtacatcaagtacaggtcaaaataagtgcattttaggaatggcacaagataagtaagtagggagatgttagatgtagactggttggactcattcactggatatgttctagcattcattcatcttcaaaatacttactgaatattttaaagtacctgttgccaggtgctatgagaagcccaggtgatacatcagtgaaccagacaaatatgatgtgagcccttgtgaaacaaatatgctagtgaaaaagaaaaatgtaaataattatatttgtgtaatataaagaagtagtatgagttgttataacagtgtcataccgaaaatctgctgacagaagacttcccttcttggccaggtatggtagctcacacctgtaatcttggcactttgggaggccaagttgggaggatcacttgagaccaggagctcaagaccagcctgggcaacacagcaagaccccatgtctacaaaaataaaattaactgggtggtggcacatgcttccagctgcttgagagcctgagatgggaagagctcttgagccccggagtttgaggctaccatgaactattataacaccactgtactctatcctcgaccacagagcacaaccctgtctctaaaaaaaaaaaagatttcccttctcctggaggatgaaagaaggctctcatgagggtgtgatactgctcaacctgagatctgctggttaagtaacagctaagtgaagagaagggagtgggcattgcaaacaaaagatctggcaattgaaaagatactgaggtggaaaggtacttgatcttttggagaaacagagaaggcattgtgactaagagtaaagaatgagggagagaggtctaggatgaagcttgaggagtaggtaggagctatatacatatatatatatagagagagagagagagaattcacataccatacaattcactcatttaaggtgtacaatgcagtggtttttagtatattcacagatatgtggagccatcatcacagtaaattacagaacattttcatcatcttagagagaaatcctgtaccctgtagctatcccccacaatctccttattccccctaggcctaagcaaccactgatctactttttgtctatagatttgcttattttggacattttatataaatggaataaaaatacaatcttttgtgcctgacttcttttacttaatataatgttttcaaggttcatccatatgatagcatgtatcagtactttattcctttacatgggtgaataatattccatcatatagataatgccacattttgtttgtccattcataagtcaatggacacttgagttgtttccaccttttagttattatgaataatgttaccacaagcatttgtgtagaagttttcgtgtggacatctggtttgatttctcttgattatatacctaggagtagaatttctgggtcatatgccactagaagattttaagcaaaaagtaccatgacgtgacctatagtttttaaagttctgacttttaaactctggctgcagttttacatatgaattggatgaggaaaaatacacaagaatgggtgtgagatgaccagtaaggaaaccactgcagaagaaaggctcatgagagagaacagtggcttgcactgagataatggtagaagagatagagaaaagtgaatgatcttggccaggcacggtgactcatgtctgtaatcccagcactttgggaggctgagggggttggatcacttgatgtcaggagttctagaccagcctggccaacacagtgaaatcccgtctctaataaaaatacaaaaattagccaggagtggtgatgcacgcctgtaatcccagctactcaggaggctgaggcagtagaatcgcttgagcctgggaaatggaggttgcagtgagccgagattgtaccagtgcactccagcctgggcgacagagcaagaatccgtctcaaaaaaaaaaaagaaagaaagaaagaaagaaagaaatgtgaatggtttgaaaatacgtttaggaggataattccgacatggtagatggaacttataaggctcccttgcccattataaacagaaattcatagttgaattcagaagaataatagggaactctcagatgacaaaagtgaagagtactcaaaagccagagtagtttgagtgacccagggttggtgtcagacctatatgtagaccataaggtctggacactcagattttaatgccgtgtgtgtagaacgcatggctgtggacctactaaggctgcaagttgtaactaagaaactatatcaagctagaaatctcaaagggttcatgaaaagggtactttgcccatagctcaaaggagtggcaaggaaggaaatctatacaagcgtcagggtagggcagatgactcacttgtgagaaattttcactattcgtatagtttagaaatcccaaaagtcaaggatttaatacagaaactgtgtctgtactcttgaaactctggggccctggcacaagtaaattcaaaaccaccttgaaggaacacatctgcaatccagagtaaaagactgtaaactgtaaaaacagtttcaaccaaagatgaattcacataaaacataaacactgaaggtcaccatgagggaagagttctatgacaaactcatagatgcagactaacatgtaataaaagttttaaatgcagaaagaaacctcaaactattattggaataggtaacaagaattacagttgaccagctgtattgaagatagacacacgtataggaacagtttggtaaatgaatcaggaatggtttttaaagtataagattttgcaaaatagtattatctatatagaatcttgtttaaatgggaacccacatatataaagcacctaacaaccatttattgagagactgccatgtgccaggcacagagacattaaggatacgagaccaaagaaaacatttttttggctgggtccagtagctcacacctgtaatcccagcactttgggaggccgaggcgggtggactgcttgaggtctggagttcaagaccagcctgaccaacatggcgacacgccatctctactaaaaaaatacaaaaaattagctgggcatggtggcacgtgcctgtaatcccagctactaaggaggccgaggcaggagaatcacttgaacctgggacgcagaggttgcagtgagctgagattgcgccattgctctccagcctgggagacagagcgagactccatctcaaaaaaaaaaaaaaagaaagaaagaaaacattttttctacccttgaggatataactattatgggaagtcaaataagtacatcaaatattattgtataattgttaagtgctgtggtaaagatatgtatagattgctatgagagcatagaggaggggaatctaaattagattgaatagggtgacaaggaaggcctaccagaggaggtaactggagttgaattttgaaaggcaactttaagttaactataagtagtaataggaggatggtatttgagaggaaacatgagaaattcaagaaacaaacaagttcagaatgcctgaagctgggagaaggtgaggccaggctagcatatctgaaagtgtcttttgtggaaacagatttagatgaaggaaaaaaaaaaaagtattctgtggctaaatgaatttgggaacaatggattaaacaaaattaaataggatcactcaaaagccttcttagggtcattcctctctggggaatggggagagtgggacatgggagtggttagggaatttgcagcattttccaaatttctgagtccatctagtagttttgtttttcaaagaaacccaagactggtattccactggagaaactttggaaattgtcaagctagagaggtaggcaggaaccaaatcatgtagatttttgtctgtactatgctaagaaatttgaatttctagtctcaaagctatggaatacaattgagggaataaataggatcactcaaaagctttcttagggtcattcctctctggggaatggggagagtgggacgtgggagtggttagggaatttgcagcattttccaaatttctgagtccatctagtagttttgttttgtttttcaaagaaacccaagactggtattccactggagaaactttggaaattgtcaagctagagaggtaggcaggaaccaaatcatgtagatttttgtctgtactatgctaagaaatttgaatttctagtctcaaagctatggaatacaattgagggatttccagcaggggaatgacttgatcaaataaaacatatcatttaagcctttacagaattaaagccatttagtttctctggctagacaagcataaactgaaagaaaaaaaaatcagatgttttgaaaacagctaaattttccttctgaaagagcatgctggatgctaattctactcttgaagctgcagctttctctgtaatcagctcattgtggaagcattttgactcctactgggaaaccttgataaaagcctgaagcctgtgttcacaggtccaatttcaaacaattagtgagcattgggataaatggggctttaaaactggccacagcaagaccaaagtagtagaaggttctctctcagaaataatctccatttgcagtgtaattaaagcacttcagttggggagtgggttttaccattaaattgcacagctggctctccttttctgagaatgttttatcttaagaggggataagtgggtatgtgcataccaattggccaatgatcagtctcagctttacacccttgtgctaacagttctttactcagtttaactacagatatgttgctaaatgagcaaagctagatataaaagaatacattatgatgccaaatagtaataaacatggaaatgttaatattggatttttgggtgtattatggatactttttatttttattttttctgtattttccaaagttccagaatgataaaggattactgttattatggggcagagggagcaggagggcatgaaggaatattaattatagggacaacagtctttcttataatgtaagtctgtgaagaaggctgtgatcgttgaagagtaaatataatagagattcaaggtttgcaggattctagataatttatggttttgcatacacagtacagaacttgtaaaacagtttattcctttttgagaagggcataatcttggatttgtgaagttcctttttttcccccctgaaaagctcaagtgtgcttgaatgtattctctttataagatggaaaggaatagaacaatatgctccctattttacaaatgggaatgctgaggccctaagagcatagagtcatttgcttaatatgacactctgagtcagaggcacagtagagaccatcacctaggccttcttttcctcctcattgaatttactgaccatttcttctattgaatttaagtattatccattcagaataaaggttttgactcaggggccagtccacagctcagaatgcaacagtctctatctttagggctttctgataactgccattcagtctttggattgcttgtgagaactatagaaaccaacaaggtcatctgattataaagggactgatttgacaggacagaaatggcaagtggcaagctgttggcagatagctctgcagaaataccagggccaggcagcagctgtcacaatagggtagtggttgggttcattttccaaagctccaagttttccttagcaacaaaatgtaaacaattcccattgctaatattagagtctaatagtgtctgactttgattcttttgtttttcctttagctttttctctctcacccaaccctgaattttacctcttttttaattgtgctctttcttttctttgtagaaatggttaaaaatagtttttctccacaataagctaaaattgtctttcccaaatagctcacattacatatgactctgctttgcttggtcaagatacagtgagtactggctgagtcatatataccacacttatggaccttcttcagtcccttggggtctttataagctaggtagttatacctactaatgtgaagctgtcagcagattaatttggcatcatctttggaatgttcaaaatttaaaccaagaatttaaactctgagttatggtttttaaaagtcatttgatttgttcccctgtgtccaagctaaagactggcagttgtcaattcaaaaaggtactcaaagaggttccacaaacgactccaatctttctccagttttgttctaaagtgattagttatctaaaagtctgcggccatgctgccattaccaagttttttctctactgatagaaataagctctctcttcctaagtatgaatattgaacaagaagagagtgaaacatatgtagcagtgggtacattttctactatattacaattctggaggtctctggattgcttatagaattaggattatgctgtgggactctgaacaattctggaatagaaagaaaaaaggtgattcttttagtgctttggccctaatccttaggtagcaaaatgacaagaggcttcaccaggctgaatatgccttacaaacaaactgctttcagtgtcatatggcacctctatgtaattttttttcagaatatgtctctttgaaataatagtgatgatatgttgctgcctgagagatgaggctacccctagataactgtgaatggctagacttagtgggaaatgcacaggattgatttaagagttccagttcaaatggggcatggtggctgacacctgtaatcccagctacttgagaggctgaggcagaaggatcacttgatgccaggagctcaagaccagcctgggcaatatagtgagatccccatctctttaaaaaaaaaaaaaaaagaatagtccagttcggccttttatatgtgtgattttggttaaataaatcaagttccgtttctgactctttcctcatatgtaaaaaagggataatgcttaccttgtttgcatgtatttgaggattagaaataatttacgagtaacctagattttcccaaatctatctcatggagctattgtgaggatcaaatgagacagactatgtgaaagtgttttgcaaactacaaaacaatttagagatatatatgacaattatttatgtcattaccagtgaaatgcttttttgactttcattaagatccattcctagcttttccagagctaatacatttggaaataagatccaccctaaaatgctaaatattaataccattttagattttagggatgtttaatttttaaaccctacatgctatagggattccatatctcaagtttaggagacttaatttttaaatttaagctcacttgtcctgcctctgatgtccttaccaattatttataatgttatacattattttctgcagccctaagggaaaatctccattgtggtgacaaagtaagtggcagccatacacaggtaccttcttatgccttttctcccctcaccaagcagtgtccaggaatctaagcatttgaacatttatatgaggcaagagctagtgagctgaatgtgataatggtagcagttgacccttgcaggaaagtttgagcctgggcctcctatcccagtgatattctttatgctaaaaatattagtaattccctcccacagattcctttcctgcctaagtgaggtcaatttctgttgttttgcaaacaagtacactcaatactatgcagtagtggatatttttgatactaaggtgagcatgttttaaaatcggttatagtgacgattgcataaatctgaatatactaaaaatctttaaatggtacacctaatgggcatgtgaattatgtctcaataaagctgtttaaaaataacattagtactgttaatctccaccaaacagttctgggaagggaggcctagatggtgtctactaagagttaaagcaatgagatttagagccttgaataaaagagtctattttcttttttccgtatttctgttgctaaacacggctgttgccaacaccatctcacttcattttccagagataagggcatttgtcatgcgtttctcagcccaccacttaacagttcaggagtggaagcttaaagtgtttccccctccccctcaggacacgtgcatttagaagaaaggacaagaatccatttccttatgtagcagaacctctgatagttctatcccagttcccagccacttcagagtgaagacagtcacccaacacctgctactaaaagcccttatcagccatgtttttgcggttaatctccttctgataaagtggttcatttttcagagctgtgaatattggtgacatgtaggagggaccaaaattttcagccctcattcaaccctcccttgttttttatcagttgattttcccatgttagaaaaggacagttgctggtacaatctcataaaatgggctccagtgtttagagaaggacagtcagaggagtggccacctgtttgttgaaaattgggcttctgggaaagttgctgcacaagtgtgtggcaaggtgtgtctgagatagcttgacctgctttcacctggaatgatttgatctggcaatagagttccttgccattcctggttttatggaaatcagaggcacaggaagttgatctgggtgttctggggaattgagacaagcctctgccatagtttgttagtactctgtgtttggatgctaactccagtgtgctgagttgagacatcagcaagtgctgggcctggaatgtcagaagcagcaggtaaaatttctttgtttgatagctttaatgtcctagatgcatgtttctttgggaaactggcttggttgcatactttgatttggtggtatggttggggaagtgggagaaggcaagtggtaagaataagatataaccagtttggaacttctctagtgtttcttcacattactaatgaatttaaacatgtgcactgacttataaacatcagacccaaaagattagggtagcagaggacaattaagagtttcaagaagtagaaacatgcttctcttttaaagaagaaactggaattggcactgttattcttaagttggatagtaagacacaggtgatggtttattattctttatatcttttttgtttgccttaaatattatatatgttttaaataagtaaaacagaaaaaagtattgttggatatttagggcaattacagaaagaagctcatttacataggtgaaggggcagattgcaacttgagttggcctttgaaattataaaatgaagagactagttcaatcaggtatgggtaaaagttatttacttactacacactctacaatcagattgaatattaatggaagttaatgtttttccatgtgtataagatgagaagtttcctagttgatcttgttcagaggaccaatttctggacagaatacaaacacatgctgaatcaggcaatatagaaaatcctgctgatcgttagtcattttagttctgtagagagagcactcaccaaactctgaattcagcctacccaggactatacttttctctctatttttcttatccctttctctcaactcttcttcctggtaattgcgtcactttactcaggtagaaagattaggcctatttcctgtacattttactttcatgaccctcttcctttgtccatgcgtgaccttctttctagaatagttttttctcaccttctttgcttaacaaaattgtattcatactgtaagaactcctgcaaattaaaacccactactgactaccctgctacacctgagccccaggctaaaactagtattctgtcttcagtgttctttttttgtaacactgtcttaggattggtttactaattaattaaatggtatgttgttgcttttcattactacattctgagcttctttagggtgcttttaattgggttttcttcacagagcctaatacatagtagatgatgggtaaatgtttattgaataaaattatttctcaaatgaaaataagcccatgtgtagtgatcttctatgcccataagatggcagcagaagaacgtctattgatctacttgagtgtgaagctagcaaagaccgttttgtgtttggatgagttcgcagatgagcctttctatcccattccatttaagtgttttaatatagggaatgcagattttttttggcacatgaaggccctttgtgcactttcaccctggcacttcttcacacaagagcgacaggtacaaggtataaagctccctggattgcaagagaggatacctagtttactctccagctaagcccacaatttatgccttctcaggcaagccatttaacttctcttgttcagtttcttactcagctaattggtggagttaggagatctatagggaatattagattataaaataatagcattctaagtcatcagtgactgccttagttgtgtgctcaatattgtgttaaaaactgtatgataaaaaagggacatgcccaagtgctctcatgatccaagacatcaaatgtacacatagtaaggcatgagtgtatattaaggaataatatgtccttgagagcaaaattgtgtttaggtaggtatattaagagttcagagaagatgaatggtataggatggagtagtcagaaggggcttcgtggagccagaggagattgagttggcctttaagtatatgaaaggtttaaatgctgtaagagaattaatgtttttgaaaacttactataagccaagtaccctgctagatgcatttaatctttgtaactttgtcagataagtaatattcttttcttaattcacgtaagagaatgcattgaggctcagctaggttaaggaatctgtccacagtcacagaatttgtaatgaaaagccagaattcaaaacgaggtattttggactttgaggcccatgcttgctcttctacacctccaagaaaatgtgtccaaggggtcagtcttcactggatatttgtataccatgagcttggcaatataagcacaatggttagaatctcttgatatttatttgaagggaaagtagaacttctaggaaatgagtctttgtatagggaaatatcacttctgaaagtgaagcaaattgaaaacttgctagcctctctgaaatctagatgggaaatagggtttttttgtttttatttttgatttgagaaccaaatgagaggttgtcttatgggtcatctggctgtccagggttggctgaggttgctgaatataagaagcttatctttgggagagttccagagccttgggcaggcatatttctattttaagaagtatttttaaaaatggaattggctgacagcaattacctgaaggcttgtttctgattcttctttaaacagtgatttttcttcctcttcctcagagtctcttaaataatactggatagtatactgacctagcttttaaacttattttttctaaggaaatctagtcttctaacctgataaagggaactagagtatgattcacagtccttgcgcacttgtgctgaaaatggctcattaatcattgacgtgtaaataaaatatagtaatagctcaagaatcctttgagaactaaatttctttataatgaaactgacagtgtttaatagaacacttagcatacaaaattcataaacattgggaagcaaaactgcaagtttagctctatctattacaaaaatacacctgcacaatgattttatttgtccttgacagttgtttatttttcctgtcgtaataggattcacctttgaccctgcactgctctctagggttaccatgtctcactcttcccttcactgttagtcttgaaacagtcttccaatttcactttatccatttcctggccttctattcattgttcaacatattgaaatagaaattctgccccaccccccaatccagtgaattttttctggcaaagggccctgtaaacttcctaattactaaattccttagtcacttcatcttttaccttgaatcctggcagtaatttataatgttgactattgccttcctaaatttttattctaccataacctctctgatattattctttcctggctcacttctaccttttctgattgctccttctttgtgttctttttagcccttttttttttctgtaaacaccttaggcattgttccttaggcttccttcttttctctccttaggactctccctagctgacctcatccattctgattgctgcagctagcactcagatctctctctccagctcaaacttctttgcagaagttcattgtactacatgtaaaggacttacttaggacagtgcctaacttcatgtaggcactccataacaatagccatttctggctgttactttatctccttatttcttatttcctttatttatctatttaaagtattgttataggcatgtatttctgtaagaattctcaagtcctctttagaaagagggaataagccaacaggtaaaccaaatctttctttcctctagccttaaaaaggcaagagaaagtctttgttctcacttttttttttagaaatctctgctaattgtcttacatgtcacccaactgagaacttggaaatcaaactagaaggcttttcattctttacttctcatatttagtctgtcaccaagtcttgtctgtcattctccttaagaatccttcaattccatcttctcctctctttctgttaactcaggccctcctaactgggccttcctctcccctgccccacccaccattccaccatctacagtgcagcattagtgatctttcttatatgcaaatctcatccaatcactgactcctgcttaaaatctgagaatggtcctgcaagcaatgctgtcctcccttgttttgtaggatgtctctctctttttttttttttttaattatactttaagttttagggtacatgtgcagaacgtacaggttagttacatatgtatacatgtgccatgttggtgtgctgcacccattaattcgtcatttagcattaggtatatctcctaatgctatccctccccgctccccccaccccacaacaggccccagtgtgtgatgttccccttcctgtgtccatgtgttctcattgttcaattcccacctatgagtgagaacatgcggtgtttggttttttgtccttgtgatagtttgctgagaatgatgatttccagcttcatccacgtccctacaaaggacatgaactcatcctttttatggctgcatagtattccatggtgtatatgcgccacattttcttaatccagtctatcattgttggacatttgggttggttccaagtctttgctattgtgaatagtgcttcaataaacatatgtgtgcatgtgtctttatagcagcatgatttataatcctttgggtatatacccagtaatgggatggctgggtcaaatggtatttctagttctagatccctgaggaatcaccacaccgacttccacaatggctgaactagtttacagtcccaccaacagtgtaaaagtgttcctatttctccacatcctctccagcacctgttgtttcctgactttttaatgattgccattctaactggtgtgagatggtatctcattgtggttttgatttgcatttctctgatggccagtgatgatgagcattttttcatgtgttttttggctgcataagtgtcttcttttgagaagtgtctgttcatatcctttgcccactttttgatggggttgtttgtttttttcttgtaaatttgtttgagttcgttgtagattctggatattagccctttgtcagatgagtaggttgcaaaacttttctcccattttgtaggttgcctgttcactctgatggtagtttcttttgctgtgcagaagctctttagtttaattagatcccatttgtcaattttggcttttgttgccattgcttttggtgttttagtcataaagtccttgcccatgcctatgtcctgaatggtattgcctaggttttcttctagggtttttatggttttaggtctaacatttaagtctttaatccatcttgaattaatttttgtataaggtgtaaggaagggatccagtttcagctttctacatatggctagccagttgttttctaggaagtctcttattctctttagattctgcccagatcatccccttgcaacattttattcctgatactcctcagatttcctctccagagctatctctttgtggcaatttttgtcttaaattttaattatcagtacttaatatgtccagctcccttacaagatcttgcttcagaacagagcatttggaataggtaaagaagggtaaagtggtggctgggcacggtggctcatgcctgtaatcccagcactttgggaggctgaggcgggcggatcacctgaggtcaggagttcaagaccagcctggccaacatggtgaaatcctgtctctactaaaatacaaaaaattagccaggcatggtggcgcttgcctgtagtcctagctacttgagaggctgagtcatttgaaaccaggaagcagaggttgcagtgaccactgcactccagcctgggtgacagagcaagattctgtctcaaaaaaaagaaagggaaggtaaaatgggaaactggttgaatagaatgaacaaaatgagcacatgaaccagtacactattgaccaaactttaaaaatggtaaataaatatgtagggaattagggtcaactctaaaacaaaactgaatagctcagattctgaatttcatccataaccttaattcagttcaataattgttttagagtacctaataaagggtaggcacaatgctaaattttaatgatgtaatgataaagtgtagtccctaccttcctagaacttcgagaatggtggttagttgtgggtagaatagcacttttttttgttataatctacagtttagtatagtggccaacatctgacttaatgagctaaggcagttgttggtttacatattactttctagtgtgagaaaatgtcaatgtgtttcttcaacagtgagttttaaaaataactattgggtactaggcttagtacctgggtgatgaaataatctgtacaacaaactctgtgacatgagtttacctatataaataaataaaaaatagaagttaaaaaaaattttccttatgctaggactggggtgactaccaagtagcatgagtgagttttggagggtgacagaattgttctgtatcttgattacagtgacggttatgagactttatgcatttgtcaaaattcgaactcacagacctatttgctaaaaagggcaaattttaccatatgtaaacttacctcaggaaacctgactcaaaaaagaaaaaaaaatatgccaccgagtcttagaggaatttgattcatctgcaaagtagggtaattggaaattgaaaataatggacttattttagaggctttctctgaagataaatctaatttaggtcttttagggagttctttctttctagatcctttccttcataatctgagctaatggaaagttcagaaatccctgaaattgctagccaaattttgtgtatacgtaagtgcttttttaggggtaggagattacatttcttatctgattgttaaagatgggttagatttcaataaaggttaagaaccgcaggtttaagagcttttctgcttccccagataccccctttttccccattggaggccatcctagtgattacaggagctggagaccgatttctaggagttggtgagagtagacgagtctgtgaatctactggtcgtaatacagagagtccacctatgctaacacggttcttttcctgattgcctacttacgcaagctagaactcctttttctaccacttctgacctctattctctctctgccccctatggcggaccaatttttttctggcatatttagcttcctttagtatttagcatatactgaggagtacctgtgctttctatatcactatgaactatggtaataaaaaaaagtgtgaaatacaaatacatctcttttatgtatatcttactgtttggaacagtcctttaaatatgaatgatcatttttcaaagttaaaagtttctaaccttaacttttaaaaagtttacaaaatttcccacagtaactgtattttaaatagaaaataaaaattgcccgtattctcaccatcagcagtatcactgctaacatctttatatattttatttattttgagatcatgctatatatggttttttcttttaaaagattattggccaggtgcagtggcttatgcctataatactagcactttgggaggcagaggtgggacgatcacttgcactcaggagttcaagacaagcctaggcaacatagtgagacctcatctctacagagaattataaagaaaaaaaaattttagccaggcctgggagcctgtgcctgtaatcccagctactcaagtggctgatgtgggaggatcacttgagcccaggaggtcgaggctgtagtgagctatgatcatgccagctgtactccagcctgggtggcagagcaagacctcatctcaaaaaaaaaaaaaaaatgaacaaaaagttaccaaatatcacaaacacccaatctctccatcttctggtctgatcaaatcccaatattttgccatatttgcttcagttattaagaataaaatatagctaagctcctgtgtatctctcctcagtctcatctcttgactctctgcctaaaattaatcactatcctgaatttgctatttatcattctcaaatttttatcactattatttttcatttgcatacttatataattctttcacatgttttaatactttatataaatggtataacctgcacacatcattctgaaacttgctcttgtcacttagcattctgtttgttcattctaaatgtttattttagtccattgtacaattataccacagtttgtttttgtttttttcctgtgctgatggacatttaggtatttaggtcttttttttttttcttcccctaatactaatgatgctgctgtttacattcttgttcatgtttcttacacaaacgtgcaagagtttctcaacagtatttatttccaaatggaatttccgggtctatagggtaagtgcatcttcactggacactgcctgattgctctcctctttactctcaccagcaatgtacgtgagtttctcattcttttcaactaggttagacttaaaatgttttttttttttttttttgctgctactgcttttttggtaatctaaggaagatgaaatcatttctcattttaatttgcattttttttattactagtgaaacaacattttctcttatgtttatatgcttttctggtttccttttttgtgaattcctgattatgtattttgttgattttgttgttgtcattaggttggttcttttttaaaaaatgggtaaaagtttttttttttttatccaaaatgtgtttattgagatggtttcccactcatcttgactcagagtgcttttagtgctgcttcctcctgaaggaacatccttctgtaagccttgcttttcctcccgtaggctggcagaggacagtggagcagccaacacacaaaactaccgtttgtgcatggctaaagaccgtggtgattttatagcatcctgggcatttcacatccatgaagtaggaattggggctctgcaccaggcgtttcttcttgtgtttcctcttctcctcttctggagagggatgaaggagatcctttgtgagaggcatgttctcatgtgcgtaggtcatcaccgccggaaaacaaaagttttttatatattccagatatgaatattttggaacttacatatatatagtactttttagtttgtcttttaatgtctatattttatcatatgaacgttctttatttaaccattccccttattgtttgatatataggttatttccatatacattttgtgtgtttagtttcttgagctgtcttgttaaaaaaaatgagtggtggtgctgaatttgtcttggtctagtctactttgttgtaaatgataaatatttgagacagttggccaggtccagctggtatagctgatgtatgtgaaataaagcagcactcactggccttgttggtgcttgaatctgccattcttaccatcggtaacacttgttctgaccagtgaactaactgtagagtgacctatgtaagtaaaaacattgtcattgtgaaagtggctttggcacttgaggctggcatgtttttaatggaacaaatgttcagatggaaaagaattcaagatgatatagtagttatctaagataggtcacagaaacaccagactcacactttctctaaagcaaaaggacttctctgagccatagcttggtgataaataacttagtgtctagagcagggatcagcaaatgttttctgcaaaggaccaggtagtaaatattttagacttttcaagccacatggtttctgttgcaactgctcccttctgctggtgtagcacagcaagcagtagtcacacagccttgcctattcatttatgtgttgtctgtgactgctttggtctcacaacagagctgttgagtaggcctgcgaaacctgaaagatttactgtttggccctttacagacaaaatttgctgacttcagcccctgcaaactcagcactcttgacatttggggccagttaattataggtctagatttaagaaatgcttagtttggctgagggaaattctttcttaaaaaattcttaatggaattgtagctttgattcgttgcttaaacatcagctctgatctcagtgtcaaattagagaggccaaaaatgacacatgagcatttgaatgcagttgtcctaaactatgaaatcagatcatattttgatatgtgacacatattagatctagaaatcttcctgatctgtagctagcttatcaaattgagtggtatgtacactctttctctatctaggtttaacccatttatagcagatatgaaatttgttcctgcatttctgtgtgtcaggtgttccttttttatctgtctcttcacagctgttggcatttgctagctggctatgcctgagcctcaagtgaggcagtatttacagctcagttggatggatgcagcagctagggtagctcaagggcagatgaaataggatccagaatgagaatgctgcatctctctttgctctgtcttctttcacatgaggaagaatttctctctttcacctccctgtcaaatgagaagtagtattgattggtttggtacagtgtataaaacatgcatctaatggaatgttattttgggaactattagcagcattggctctgccgaggcccaagattttgccttctttcccttttctcctccccttccttctcctcctccttagtagcagctccttagcaaattgcaagctttgcctctggcttgctgtatagcagtggcagtgcaagccttttccagtttccaagggagaccgggtgctgagactgcagtctttcccagcagccacttacctttcttgctattcatttccacgcatctcttgaccttcgttctgctatgcaggcctgctcgaggaggtaacagcctgttttcttggagcgctctttgtcaaagggggcagagggaaagtagggtggtacagggaaaggtgtacagagacagcagagtataaatgctgcagttgggaaaaagtagctctaaagtgtgctgtatctgtgggcttgttcctatttgctatatctatagaactgttttaaaggtgggaaccccagcattatatcgtactacttaaagtaccacatataaaaatgtaagattactgtaatactgcctccaggaagcataggagaaaaatgagaactttgagaagaaaatggaatcaattgcttttaaacttagctgactaacaaattgcattttttttttttttgagacagagtcccactcttgtcgcccaggttggagtgcagtggtgcgatctcactgcaacctctgccttccaggttcaagtgattctcgtgcctcagcctccccggtagctaggattacaggtgtaggccactatgcaattttttctgtttttagtagagacatggtttcactgtgttggccagaatgatctcaaactcctggcctcgggtaatctgcccgcctcggcctcctaaaatgctggaattataggcatgagccaccgcgcccagccacaaattgcattcttgatgaaattttgttaagtttatgttttatgagttggatctggttttcaggtttgaggagagggcttgataatattgtcttttaattggattctcgggacttctagagctgtggtgtgcagtatggtaatcagtagccatgtgtggctactcaaatttaaataattaaaattaaatttaaaatttagttcctcttttaactgctcagtgaccacatgtgactagtggcaaccatattgggctgtgcaggtatacaacatttccattattacacaaagttctgttggtcagtactaaagaaagtaacctatgaaatataagaaatgtagtatttggccagactgagaatagacatttagtgaggagacttagaggccgtttgttcagaatcagtataaatttggattcaccatggtttaaagctaaatgggatctttaaaattttagatttacccctttgttttacagatgaagaaaactagagttccaagagattaagtgattctcttaagaccaaacaagtaattaatggcagagctaaaattagaacccaggtgcctgttctttctattgtaccatagtattagcctcccgttcccaattaggaacagcaaggaaaatttgaactaaaatttacctcatagggtcctagcaactgtagagtcaaatgcatcctccaaagaagaatttatccctaatatttttaatgtttatagtttgttcatggcagtcttatagcatgttgacggaaatttctagaaatgtaaaaatcatactttcccaagaatggagtgttgattatgacagacttttgggaaatgtcaggggatgctaggagaagtttaatgcaggacattgttatccattagttcccgatattgcaggatttgctagaagaaatgtcttgctacataaatctacatagctagaaataccatggtactgagtggaggaaacagtgttcattgtggtgcaatataagaaaagctgtacctgaagcaggagaacatggttaaaatccctttaggtatataacgttgttacttgggtgttttagcatctccttaggcctttattgactcatccgtaaaataggaatacattttttgtgtctacctgaagtcttagaattagatcaaatgacatcttgaattcataaagtctgtaggcataggtctgtgattcccgtgatccccctaagtctgtccccctgccccggcccccagtagctatccatatgtacttccaggttgatattaaagaaggtttttttgggatctctgaagaacttttgtcgatgtaatcttatgttaatacacaggacattgactgggcatcgtggctcatgcctgtaatcctagcactttgagaggctgagccgggcagatcacctgaggttaggagttcgagaccagtctcgccaacatggtgaaactccatcttctctattaaaaaatgcaaaaactagctgagtgtggtggcatgcgcctgtagtcccagctactagggaggctgaggcgggaggattgcttgaacccaggaggcagaggttgcattgagcctgagattgtgccactgcactccagcttgggcaacagagtgagactctgtctcaaaaaaaaaaaaaaaaagatatagttcaatgaataataaactatcttataagaccattagatattctgtaattaatgaccacagcatcctcagtggtcagtattagatatatactataagatatttatatagtgtgtctttaattatgtttttatatattataagctatataatatataaatatagtaaatttctatggccaggctgtggtggcttaccctgtaatcccatcactttgggaggctgaggcaggggatcacttgaggtcaggagtttgataccagcctggccaatgtggtggaaacaccgctctactaaaaataccaaaattagctgggcctggtggcacatgcctgtagttccagcaactcgggaggctgagggaggagaactgcttgaacctggaaggcagaggttacagtgagccgagatcacgccactgcactccagcctgggagacggagcaagactctgtctcaaaaaaaaaaaaaaatttttttttagtaagacatatactacaagatacatctataaaagctatatactcaacttagttcctttcctgtttggagtgaacatgtttaaataccattctctcctcaacagatttgaggtataggactctaaagctacttcaaaacccaatttcccattggattccggacaaaatttattttgttatcattctagagaaagcagcgttgttctctccttggaaattatgattatttcttttttcattcttctacttggagtagttttattttacttaggtaaccctatgaaccttcatggagaatatttcaagggaattaagtcctcttccaaatgagttagccatacctggtaaaaataattaaggggaactctttgattaagatgtgatgaatattgtagcacacctatcctttctttattttccaaattattactgatgagcttttaatatgacaatgaaaataatgtagtagtaagagtgttggtcgtgatgatagtagttctggtcatggtagtagcagcaaacgtgtgccaggttctattctaagtgccttacatgggtttgcatttaatcttcacaactctattaatatatctgtatatatctgttacaactgctcatatcttcattgtataagaaactcgggtatagagtgcttaaataatttatccacaatcacctaccaagtaagctgagaagccatggtacaaacccaggcagtatgatttttatgccagggtactttatcactacactatacctgtcaaaagacagtttaggtcttttattattatttattgtgacttttaaaatattcactggtgatttgctggatgttttgcacaacttcctttttatttttcttttcttttcttttttatttgaaacaggctctcactctgtcaccctgggctagagtgcagtggtgcaatcatggctcactgcagccttgacttcctgggctcaagcaattctcccaaaacaacttcttgaggcagaatttgtccatttatagtgtgtgaaggggcagtataaactttagtgacaaagtacaaagtgtatctttgaagtcatgcttaattctctgtaatcaattatttgaatgccactgatggtgtaatctcaatatcataccaaatacaaagaaaaattcttcctgccctctaggaaacatagtagatagagatggtaataagaggactttggcatctgaattccttctcatgctactaaactgtgagtgttagcctggttttttccggatgccagaaggcgaggggatagatgagaagccatggcttccattatttttatttctgttttgtgagactgtatctgtcttctttgcatagcaatgaagaatcctgtagcattcagattcatggatggctgcaatgcttctcagaaaaatcaaggagtgtggagtgagggcttgctctacataggggtcagcaatatttttctataaaggttcagatagtgattattttggcctttgcaggccatgttgtctctgttgcagttactaaactctgctctgtgattccaataaaactttatttacaaaaatgttgcaggccagatttggcccaagatcatagtttgctgaccagctggtctagattttagaaagtgttacagaaggacttagtctctactgaaaacgtagtatgttctcaacgcagctataagttaggcacattacttctgtaatctttggaatgcccatctgagataaagaaaaatgaatgaaaatgttccttcaaaaacatttacagttcaagtactagaatttatgggttttgtttttatatattttttcttaaatagtaaaactctcatatattgacacaggttacagaataatatgtgtgatattcatagtatatagtttttatagttttatagtttataaaaaactatatatagtttgtatagtatatatttacatacaatctggacttatatgcagtaaaataaaaatgagattatctccatgtggtggaattttagttgatttttgttttcatatttttgtctgttttttcccctggggaaaaaaagcagtgtgatttcacatgtgtgatttcagatatttaagattccaagtcaggtaaaatattcctgatcttacctaccaggtttttatgagctctgtttctctcattcaaaaaaactctctagagtaggcagtaggataagggagccctttttctttcactgtgccttctgtcctgtatgcaaagaagagataaagatcaagaattcagtataatagtgatactgtatgttttgcaggtagaaataacacgtgagtaggtttgctggtaatctagacagaaattcatgggaagttagttctcaccaattccagtatctggactacagctttagttttgggacttaatttttttagttcactcagaggcgaggaatatattaaggaaatatgcaaacctaccaaactatagcatattgacacacgtattggaattccaatttactaatttaccttgagggaaaaaatatgagtattaaaaacattgcctggttggggacttctgcttcagtctgtggcatattttgtttatgtaaaatcttccactgagaataactagaaaaaactggataaatataagaaaaaagtttttgaaggtacttgagagttacaaagcaagtgagaacttgagggatcaagatcctggagagaaggaaaccttaaaagggtaaacccaacatttggctctacttttccccttgaggtatttgctgattagtaaagcagtggctatgagcctgagaaactgaacaagattttcgtagtctcatgggactcagggaatgattggagttcagaaagagagcctagcggataccccagactttgatttagaaccactgaagggctacattctaagggcttaccagaaatagaccagcccttgaaaagactgaagcctagcttccaatcagctcagtctcaaagtggattaaggtactttgccttagtctcctggttcttaaaatgtggtccccagaccagcagtgtcatctgaactaattagaaatgcagattatcaaacccctacaccagacctgctgaatcaggacctctggtggtgtggtactcagaaatttgtattgcataagccctcaaagtggttctgatacaagtgaaagtttaagaaccacttccttagcctaactgccagggggaaaaaatatcctctctgaagggtagcaacaacaatcatgagttatcactcactacatttttttattaaatatgcctgatgttattttaaaaattagcatacataccaagaaataagagttaccaaaagaccaaaagaaaaaatagacaataggaacaagtccagatactgatattatcagacatggactttaaaataattgtgattaatatgttccaggaagtagataagaagtagagattttcaccagagaactgcagtctgttaaaaacaatcaagtggaaattctagaaacaaaaaatcactgaaatcaagaaactcagttggtgagtttgcagtagtagaccagctaaagaaatgattagtgaactgaaagattggacagtagaaaatatccagaatgaagcacagagagataaaaggctggaaaatgcagaaaaagcatgataaatcagtagaacatggccagtaaggtctaacataaatgattggagtcccaagagaagacagaagctagcttcatttttcacagaacaccgtttttacttcaaagcattactgatggtcaaacaatgggtattcacacctgagtaatttggcagacattttcttgaaaataaagtcaacccattgagtatttgttgccaattaaaaatttaaactttcaagcagaaattagaattttagaaaacttatatgctaccgtgagtaatattattgacagcttcccaatacttaaagactgttctaagatcaaaggtgatattaaataatttatttttactattattatataatgtagtatgtcaatattgggaagatctgcttaatgcagcaatattttacaaatgcaccaatattttacaaatgactaatgaagatatgttacaaaatcatgcatgactaagaagattctttgaaagtacaagatagaccaaaggatttcaatgtaacagaatatgaaaaatctattaatatgttttagagcagtgttccccaacctttttggcaccagggactggtttcatggaagacaatttttccacagactggtgggggcatggggtgtggggggcagtgatggttttgggtaaaactgttctgcagatcatcaggcattagttagattctcataaggcatgcacaacctagattcctggcatgggcagctcacaatagggttcacgtccctatgagaatctaatgccgtggctgatctgacagagggcagagctcaggcatcaatgctcacttgctcacctcctgctgtacagcgtggttcctaacacgccacagatcagtactggtctgcagcccgggggttggggacccctgttttagagtacacattgtaactaaccaccacttgtgttggtgtagcatcaaagaaaaatatctcccgattatctgagaaagctatcacaatactcctcgcttttccaactatgtatttgtgcaagactagatagtctttatatattttaaccaaaacaatatattgactgcataaacagataagaggatcccactgtcttctattaagccaacattaaagaaatttatgaaaatgtaaaacaatgccactcttctaattttttgttttggaagatatagtttttttaataaaaaaaaattgatgttaaaatgtattagggctattattttctttttattttaaaatttatttgacacattacatatttatggaggtacagtttgatgttttgatgcatatctgtgttgtataatgatctaatcagagtagttagtatattcatcatccatgcatttatcatttccttgtggtaagaacattcaaaagcatctcttttacctattttgtaatatacaatattttgcttttaaccatagtcaccttactctgcaatagaacatcagaatttattccccctgtctaattataactttgaaccataaaccaacctctccccatccttctctcacctcttccctccccagtctctggtaaccactgttctactctctgattttatgatatcaactccccccacctttttttagattgcacatattagtgagatcatgcagtattttttttttctgtgtctggcttatttcacttaacctgatatcctccaggttcatctgtgttgttgcaaatgacaagattttattctttttttttaatggatggatactgttccattctggatatacacattttctttacccattcttccatttttgaggactcagtttcatatttttgttaacgtaaatagtgctgccataaacacggtaaggcagataactcttcaatatactaatttcctttcctttggatgtgtacacagtagtgggattgctgaatcatatggtagttctatttttacgttttaaaggaacctccatactgttttccacaatggctgtactagcttacagtcccaccaacttgtgtaagtgttccccttttcttcacatccctgccaaaactggttttcttttgtctttttgataatggtcattctaagtggtgtgaaatggtacctattgtggttttgattttcatttccctgatggtttgtgatgttgaccattttttcatatactcattagccatttgtatgacttcttttgagaagtaaatgtctgttaaggtcttttgcccatttttaaaatcaggtttttgtttttttgttttgtttgctgctaagttccttatatattctggatattaactccttgtcagatgtatagtttgcaaattttctttcccatcctttaggttgtctgtttactctgtttaatagtttcctttgctatgcaaaagctttttagtttgttgcaatctcatttgtccatttttgcttttgtttcctatgcttttgaagtcttatttaaaatatcctagcttagccccatgtcatgaagcatttctcctatgttatcttctaggtagttccatagttttgggtttccatgttaagtctctaatctactttgaattgattcttgtatgtggtgagaggtagggatttactctcattcttctgcatgtggatgtcccactttcccagcagcatttattgaagaaacagtttctcccctaatgtgtgttcttggcacctttgtcaaaaatcagttggctttaggtgtgtcaatttatttctgggctttctattctgttccattggtctacgtgtctgtttttatgccagtaccattctgtttttgttattatacatttgtagtatatttttaagttatgtagtgtgatgcttccagctttccactcagaattgctttggctattcattttttttttctggtttcctatgaattttaggattttgttttatttctatgaagaacacctttttttttttttttttttgacatggagtcttgctctgtcgcccaggccagaatgcagtaggcgcaatcttggctaagatattaacaagaaattacaaaagatagagaactggaaagataaacctatggaagagcttctaagagaagcccaaaaagtatatgtaaaaagagagaaagactgacagagggaacagaggaagtctgtgcccaaaatcccagtgagtagtttggtgggaacgacggttacagaacaggtgactcaggatgactcaggtcagagcaggtgatagaggctaggagggggttgtttactgaagctagaggcaagagggtgaagagaaccaggaagttaagctttaaaatggagaatagagaataagagagctgaatatactggcatactgattctttgaagagaaacttggagttcactacatttaacacctactgttatagtattgcagtctatctctccctttacctctaataatatttgctttatatatctgggcgctctggtcttggatggatggatgtatttatagtttttatatcctcttgcttaattgtaccctttatcaatgtctgatgaccttctttgtcttcttttacagtttttgacttaaagtctgttttatctgacatggttactcctgctcacttggtttccatttgcatggaatatctttttccctccctttacttttattctatgtttgtctttaatggttaggtgagtctgttttaggcagtatatagttgggtcttgtttttaatccgttcagccactctatatcttttaattggataatttaatccatttatatttaaggctattattgataaagaaggtcttactcctgctattttgtaaatttttttttctggtggttttatagatccttcgttcctttcttcctcttttatttacttctgtggtttggtggttttctgtagtgctgagctttgtttccttcctctttcttgtttgtgcctctgcagtaatttctttctttctttgtggctaccatggggctaacattaaaagtcttataatagaatgttttaagctgatagcaacttaactttggttgcattaaaatactctagacttctctcttttgtttctgtaatttacttttttacctgtgattgtattccttagctactaattgtaagtgtcacgggttttgaccattttgactttaaaccttcgtactagaggactgagagacttacatagcaccattaaatcactgggctagtctgaatttgatttatgaatttacctctattggtgagttttatacttttacatcttttcatgaaaataattataatcttttatttccagttataccattctcttaagtatttcttgtaaggctagtctagtggtgatgggtttttctcagcttttgcttgtctgggaaggtctttatttttccttcattggtggttgatagctctgctggatatagtattcttggctgacaggttcatttttttcccccaaacactctgaatatatcatctcattctctcctggcctacaggatttctcctgagaaatccaggggtacagggctgctgcttgaccaactatcaggccaagcatgggtacagcagggccacacaaccctgcagtggtctgtctttggggcagggctgctgctagactggctgtcaggcacagtggtgtgtggccacagcagggctgggtggttctgcagcggtctgagggatggaaccacggtagaactggttgttgggctggatgtgggtgtgcataggttcagctggccagctagctgtgcagtgcaggtatgtaccggtgaggggactggccagcagttaggcagtttcccccctgtgcagctttggctgttcctggggttgggagggtagtgtgccacatgggttcaagagcagaggtctcagttgttgcatctggctaggcttcaggcagctaggattgtagtgctacaggtgcctgtgtgaacatgatagagtgatggcagggctacaggaatggagaaagtccattcctgtactggactacagggaagggcacattctagtagtaggttcagtttcaagatggtgctgagtagcagcagcttaggatgtgagggtggggggcagggggtgctcaaggtgagctcctactctaggcaaagttaactgtatgaactctactctccaaactggattcagggcctgtgaggacagagggactctcctatagcaagaatttctggcatttgtggtagcaatggggatcactggtgatctccagcttacgtttttcccttaagaagccccctctggctccaggctgatcctggtagggaagacagtgtggcagaagcagaataccttgctcccctctctatggtgctgccctggacttttgtcttccacagggattttgctgttcccctagtgctctcccgagtacttctttggtcattttaattgaaatatcgttgtttattcattgttttggtccctttttgtggagaggatgggctttaggtaactcaatttggccatcctgctgacatcactccatcttatctagggctattttaatattattattattgttattattatttgagacaaggtctggctctgtcaaccaggctgaagtgcagtggtatattctcagctcactacaacctctgccacccaggctcaagccgtcctcccatctcagcctcacgagtaggtgggactacaggcatgtgccactgcacccggctaatttttgtattttttgaagagacgaggttttgccatgttgcccaggctagtctcaaactcctgggctcaagccagctacccgcctgggcctcccaaagtgttgggattacaggcatgagctactgctcctggctgctattatttttaaataaattaataaatacattttttaatttttaaattttaatttctagtaagataaatattaaaccccatataaacaaaagctctctggggttctcaataattttaaaaaatattaaaggatcttgagaccaaaacaatttgagaaccactgctctagatattaaaataacaaatatattctaagggtattgttaacaacttgatgccactaaatgtgataatatagacaaaatagaaaatttcttaaaaaacaattaccaaaacagaaaatttgaataagcctaactctattaaagaaatgaaccctttatttaaaactttcccataggggctgggcacagtggctcacgcctataaaccagcactctgggaagtcgaggtgggaggattgcttgagctcaggagttcaagatcagcctaggcaacatagcgagacctcatctctactaaaaataaaaaaaagttagcagggcgtagtggcgtgcacctgtagtcccagctacttgcaaaggctgaggcgggaaaatcgcctgagtccaggaaatcaaggctacagtcagctgtgatcacgccactgtactccagcatgggcaacgaagtaagactcaaaaataaaaaacaaaaccttcccacaaggaacactgtaaacccagatgacttgattggtgaactcttccaatcatttaaggaggaaataacccaaatcttacacaaattcttacagaaatagacatgtagagaacactcgcaattcatataaccttaattcacaaagctgaccagcatattacaagaagggaaaattataagccaatttctttcatgaatgtggtaggaattctaaactaaataatagtgaatatgtttaaaaatctatataaaaagatggtacatcttgaccaagttgagcttgtcccaagaattcagtgttgctttatcattcaaaaattattcagtgtaattcaccttcctgacagaaaaaaggagaaaagcaatcatctcaatatatggggaagaatagcatgtgataaagttcaacatacactaatgattaaaaaacaacaacgagaaactctcttagcctattttctataggaacagaagggaattgctttaatttgatgagtggtatctgcataaatcttacaacaaacattacacttaatgaaaaaatgctgaaagcattctctttgatggcaggattacagagaatgaaaacttactatcatcactgcttttcagcatgtcctagagattcctagccaaagcattaagtcaagaaaagaaataaaaattggaaggataggaaagaagaaataaaattctcattttacagatgacatgattctgtgtgaacagtaatacatttacaaacacaatagtcccgttatccatggaagatacatttcttttttttttttcttttttttggagacctagtttcactcttgtcacccaggctggagtgcagtggtgcattctcagcttactgcaacctcggcctccaagttaaagtgattctcttgtctcagcctcctgagtagctgggattacaggtgcccaccagcacatctggctaatttttgtatttttagtagagacagggttccagcatgttggtcaggttggtctcctactcctgacctcaggtgatcctcccaccatggcctcccaaagtgctgggattataggcgtgacccaccacacaatacctttcaagacttccagtggatgactgaacctacagatagtacagaaccctatataaatactattttttcctataaatacatatctacactgaagtttaatttataattaggcacagtaagagattaacaataatactaataactaataataaaatagaacagttataacaaaatgccagcatcactactcttgcactttggggccattattaagtagaataaggattacttgaacataaacaccgtgatatcacaacagtgcatgatttgcatctcaggagggacagaatggaacagcatgaaatttcaccacgctattcagaacagtgcacaattgaaaatgtatgaattgtttattgatggaagttttcatttaatattttcagaccacagttcaccatgggtactgaaaccacagaaagcaaaaccacagataagggggaactactgtaatgacttggattctgtaatgtttgctgatggttgatagcatttctgtcattttgactttgcttaagttcattcctagaatgtagaaatctcttcaatatgtggaaacactttgtcattcctcaagtatatgcagcaaagatcttgcttttgctattacttttttttctctgcaggtcctatctgactcctgtacgggatgaggaagcagagtctttacggaaagcacgctccagacaagctcggcagacacgaaggtctactcaagtgagtgtggctttttttaaaatgtcattttgtgtatctacccttctgttggaggtacaatcaaaacacactgcaatatccatgttcaactgctgatttaaacacacacacacacacacgctcacggcttggcgtggtggctcacacctgtaatcccagcaatttgggaggccaaggagttgagaccaggagcattcctgacttgaggtcaggagttcaagaccagcctggccaacgtggtgaaacctgtctctactaaaaatatgaaaattagccaggcatggtggtgcatgcctgtaatttcagttactcgggaggatgaggtgggagaattgcttgaacctgggaggcagaagttccagtgagccaagattgcgccactgccctcctgggcgacagagcgagactccatctcaaaaaaacaagacaaagcaaaacacacacatgaaaatgactgccctattccagccagtcttaaaagctttcattgtgttgaatcttatactacatagaaccaaatgaatttacagctacatctacccattctcaccaatattcctccaggcttagaacaggtttatctcttttccttcacaagattaattattccacttgtgcttaaagaccttaagaatccctatacatccctatatccctactacattttaagaatccctaagggaaaagagtttggcaattcctcaaaattttaaacatagttaccatttgactcagcagttctactcaagagaaatgaaaacatatgttcatataaaaacttgtatataggtgtttgtaatagtattattcataatagccaaaaagtaaaaataagccaaatgtctattaactaatgaatgggtaaaccaaatgtgataaatccatgctatttggcaataaaaagaaatgaagtactgatacatgttacaacatggatgaaccttaagaaaacattatgctaagtgaaagaagccagacacaaaacactccatatattatatgattccatttatatgaaatgtcccaaataggcaaatccaaagagacagaaattagattagtgccagggctggggggaaggcagaatggtgagtatgtggtttctttttggggtgatgaaaattatgaaattagatgtggtgataattttataactctgtgaataaactaaaaaccaaggaattgtatactttcaaatggtgaggtttatgatatgaggattgtattttaataaagatgttacaaaaggaatccctgagggagtcattgaagcagtttaagggaatatggtatagtctacattatatgttagaaaaatcaccctgcagataattgatgggaatggtaggtagaggtatgtttaccaagcctggaagcaagaagacttgctaggaagctgtattgtagtccaagttgtattgtagtcccaggaaattacaagggtatgaaatcaagttgtaatggcaatgagaatggagagaaggctatgaatttgttattgaaagaagcaaagaaagatgagcccatgaaacagaacgaaaagaagcagcaggagcggtgaaaagaaaatcagaaaatagtagcagcatggaagtgaatgaaaagtccatttccagtgaaaaggagaagttccacagttttaaatactacagaggtcaagtagcaaatttcaccactggaaaagagacattatatatggcagcaaaaacacccttgttgtcttctttgactctcccaaagtaggtcatgtattcttcctttatttttacttgatgattatttgtctgtttcctccattagaatgtaacccccaagaggaccaagactgtttttttgttttgttttattgtggtgaaatatacgtaacataaaacttaccagttttaccatttttaagtttacagtttaatggcattaagtacatttacattgttgtataactatcaccaccattcatctctagaactttcttcctcttccaaaactgaaactctgtatccattaaataattactccccatttccctctggcaacgctgcttccactttctgtctatgaacttgactatgctaggaacctcaaataagtagaatcatatagtagttgtccttttgtgtcgtattttacttagcatagttatcaaggttcatccatattatagcatgtgtcagagttcctcccttttaaaggatgaatatttcagccttttatggatactgcattttgtatatccattcatctgtcagtggacattgggttgcttccaccttttggctgtttaatgctgctatgagaatggctatacaaatatctccctgaaaccctgctttcaattcttttgggtacatactgagaaatggaatttgctggatcatgtggtaattcaatttttaattttctgaggaactgccatactgttttccttagcggctgtaccattttatgttcccatcagcagtgcacaagggttctaatttttccatatcctcaccaatatttttgttgttgttgtttttatgagatggagttttgctcttgtcacgcaggccggggtgcaatggtgtgatcttggctcactgcaacttctgcctcagggttcaagcaattctcctgcctcagggttcaagcaattctcctgcctcagcttcccaggtagctgggattacaggcacccatcaccacacctggctaatttttgtatttttagtagagacagggtttcaccatgttagccaggctggtcttgaactcttgacctcaagtgatctacccaccttggcctttcaaggtgctgagattacaggtgtgagccaccatgcccagcctgttttttttggtaatagccaccctaatgggtgtgaaaaagaagacaggctatactttagctcatcttttccaccatcatacagtaaataaatcaatatatatttattgaataaaaaaatgagtgggaaataaatgatagggaaagataaattgctctggaatgatttcaagtttgtttatgaaggaatgggaaaagatagggaagttgctggagaggggcatagaattgaaggtgggagagacaggaacatagaaacgtcttagagggaaagattcagtagagagggagtgaaggtccatgtcaaaacttgaatagatctttgaactcgttgaaatgtgtacataatttttgaggagattttattagattctcagtagtcttcatgagattctcaaagggaccaccgactcccaaagaaagtaaaatctaagcttcttagcatagcttacaaaatctgttatgacctagcctctgcctgctttcctaaaatcacctatcctcattctctctctgtcctccaactttcctttttttgttgtgtgcttcatctttgctaagttacctacagattcctaaatcatccgtggcctctcttgtttctgtatctttgtacaagatccctctatctataatgccttttctccctccccctacccaagttctttttactctttaaaacccagtgttcggtattcatcctatatactcttgtgtttctgttttaatacttacattctctcattatactcgtctgtcttcttacatcttttctgctagactaaaaggttcttgacagtaaccattggatttgtctttgtagttctagtgcctaaagacacctaattctttattaacagaatgagtaagtaaatgaattaatagtaaaaaagctgggggtggggaggggaagcaagttgtggatacagtgcctgatcaactaactaccttccagctttggaacttccttcttctgaggactcatgcacataactacttgagttggaatcagctcatgctctttctaaactccttttctcccttctcctgtagttttgtcatcatttgcctgtcttctctcttgctgcccctgtgacactgtggggggaacattaattgttggaatatccctatatgattcctagagttacttgggaattgatattagagaaaagctagtctaggagttttaagaggttatgttgttgttattgtagcctagctctgaattttcatcttgttgagccaggtttttctttttttaagtgaatatttttccccagtatctgctgtttaggaaatctctgttggtaaccatttgatcttgggagggtagggacctttcaaataaagatactgagaactatttggtatggaaaaagtacatctataacaggcagacatcagtgttgacctattttctggagatcaaactagaaaaactaaagtattacatttaaaatgtacctagactcaggcccgggttctttgtacactgagatgcttattttaagcatatattgcttgaagtggcctcattatgcattttgaggggcttcattttgggatttgataactattaggtctttttgggaatattcctgatcaatcaagagttattccatggttagtgtgaaacagccctgatcttgtgatattttcccagggtgtcaccctaacagaccttcaagaagcagaaaggacattcagccggtcgagggcagagaggcaagctcaggagcagcctcgtgagaagcccacagacactgaagggcttgaggggagccctgagaagcatgagccctcagcagttccagcaacagaagctggggagggccagcagccctggggcaggagtctggatgaagaggtgagctcatttttgctggcatgtactgtgctaaaagcagggtaattagtttggggagtatcttcttcactggtagttcaaaggctgtgttctaccttgcaatggacaactcactcagtatggctgtctttagtttgcaaacctgtgtgacaaaaatttagaggatgttggtccttaaatgaccatttttttcttctgagagttcactgatgcttttgaataaatgtccttctagtctaaaaggagaggtcatagtataacaaaatgcaaataaaaatataagcatatattgagtgtttactttactcaatacatgcttactttatgccaggcactattttaagtacttcttgtgtattaatgcatttaatcctcataacaactctctgaggtaaatattactatttctattttatatatgaggaaattgaatcacagaggttaaggaatttgcccatttcacatagccaagaagtggttaagccagagtttgaacataggcagtctgactccacagcttgctctcttaactactagtgtattgtttttcaaactcttataaacctaaggggcttacaaagcactcttgagtgtcactgttgggagggacgttttgatttatgtttcatttctctagtggagttggtagtaaaaggtataagtttatatttagggtgaacataactcctggtttacctaagatggttccaattacaactgttgtctttgtgtaattatcattacccctcctttgcactctcaaaagtgtcccagtttggactgataaatgttatggtcactgtggttatagaagaaaggtatctccttcttgctttgactctgaatggctagattctataaactgaagttctattttgtattttgttttataagctactatttattgagtacctattaccaggtattcttctaagcacctaacacacattttcttaatttaatcctcataatcctctctgaagaaggtgttatctctgttttatagatgaggaatttatggcccagagaagctaagtaacttattcaaggtcacagctagtaatgctgaagctagaatttgaacaaagatctttctgactccaaatttactacattttattgtatatgtctttataaatcacaaaaatgtgtacaatctctatgtcataaatttaatgtgtagtaaggatttatctatctctgagtcttccataaaccaagttaaggcttattgttaggctctatctgtcctaattctcaggtttaaaaaaaaaaaaaaaaaagaccacaatagaccagaattgcttgaacccaggaggcagaggttgcagtgagccaagatcgcagcactgcactccagcctgggcaacagagcaagactccgtctcaaaaaaaaaaagaaaagaaaagaaaagaaaacaacaacaacaaaacaaaactacaaaaaggaaaatgggaactttagaaagtttcagtaagcctggttatggcaaggtggtagagtattcagaactcggtaggatactcacatttattctctgttctcaggtaatccctacattctgcttcttcatgctcctgatctttttgtttccctacataaaccttgcctttcagccctccatcttaaaaaggccatcattcttattttcattccaagatcaaaggaattttttttacatggttaatgctatctagtaccctttggttaattgatgaataatttgcttgaactgctctcaacatgatgggattctcagagtaggagtctagcagctgtgttttttttttttttgtctaattaactaactttagcttagttcatttattgagtgcctattaccaggtactcaatattgatcatcatctactcataagccccttaatatagaaaaaaacattttgtataaacctgctgtccttactctttagatggacttgatttctaatatctcatattgtggattatttccagcctatctgtcatcgcctgaggtgcccagctcagccagacaaacccaccacgccagcatctccttctacgtcaagaccctcactctacaccagttcccacctgctatggacaaatagattttcagtccctgattctgagagttcagagactaccacaaacactacaactgcaaaggaaatggacaaaaatggtatgtagaacttcaaaagacacaggcccctccacagtgcacatccccagattcttaaagttcatactttattttatctctggccagagaatgaagaagcagatttggatgagcagtcctctaagaggctgtccatccgagagaggaggcggcccaaggaacgacgaagaggcacaggcatcaatttctggacaaaggatgtaagtggattggtctgtgctgaggcatatcatattactcttggtcaccattctttcagttgagtttaaaagaaagagtcccgcatggtgccatgaatcttgcagtttctcaggaagtattactgaggaaaagagaagaaagacctaactagtgtgggactcatttggtatgttcctgctagattcccagtatctagtacagtgctaagcacatggtaggcactcagtaaataattggcaaagaattaaaaaactggaaatatacaacagccatataaacaaatataacaagtgaataagcttgtcgagttttagtagtccttcctaatattccctgaatgtcatgtagtgagtcaacaatatcttaatgccacatatgagcagagattctaactaaatattgtaggagtactacaggaagttcaaggaacttaaaacctctaagtaatacaagttcacttagttttactgttttagagaaaaagtggaacaaataacataaaatagatgaactttggctttaaaataaagacagatatgccaatgtttactaactacaaatacacaatcagtagttccattcatcctcttccatatcttgttctgtagccttctcattcaaccttgttattggcattttaaagaacaagtggccaataacttggacaagacgaccctgcctaccaatgactcctttgaaaattggacacactttattcagtgagacaagaaatgagacagtagtagtcattcattataaattattttttagataaaaatatttcattgttttagggctaaattgactgataagtattgacaaagatgaaattaagtctgtctgtcttgtctgtctgtcttaaagatatcccttttccaactgtggttgatttgactttttagactacaggtgacatttctaagttgcctgcctgtgatggctgtgaaaagtagcagtaacagagcatcacttggaagtcaattctcattgcccatgtttgaaatgccaagatgcataattgatgggatctgaccttgttgctttcaaggatgtctgtgacaatgagcctcttgattttcttcccttttcttttttaggaggatgaaactgatggctctgaagaggtcaaagaaacgtgggtaagtgacaagccagtgaagcatgtctcttgagagcacagtcttgctcttgtatgtaattttagtagaagaaagggcaagacttaatgcagattttagttgagaaggagtttggagatagacattcctctaagagatggggcaggtgttagtttgtggtactattttctcatgtggtgtaacagtgcctgtgctcttgaagcagtttcctacatttttctgtgcctactgccagtctttcacactgttataggatccatcattttctctcttgtatgttattggattatatgaagtactttgaaatctttgaatgaaaagtgaagagtgataccagttcctttttggatccgcactaatagagagggacataaatgtggagaatgtaaaacatcagacagtccccaagtcatttatatttgactttgagataagattaaacatctggcatcttacataactctgcccttttaaggcctgacatccaactcttccctgcagtgaaaggcctaagttcagcttttctgaagatactccaggctcctgtaagccactcagacatgattggtggtggttttctttttagtactgttttccaagaaggaaggaatttggttctgactaaattaattgaaatacatgtgcttttctattgaaattatgtaaaaagatgaccttttgtatcctacaacttattggaagtatgttttcagagtatatttaataacctgtactgaaaattaacatctaactcatctttagcagagaagatataaataatatattgtcattgatctgcctatatttttgtctagatccaaaacagacaatagtagccttctagaaagtagtgcctttaatgactaacggtgacataggtgagaattgcctgcccttggttgaagctggggctacttcataaaggcaagctatgtggtgtggaaatagtatatagaggttccttggggcacgagtgtgtgcctgtgtgtatgtgtatgaattatagcaactcttagtttcttcaaggggcttggaaaggcttttggagataggaagagtgaatataggaaagttcctttggggaattataactcaaagcatatataactcaggaaatataactcagaggatctgagttatagattatagagtactgaaatggaacattatccatacagaattacataggccatttaaatccagggaattgcaaaagggaaggctttgttgtcataagaatgtcttttgccagtgaaaattctattctctacttttctaaacttcttggcactggaaaatcctagcctagagggtaccaagtaaggaaaattaagatgatcttgatgcagtacttcctagggaattttactttaggactgttgacttgaaagtatgaagaaaagcagagactgttgcagtttgatgtgaaaggcatttgtcagactaaaaaatactccacacatccaattgcataaggcatctactagtgtttaccatgtgtcaggaaaacaacaatgtgaatcaaaaagaataaacagcccattatctgtggactggtacatttgaatttatgcagataagctaaggttgctataagaaatatattccaagtgccaatctccagcctcgctaatagtgcaggaagaaaggccgataatgaatcagcatagggtgaggcatcctttttgtaaaagtcttatatttgcttgtttcatttctttcagttaaattcttaactgtttttctcccttgagcactctctcctaatgctagcaggcatgatgccattatctatatgggcctacagagccacatgcctggtcatggcctagtgtaaattcctacatttctatttcaagacaatcagtagtatcttatgaccacctctctaccccagctccattttcatccttcaggcagtacagttgactcagctctgcaacaacaaatgagccagttaaagcggagggcattccattgaaatggtgctgttagctaatcagcatggatacagttgagaagcccagggcagctctttcctttcttggtttttagttcaataaaactatatctgctattgaggtcatgctggcttccttctcttacctagtccactccttgagaattataatatctattatttttaaagttatctcttcccaagactctaatatcttggcttttttttaactgaaatataatttacaattaatgcacagattttaaatatactgtttgctgggttttgacacttgtatgtaccagtataaccactacccaaatcaagatatagaacttttccatcaccttaaaacgtttcatcattaacgctcaagaataagtgatactaatctatggtgatagaaatcagaagagtggttgcctctcaggacagagaattgaatggaaaagatagaaatcaaccagcagtaatatttaattttttttttgagacagggtcttgctctttcgcccaggttggagtgcagtgatgtagtcatggctcactgcggcctcaacctcccaggctcaagtgatcctactacctcagtgtcccaagtagctgggagtacaggcacaagccaccacacccagctaatttttggagtttttctagagatggggtttcaccacgttgcccaggctggtctcgaactcctgggctcaaacagtcctcctgccttggcctcccaaaatgttgagattataggcatgagccacaatgcccagccaataatatttaattttaatggtagaaaggaagcttcaacggttattatctttatcttatgcctccagtcagagttagacctaaatgattcaaaatatctatggtttttccccccttcttaaagatttcaaaagaagattgtttaatacttcacttgtatagcagtgacaacaacgtggtttaagacctttctgttgtttaaactaaatctctattgaggtcattgaagttcatttccttttttatataccaagaaaaatgtaaccaacatttatatacaggtaagatttatggccaggaatggccataatgtttgctatcaatagaatatttggtcagagaaatgcaaatcaaaaccacaatgaaatagatcatctgacctgttagaatggctgttatcaaaaagacaaaaaataacaaaacctggtgaggatatagagaaaaagaaactcttaatacgctattggtgggaatataaattagtgtagccattatggaaaacagtatggaggttcctcaaaaactaaaaattgaactaccatatgattcagcagtcccaccacttggtatttatccagaggaaagaaaaacagtgtatcaaagagatgacgctccctggtggtctagtggttaggatttggtgctctcgctgtctctctctcttgctctctctctctctctctctctctctcactctcactgtctctctgtctttcaaagagatatctgcacccctatgtttattgcagcactattcacaatagctaggatatggaatcaacttaaatgtccattaacagatgaacagataaattaaatgtggtatatgtacatagtggaatactatttagccataaagaaaaatgaaattatgtcattcacagcaacatgaatgatcctggaagccattatgttaggtgaaataagtcagtcacagaaaaataaatacctcatgttctctctcatatgtaggatcttaaaaagttgagctcatagaagtagagagtaggactgtggttactggagtctggaaaagggagatagtcagaggttggttaacagatataaaattacaggtagggggaataagttctagtgttctatagcactaaagggtgaatatagttaatgataatttattgtatattttcaaatagctagaaaagaggattttgaatgttcctaacataaattatttttgatgctagatatgctgattaccttgatttgatcattacatattgcatatatgtattgaaatatcacttcataccacataaatacgtactattataatgcatcaatttaaaatttttaaaaagagagtatgtgatagactagtcatgcattgctatgctggggacagcaaggaacatgcttagaaggctggggaccctacttaagcccaacatagtgcatagttttagtctgaacccatctccactggtaaatccatgaaccagtgaaactaacaatgaatatgtaaaattgacatcttagcacctccttgacagatgtgtttaaaaacaattctgttttgtttatccacgttaggtatatgacagtctctgagaatcttaatagatcctttgtctttctgaatgaaaaataatctgcatcttaatttgaggaatagggttattctaattatatctgaaaatgcttttatattcagcagtgtgtttgctgttttctttactatagtagtaatcacatagaatgtttgccctggagggaacaagcataggtacgccacagaagataatgaccatttggatatttctatctttttttacctgcatctttggcctggattccattttctttacattgagttttatctattgctttcttactgttttccctgtttgctctggagctgttttccaagccaatcctgttgtataattgaatttatcactagagggcacaagtggtcaacagaaaagatattggtgagcaggcagaatggtgccctaaagctgagcagaagacaaattgcctttgtttttaaggaattgttgaaggaccgggttcaatgtagtaaaggtacttgcctcccaacttttggtatcataggattggaagagaatctagagatatcttggattaggaaccaattttatggttaagaagactgaggctcagagaaattaagaattatttgggcatgacatctctgctaggtgagcaacctgtaccttttttcagggaacctctttgtttgactgtagtgaagcaaacctgaaattaggacttacatccttttctattccttattcatccatttggtttttttactcagcaggttacatgttcgaattgacttgctagtagcatctcacctccttgagtgaaggaacgtcttcttgaaggacaacttaaaagcctactcagagtatcaagattcagtgggtagagcatcagcattcttctgctgtccttgacataggtgggtagttatgtatgtcaggaagtaagacttttcatacttttcttttcccctagaatctctattgcttttagataaatcaggtggcactcaatctgaacaaaatcactgaaaccttaccctcaaagttagcaatgtagctgtccccatccagaatgcaatcagtaggtctggattactagtcatccctcaaaactgattggtaaaggagatagtgttaaagagttactaaattatagatatcaaggtacctgccttagataactgggggtatgctcgtggagagatctgttggtaaaagtcttctaaaagagttaagctattaaatgcaaggttttcaaactacatgaaagaacacaattggaatttgctagcagagctgagttttgaactttaacagaaaataaatgccatagaaataaatagaaatataccagaagccactaaatgcattttccattttgtcctgccttcacttttgtaagcatcttaattcaacaagtgcttttaagcgccgattatgatcaagcacttttctagattctggggatgcaacaatgaacaaacagccctgctcttacggaatttacattctagtgggggagacagacaaaataaatatataaagtaaatactatgttaaaaggtgatacgtgctatggaaaaaccatatagagtaggctaaggaggaatcagaagtgccaacatggaaggaggttgacattataagtagggtggtcaggataggccttactgagaaaatatgatttaagcctagtcttaaaggaagcaaggtgggaaactatgtggatatgtaggggtagagtgttatggacagagggaatagcaattgcaaagaccctaagataggtgtctggcatgcttgaggacaggttaaaaaaaatcaatgtggctacagtggaatgtgcaagcaggccaaatggcatcgactgataagttattataagaactttggcttttgtagttttgagcacaagagtgacatgattatatttatattttaaaggattactgcctgctattttagagaatgtactctgggaggacattggtggaagcagggacatcagttaggaggccattataatacagtaatccaggagaaaactgacggtggtttgtaccaggataatagcaggcagtaaagatgctgagaagttgtcatattcaggatatattttgaagttagaaccaatgagatttgctgttttcttggatatcaggtgagaaaacagaaggtcaaggttgacactaagactttttagctaaggcaactaaaagcatggaattttattaattgagatggagaatactacaggaagaatacagaatacatttggtgggggaaaagtagacatttggttttggttttagaattgttaaatctaataggtctgattgacatatttctacatggaaatgtcaagaggacagttagatgtaggaatctgcaattcaggtttaagggccaagctggaactacatcttggatatcagtaaacctaaagattggattttaaaaccatgagattgaatgtgaccacgaagagaatgaatgtagacagagaagaggccgaaagagccctggagcactccgaaattcaaattgaggagaaggggaagaatcagcaaaggaaactgagcaatcctggtacctgaccctgagaatatggatgcagtttccccctttttccaaaacgaaatcaaacaaaacacatggaacaataggcagttttatcattgttcttattttacctttttttttttttcaagggctatttcccatgaaatctgctcagtctgtttataaatggaccatgcaatggtataggagacctggacattccagggcatcttctggtgtcttttgagctagaaattgcttcctttctgcaaccttgtctagaggcctttgaagtccagggatgtcataagactcttcttactacatcagagggattctattaattaccatgtctgcaaatgatctgttaacttacctcttggtctcctttgccaaattttcttcagctctattacatctttgaataaatgtcacttcaatttcagttaagaagactcttgaggccggccgtagtggctcacgcgtgtaatcccagcactttaggaggccgaggcagatggaccacttgaggtcaggagttcgagaccagcctggtcaacagtgaaaccccatctctactaaaaatacaaaaattagctgggtgtgatgacgcccacctgtaatcccagctactcgggaggctgaggcatgagaatcgcttgaacccgggaggcggaggtggcagtgagccaagatcgcaccactgcacatcagtctgggcaacagagcgagaccctgtcccccccaaaaaaagaagactcttggaaaaacttttattagaaataaaacaacacctaaaagttgttactgtatattaaaatttgatttctctggggtggctagaatgacagttacagactaaatttaaagctaaaaaatactttaaaggtcacctagttaacactgtcattttaaagttaacagctgaggcccaggagattaagtaccttgctagtgtcacatagttgtagtcctagtgcacagctgttgcactaccttccaaatttgtatctttatatctgttatatctcttatatcatattacatactgttatgacaaataatatagcataatagttaagaggacacacccaggagctagactccctgcatttaaccccagcttaaccatttaactactttggataggttatttaacctttgtatgcctcagtttcctcatctgtaaagtagggataataatagtctacctcttagagttgtgaaatgaaaatgagctaatacatttaaatagagatgattacaatccatttaaattattttccaaatctacaagttcctacatctggatgagagtaaggctttcggaatacttttattggccttaggatcacatgattttgaagttattaatttatccttaaagaatggattatttggagagtcacagaagtagccccaaatcttctataactccaacatgtgttctgacacataactgaagaattttgaggaataaggtttaaaggagattgctgaagtagggggaaagaaatgagtagaaaggaaaggaacaagaactaaatgtttcaaattgtgtttggaacctgttaagcatctgatcaagtcaagtccctgcagcttctctgtcaagcaagcaggctttcatttttatgcctaaataacccatcccatttatgcttctttgccagtgcttccaacagtcctagtttcagagatctttactattttttcccaccttcttcctttgagtaaatagcagccctttttctccaatttttcacagcgttgcttctggctatttgctggatcctttctctcgagcagaattttttaatcttgtgaaaccactttatctgctggagggtatccagcaactttctgtccactctccaccaccagtcagtatttttgccattctccttttaggtaaaatcctaagtctgttttgttttcctctctctctggggctcgattgcctaatatggtaaggtatttcccagacaagattgcgctgtggagttagaacaacagtttgtctaagtttaaagacatggtaggtgagctatctaatagttatttatgtagtaaagtaatatttttttttgcagtatattacataacaaccaaaatctattttttaagcaagcctctgttgcttttaacagacttaaagagataataaaatatagatttttctcctcttaacctgtttaggcagatttttttttttaaaagggaaagatagctcgtccccagaatgaaagggttttgaaaagtctgagaaatttgataacatgataatgttcataaggatataaaagtaagggtaaacttgataagcaatggctgttataaacagtcctgtggtagccagcctctgggaattggcaggcattccacgtgtagaaaagcaagctgtcctggatttctgcaattgatgacgatgcgcagtcccagggaaaaagatagagactgagaaatggcagccaaccaactctgtatgtgggaagctgcctgttatccagcatgcactgaggaatcttctctagtggttgactccacattggcctcgaaggatctttcctctcactgtacatttgctcttgctttgcaactatagtttcttaaaatactgcagatgctgtgattttctatatatgggttgtgtcttgctgtagcccaagctgtataaaccatcttaagaacaaagtttcttttggcatcttccttttatggactctattaattttaggtcgtgctgttgcccaggaaatctcagtaatcaaagctcacatgtattcctttgagaccctgtaatttttggacctagtgtcccattacatcagtgaattctgctttaatcataaatcttttttaagatagaataaattgatctttgaggtatctgtttggacttctctcatgcatctcatccaaagatgtgaaaggtttatccagctactaaggatagtatagttaacttcttgaccttttctttttttgatttcttcttctgcctccaattgctttcaagatattagtttgtgttagtgacttgtgaccttatgtctttttattataggaacagagatgagcttaaaactctgctggagctttttaaaaaaaatgtttataaaagatagtaaatttcattaaagaaaattcatgaagtatagaaaaatataaagtggtagctctcaaaagcagcaggagaattgctaaaggagtttgtaaaaattcatagggctactttcagggaatacagcgatgggggatgttctgcatgcattaagtggaaagggtgagagatgctagatatcctaaaatgccccatatcaaacaagtatcctgaagcttgcttgacttttgactgtctcccttgacagtcatagatgaaaacctatcagttatctgagtctaaaaccaaacttgattttatgtttaagctcatttttgaggggcagtggggaggaagacagttctaaaaattcaaccaccatgtaaatgaggagaaactgctcttagttttatttatccctgacagcaatgccacttacataatgcgtacatcatgctacacgttctgtagatctgcatttaacctctgccttcatggtaactatatgatgcatccaaatctctgactgcttctttatgccttctactttactggcccaagcattaacacattaaaatacatattttattataaagtgctttgctctttatttcttcttcatattctgttatttttaaaatgattttagttttatatcagtgatttttatttcaggatagtaagggggtgttaaaaatatttgttatgaaaagggattgtttcagctatgaaagctaagaaaaaattgtccataaccatccataactatacttttcagaagaaattattaacattctagtgaatttcctgctggtatttttccaaagtttttctttttaaaaaacgtattcaaaaccaactaatgacattctttagaaaaggatcattgtcaacttgagcattcctgggacaccatcattactatgatgacaattttataaggttgtcttcaaagcacttgggttcaactcttttatcaaagtagtcctatgatggcgttgatcatagacagccccaggaataattgtttctctttcagttggagtctaagagttacctcggttacagaagtattcatttctcctgttgatagcatggctggagagccttaaccatggcttaggcttagctaatgttagagttctagccccatgattgaggtagaaagcttgatgtgggatttgaagtcctttttcagcaaatggaatgtttatagatttgccccagcaggaatgttgagcttaaggcactaacagacgttacctttagaagtgttattttggtagaatctcaaaggtaggatagtaggactacctatcccaagctgtaaagcttcctgtataaagcttgtaaaaatgtaaagatgaatggccaccacctcccaattttaacttttctccatactgtctcagtcttcagtaaagcaagttcaaggatcagatagcagccatttagtgacatgaatctcttcgtagagaaaccatagttttgtaacctagtatgatcctttaaggtacataaatgttcacacagatgtgccttcatagaatatgtacttttaagaaactcttaacttttttatagtttaaatttttaaaaatgttttattacaacctgaactcttacaccttaaactatgtcagtattattggctaccaagaggaaagcagggaagttttaaaaatccattggcaaattaatacctagcataatacataatacaagtacttattatggtcttggagcttatagctcttgttatgtttctgaaaaattttttcaggaaacagaagcattttaaaggcaaacaacatgtttgagtattatgtcaccaaataaaacattgtatactttaagatggcattttaggagttggaggactttcaaaagtgatatgccaaatgggcgaaacatggggctgtttatggtgactgaatgctgtatttctcatttctcgaaatgtctggtatagctactacttgctggctgttgtgaagagtcaacactctgcctttctgaggctgatagggaaagcagatgtttatacctattctccggcagaacatgttggtggtgggacagtggtagcagcctcacttcatctttggcacgtgatgctctaggtccgcaaactttttatgaaaagggcctgatagtaaatattttccactttactggccacgtaatctgttgcaatgactgaactccactgttgtaatgggaaagcagccacagacaatatgtaactaaatgggagtgactatgttccaataaaactttatttacaaaagcaggccggtggactggatttggcctgcaggccacgctgcagtttgctggcctctgctctaggttactgatagaaaaagtatttgctaatgtcaacataactccaaatgtcaattttctctcatccaagcacttctctgataactcagcattgtgccaattcccgattctttgttatcagcaacagtttgttggggaacatcatgtgtttagagggataaatgttgtttggggcagcattaatgagttttggtcatgcagcaggaagcaagctgtaaaacttcctgaatgagaaagtgaaggagagagggggagttgcttccatgtcattttaaatatagtctctctgttatgttttagttcattaccttttgaggagaaagtctgaaatggttctcctagcgtgtccctatctgtttttctcatctgatcctattccttcttacttcccaaggaccagtctttgaggttagctaagattatagttgggaatatataatcacttaatacttgaaatttagcttttgtagattatgaccgtaagtaaatttgcctttaaggctcacaggttcttggaagagtgcctgtcagaagattgttagttgctgtcattcactttaattgcttgttgtcatttgaattccttaattaggagtagattatggaatttactagtctttttgccttgtcaacgcttagtctactgaatatgtgcaggaaaaacattttggggatttgtggaggggatgacagaaatcttcaaagtgatgaccctgtgcttgcttgaaatgatagttaggagggatggatgtgggggaagagaagctgaaatcctgattcttcaacaattttaaggaaaaaagtgatgaaaactgacattaatatgtcacagtaaagactcatataaggtgtgggaattgagcatgggatggcataattaattttgtgccaaataaacaaaatcagatcctttcttgagaataaatgttcacacagatgtgcctttatagaatatgtacttttaaaaaactccatatatgacatgttgtatgagaaggcctctcttagatcactggtgacctctagtactttggactaaaactaatgaaatattatttaggcagtttatgtatcatttctggagttcttgacttagagctaagggcgtgtgtagatactgatatccagcaagctgagccattttcaactataataacctaatgggtaaagcttctatagtagtctccttcaaacctgtcagtagcaatcactggggttatttgtttacaatgtaggtttttagacctctccccttgagattctggataaggaggtgacatggtggtagcgggtggaagtcctggaaatctatattgtaaaggtcttccaaagtgtttcttaacaggcaagtctgatggatagtgttcctagaggtataatgtttagggattgctaacatcccaggtaggccaatcattaaagagtaggattaactgtagcacactaaagaagcttagagccaacctctactcctttctgtcctcccgaaatacacatttaacccagagtaccaaattctcaaagaccctctaggacaattgagtcccatttgggatgtcttttgctctcatgcagcatgtgtttattcagtcaacatatatttattgatgagccattatatgtcaggcactatgcattagagatgcaaaaatgtacaaggtagacaaaattcctgacctcataatactcacattttatttatttatttttgatatgtattatagatattggagttatccaatacaagttttattcaggcaagtatatatatattatatattatatatttatactaatataatatataatataataatatttatactatttattaatttataatataatttatatgtattaatttataatacatataaattatatccaaatttatacaataatttaaaatataatttattaatataaatataacaattatatcataatataataatatataatatatattatatatattagcagagtcttttaaagtttatttcaataattttggggaacaagtggttttttggttacatgaataaattctttgatggcgatttctgagagattttggtgcactcatcatgcaagcagtgtacactgtacccactatgtagttttttttttttgagacagagtctccttctgtcgcccaggctggagtgcagtggcgcaatctcagctcactgcaatctccgcctcccgggttcaagcgattctcctgcctcagcctcctgagtagctgggactacagatgcccgccaccatgcccggctaatttttttgtatttttagtagagatggggtttcaccgtcttagccatgctggtctcgatctcctgacctcatgatccacctgcctcagcctcccaaagtgctgggattacaggtgtgagccaccgtgcccggcatatgtagtcttttatccctcatccccattccacccttccccctgagtccccaaagtccattatatcattcttatgcctttgctttttcatagcttagctcccactttcaagtgagaacatacgatatttggttttccattcctgagttattacacttagaataatgggctccaactccatccaatttgctatgaatgtcattatttcattcctttttatggttgagtagtattccatgatgtatatataccacaattttttttttttttttttttttgagatggagtttcgctcttgttggccaggctggagtgcaatgacatgatcttggctcactgcaacatctacctcccaggttcaagcaattctcctgcctctgcctcctgaaatactcacattttaatagggcaagggatatttctattagacatccaagttgagatgtcaagtagacagttgtcaactaggaatttggactttatgggagatattaaagctggagaaatacagacatggaagtcattgctttagtgctggtatttagagtcagaagactgggtgagatcaccaaaaagcataattaaagcagaaaagaagtcacctgactaggctctaggatattccagggctaaccctagaaaagagcaggaatatttcttccatgatacatatacagacagttgttgaatctcttgttgtgaaagtgagatcatgccgatctgacttattgtgatacatacacacatacccctttatacctagagagcaattagagcctagggtccaggtgaaagataatgtgctgagtttctgatggtaggtgtggagagaatggaacaatgtaagaaatatgaaaactcagcaggatttgatgttttactagatgtggatgataaaagcataaagagcagtcccaaggtatttgggaagatgcatggaattggctttggagccagaagacctaggttcaaagcttgttgcatctcttattagctgggtggtcttggaaaagtaatttaacctctctgagctctgaaagttctttaatctgtaaaaatgagattattatccttgttttgtaggcttgatacaaggaacagcagtaataatgtatataaagggtttagcacagtgcctacatttggtaaatttttaaataaataaaggcagctcatatggtagtatttcaccagtctcctctcctcccatctttgagctttcatacatggtattttcattctctagaattctcttcctcttactttactgcctcttcctctccctactccactttttaaaaacatattcatgttttaggttaagcaccacctcctctaagaagccttcctttgaccccctccctggaccagactaggtttcccctagcactgtgaatttatctttaatatggagtggtaatcatactatgttgtatttgccaactgactgaactccttgaaggcagggtctggaatgagatggagtctcattccagtgcccaggctggagtgcagtggtgcaatctcatgtcactgcaacctccacctcttgggttcaagcagttctactgcttcagcctcccaagtagctgggattatagtcgtgagccaccatccttggctaaattttgtatttttggtagagatggtgtttcaccatgttggccaggctgatcttgaactcctgacctcaggtgatccgcccgcctcagcctcccaaagtgctgggattacaggcgtgagccactatgcccagcctgtttcttgttcattatatttacaagaatatctagtatttaggtatgtcttctgtgaatagagaacaatgcaatgcatgatattcattttttattatgatgactgcatagataatatgccattaataagattgagaattcaggaggaagaatatgtttggggatgaagataatgattttgcttttggacatgctgagttcaagatacctatcagacataagaaagtaaatgtcctataggcaattagatacatgggtatgaagtatagggaagttccagggctagagataaagagttgaaaggtatcagcttgctgataatagttttaagctatgaaaaatacatttcccaaggttaacttttagagcagtgattcccaacttcttttcttccccagaattctgatggatatgaggtactcactgtgtaactgtggttcaatgtctcaatgactctgaagcaaaggcaagcaaaaggagcatgtttcccagggaaggccgattatcagaatgattgtggggtgctaaggagggccactgctatgaaaagagtacacagtttagaacagagccagggcacaccactgtttgagatggcagaaggggagaggtacctatgaaagagatcaacagggaaatgatcagagaagaaggaaaagagcctggaaaggagagttctgcttttagctcttggaggaattgccaacactgctttacacagtgaatactcccaccaatagtgtataagcatttccttttttctgcaaccttgccagcatctggtttttgttttgttttgttttgttttgttttttcttttcttttctttttttaactttttactaatagccattctgactggtgtgagatggtatctcattgtggttttgatttgcatttctctaatcatcagtgatattgagctttttttcatatgcttgttgactgcatgtatgtcttcttttgaaaagtctctgttcctgtcctttgcccattttttaattgggttttgtttttctcttgtaaatttaagtttcttatagatgctacatattatacctttgtcagatgcatagtttgcaaatattttctcctattctgtaggttgtctgtactctgttgatagtttcttttgctgtgcagaagctcataagttcaattagatcctactagtcaatttttgcttttgttgcgattgcttttggtgtcctcgtcatgaaatctttgcccatttctatgtccaggatggtattgcctaggttgtctccagggtttttatagtttggggtttatatttaagtctttaatccatcctgagttgatttttgtgtatggtgcaaggaaggtgtctagcttcagtcttttgcatatggctagccagttatcccagcaccatttactgaataggaagtcttttccccattgcttgtttttgtcagctttgtcgaagatcagatggttgtaggtgtgcaaccttatttcagggctctctattctattccattggtctgtgtgctgggtatatactcagaggaatataaatcattctaccctaaagacacatgcatgcgaatgttcattgtagcactattcacaatagcaaagacatagagtcaacctaaatgcccatcagtgacagactggataaagaaaatgtggtacatatacaccatagaatactatgcagccataaaaaagagtgagatcatgtcttttgtgggaacaaggatggagctggaagccattatccttagcaaactaatgcaggaacagaaaaccaaataccacatgttgtcacttataagtggaagctaagtgatgagaacttatgaacacaaagaaggaaacaacagacactggggtctacttgagggaggagggtaggaggagggagaggagcagaaaagataactattgggtactaggcataatacatgggtgattaatctatgcaacaaacccctgtgacacaagtttacctatgtaacaaaccttcacatgtaccccagaacctaaaataaaagtgtttgtttgtttttttaaaaaagagtagtattcaaccaaacaagggaatgaaaactttcaaagactcaatgtgacagaaacttaacttcttataactcaagcataaaggcttatgtagctagaaaatctgcatatttagcctggcctagctttaggcatagctaaatctaggaagctgaaactttcagatccctgctgccttctttgcataggcttcagaggaagaaagaccttccctatcctagtgtccatatatcttttttttgttttttgttttggtttttgcacacaggatcttgctctgttactcaggctggagtgcatggtgtgatcacgggtcactgcagcctctacctcctaggctcaagtgatcagcctcccaagtagctgagatgatagatgtgtgccaccatgcccagctaattctttttattttttgtagagatggagtctcactgtgttgcctaggctggtctcaaactcctgggcttatgttgtcctcccaccttggccttccaaaatgttgggattacaggtgtgcaccaccacacctggcctcgtagtgttggtatatccgattgacctttcctggatcagatgaacttccctgaaccaatttctatagccagaaattagatgagatttagcgagagaggcagtgaagcctgaaccctgaaaccaagtttaattcaagtccctcctctgctacttactgtgtaaccttgccaaattatatactccctgtgtctcagtttccttaactttaaaataagagaaatcatagtacttatcacataggtcatttctttaaatgagataatacatacaaagtgtacagaacagtgtctggcacatagtaaattatcaataaatcttagccgccatgatgatcataatgataacaatagtggtagtgctggtcatagtgatgaagaagaaacaagagcagcagctaccacttgttataggggtagggttaggagagggtcagctacatggaatagattccccacaggaaatagggattctgttatcaaaagaagagaaagagataaagggttggaaagataaattatagctaccaatagtcctctgtaatcacatccagtagtttgagagctgaagagtatctcgtaggtttgccagtaaggagatgttgctgacttgtgagagcagtttggtggagtggggctggggagcatgaaaggatgatatcttctctttgtgactcatctgcgtataacgattttgatggattttctgggaattaatagtctttggttagtagccatttgccttgtgggcagagctccaagatagtttgccgttaaaaaaaaaaatcctcataaaggcttaaacagggttcaaacagatctaatcgtcatatcatttggcacattgtggtacctgattccatctaaattgttttcccctaacaatccttagtccacatttctgctttctctccttgttaagaatagatggcaggtcaacattcttgcctactcctgcaagagcatcttgaaggaatgaaaggcaattatacttctgctgcaaaggagcattttccacatgttatgctaacagttatgaaaatagctagttattggattagttagtgaggtgtgattgtcagttttcatcaggttctcattactggtaatgttgcccagacctacattttttctctgaatatgcttctgccttttctgtgtctagcttacttgtttacaaaatgttttcagagagaaagtctaattcagggttaacaaagttctgctaagtcaccccaagattatctgggctaaaaacttcttagtttttacagagtacagttgtggaaaacagctcttaagagtttctgggttaatctagaatgatttcctaaaagaaaagttttagaagaattattaaaggaattttttcctgccagctctcccctcccaaattacagcagcacccacagacaaatatcacaaataaaacaaaactatataacagataaatatgaagaaagaatgaggaactgagaactctagcctccaactttaccattaataaaagcacattacagtgttccagacttgctctgtgaataagctgttctcagctatgtatttacgttagttccttaagttccttccagaatttatttcctaaaaatattggggcttttattgttactgcaacccacaactgacctttcaggaataaattagatttagatagtgattattagaaagctatttcaaaatagacaattaacatgcataagaaaaagtgtgtaaccttactggtgttcgaaactataattaaaattataatgaggtatctttttttttttttgagacagagtcttgctctgccacccaggctggagtgtcatggcgtgatctcggctcactgcaacctccgcctcccaggtttgagcagttctcctgcctcagcctctcaagtagctgggattacaggcgaccactatcatgcccctctaattttggtattttcggtagagatggggtttcatcatgttggccaggctggtcctgaactcctgacctcaggtgatctgcctgcgtcagcctccgaaagtgctgggattacaggcgtgagccactgcacccagccaaagtaacatttttttaccagtcatgataggcaaagactttgaaaagataatgcccaatttagccaagaatgtggtgaaatgggccttcccatattttactgttgggaatgcaaattagtcattattttctgaggagcaaatggctagattgacaaaagtcccaaattgacccagaatagccccctatgaaaatgtatctctgggaaacagttctaaatatgggaaggagggggattttatgcacagaaattgttatcacaaggtatgttatatataggcagctctgtaaatattcattctacaaatacttgagtacctactatatggaaggctattaggcactattgaacaaaacagatttagctcgtttagctatttataatagtggaaatattggaaacagcctactgtccagtattctggcagtggttaagtatactatgatttatccatctaatggaacactatgaatcatagtttgctttaccattccccaccagctagccatttaggggtgtttccttaaaatagagtggattataaggcagccatttaaaagtgagttacaaagatagtatagtaacttggataaatgcttacagtatagtattactaaatgaagtagatacacaattgtatatgtcatctgattacaaccataaggatgtagcaggcccaggtaaagagaccagggagaaagtgagcaaagtgttagcagtggttgtatttctgtgatgagactaaatgtgactttttttctgcttttctttatttcccaaattttctttaatgaggccttgttatttgtgtaatttttccccccttaaatgctttggtaacacacttagaaaaagtttgcatgaaagtgaagactgctcagtggctatttcgtgaactgagtgggaattttgtcagagaactttatccctctcttttgactgattggctatttcagctctggtggaagtatgcaatagtggatagaaatctgctggacactcacccttaatatagtctgtctatacatatatagcagcgttgatgcaatacactgtgcctcacaaatagcaatgtagatgataagatgctttttgttgtttttttagaaaacagtatgtctttagtatgttatttgaagactcgggattatggctagctgtgtgccaactttccatccttcagacctataaaatctgaatcagtttggttttttactgcattgtggtgaaattaaacaattcacataaatttttattgtggctgatagtcaaggctctaggaagctctgagatttaatcttgagttttccttgccacttcaacccaattaaaaaatttttttttttctttttcttttgagacggggtctcactctgtcacccgggctggagtgcagttgtgtgatcttggctcactgcagtctccgcctctagagttcaagcaattctcatgcctccacctcctgagtagctgggagtataggtgttcaccactacacccagctaattttttttttctgtatttttagtaaagatgggcttttgctatgttggccaggctgatctcaagctcctggcctcaagtgatccgcccacctctgcctcccaaagtgctgggattacaggcgtgaaccactgtgcctggcctcaatttaaaaattattaatccactcttaacttccatttagtggaactccaattttattctttcttttctcattgtcttccctacatttctgttcacatgaaatttctaattgtacagactttgcagtgtgcagagtcaaatctctcatatcctgtaactttgctgcatgctccttagttttttctttatctacacatatatctggtcagtttgatacatttttttcttttttggtcttctcagctattagaaacagacatgtttgtagaaaagaactcttaccatttgttgcgtctgggacttgtgtggagggtttttgttttggtctgggttggtttgctttttctatttaaaacttagattgtgtgtacacccacacagaaacttcatccagctaccaggctattcctttgtagagtggtgatcaaacaaaaatatgcatctggtgattctttcatttgatttgaaaactgatttcagaaacacattattttcttcttttacctggcagattatttctgagcaagctgaagaatggaggactcagcctacttataaagtaccaaactgttaaggtcacagaaaattatttctggaaggtacattagaagttgttctagcccaactctcttattttacagatggaaaacctggggcccaaaagagggcctggcttagcctaagctgtacaatgacttagtggtagaaaatgaactagaacatttctgaattcccagtccagcattctttccactaagctgatggctgtcttccaggtgcaggagtgcaggttggtacttattacaggactctgctggctgcagtggctctttctggtgctgtggaaagtaccctcttctttgctcagtctgattccatttatgggaagcagtggtggagtttgtacataagatttacagtaaagtctgctgctgtcccaagtttcttaacctttttaaagtcatcttccttccatttctgatttcctagtacatctattatttatttcaatgtaaacaaattccaaataatggaaatttgtctctactacagcttattcaagtttgaactttgagtatatatgctaatgtttacagactggtgagatcaggaaaattgaactgctgttatttcaaaagtgaaagctactctgggacttctaggtcagggtggcagagtgaatactcctgaatcttattcctctcattcaaaaacagagaaattatgcataaatatttttaaaggttttaaaaaatacatagttattcttaaaaataagaaagaaaagtctctttgggccagtaatagaaaagccactatgatggcaggggatcggggggtgctatgaatggatatgggcaattgggaccaggtttttttgcaatgatcctgtctgtgcatgaacccaggacccaagagcacaatacaaataggagctgggctaatctaacttatcccagcagtgtcacagccaggaataagctgcttgttcctgaccagaagtaaagaagaattggcagtcacaagcaagcgcaggaaaccactcaagataggacttggacccaaaatacttttgggctaaaaattcagaactgggctacctaggaggaaagaagacccagagctaccaacttaaggtctggttcaaggttggcacattatcagatttaagctgaggcaacttaaaactgccctatagatacaggtacttacattttttagttatcataaaaattgagcccccaaaacattacaaagaacccagtaaaacctaagatcatgaaaaagcagtcaagagaacccaacaaatgagagaatttatacctgagaaaagaagaacaatctggtgagagtttaaaaataagttaaaattctcaatatatgtacagaagaagttagattttacagaatgaagaacagataatgaaacaagaagagaaagctgtgagaaagaagcgtttagacatcttgaagtgaaaaatattataaatacaatattgaagtaaaagaacagttagactgcacatactttctatagcttaagagaaaattacagaattaggaaatagaactgagaaaatctttcagaatgcagtttagagagagttagaagaaaatgaaagagaaagatggacatgaaagatgacctgaggagctctaacatacatctgctaggagttgcaaaggagaaaaaagaatgaataaaaaagtggcaataataataacaataactgcagctaagaattttttcagaaatgaagctgagtcttcaaaatagaaaatgctgccatatgtaacacaggatagataaatccacaactacatacatgataataaaatcgtaggaaattaatgataaagagaaaatctgaaattctgaatacaagtataagaaaaaattctgaataatggaatggtagtcaaattggcagtaggctttggcaacagtagataccagaaaactgactagtatcttcaaagtgctgtagaaaaataactgtgagcttccagtttcatacagtggtttatatacagagtgggagcaaaataaacacatcttcagatacacgaagctaagttttcaactcacaaactcttggtgataaaagaactaaaggatgttcttcagtaaagagaaaaataaatgcagaaagaagtggaatactaaagcaaagagtgttaaaatatgagctaaagctaatatgcttcaaaagctagaactaaatcttagcaataataatatggtattaaagatgtaaatgtgtgctaaagtccttgttttgagtagaaaagatacagatgaatgttatagacttttaaaaaatatatatttaaataagtatgttaaatataagggtatccagtatagtaatagaaatatagaaatagaaggtacaagtccttaatcagtaggggaaagagaaaagataggtaatattttaaatgctttcactccattcaatagagggcaggaaagaagataaaaagaagcaaaggaaaaacatggaaataggaaatacaaaataaaatatgtaagtagtcataatataaattaatctacaaagccagagagatagtcagattatccttccatatgctgttttcaaagtaacactgaaagataaaaaaatacaagtataagacaggaaaaattttctcttggttaccaccaagtgaaagctggcagcatgaacatcatttgaaacatgaacatgtttttgctttaaaacagcaaatgacagaaatatatgtctcacttataaataaggaacaatccatgaagatgatataaaatgactctagatactgaaaatatactctcaaaatatataaaacaaaaccgacagaattatcaagaaatagcatatccacagtcagtgttgcagattttaacacacctctcttagaaaccagtatatcaaaaagtcaaaaatactcaagaacataaagaatttgaacagcataattaaccagcttaatctaacagatatatagcacacatagggcgtgtgtattgtgaccatgctaaatgaaaagtcaacattcactcattcattcaacaaatacttatttgtccaatatttgccagatattgttcgaggttcttggaatcctttagtcaacagtatagacaatgatcctgacctgttgaagtgtacattctagcagggagtaagatgaaaaggcagacaataaacaacaaacataataaagtatgtgttagacactgatgcaatttggaaaaaaaactagaaaggagaattgaataaagaggattggatggagaaagtacaggttgtaatataaacagtgggtctgagtatatcttattgacaggttgagatttaaagaagcagaaggagttagccacaaagatatctgaaggaagaacatttcttcagatgtagtgtagtgaggtcctctagcaagagggtacagctagagcaaaggccatatggtgggaaagtactgacacatgaaataaatgacaggtgagagtagcaggaaagagaatcagatcatctgaatgcagagcgtcataggcctttgtcatttactatgcacaaaatgaggcgccattgcaggattttgagtagaggagtgatgtgatctgacttaagttgtttttttgtttgttttttgttttgttttgtttttttgagacggagtcttgctctgttgcccaggatggagtgcattggcgccatctcggctcactgcaagctccatctcccaggttcaagcgattctcctgcctcagcctcctgagtagctaggattacaggtgcatgccaccacgcccagctaatttttgtatttttagtagagatggggttttaccatgttggtcaggctggtctcaaactcctgaccttgtgatctgcctgcctcggcctcccaaagtgctgggattacagatgtgagctaccgtgcccggccaatctgacttaagttttaaaagaatcattcaagctactctgttgagattagacttcagacaaaggtagcagctgagcagctatttcagtaatccaggcaagaaatgatgacaggggcttggatcacatggtagcaatacagttgttgaaagttggttagattctggatatatttgaaggtagagccaacatttcctggaagggcttgtgggatgtgacagaaagagggaggaattttagatgattccaaggtttttgacctaagcaactgataggatagagttgccatcaactgacatggggtaggctacaaatgaagcaggttggggaagaaaactaggaagccaatcttatttatttatttatttttcccatagattttgggggaacaggtaatctttggttatatgaataagttctttagtgtgatttctgagattttggtgcacccatcatccaagcagtgtacactgtacccaatgtgtagtcttttattccttacccccctctcacgctttcccctgagtccccaaagtccattgtatcactgacaccttttcgtcctcatagcttagctccctcttatgagtgagaacatataatgtttggttttcagttcctgagttacttcacttagaataatggtctccaattccatccaagtcactgcaaatgccattatttcattcctttttatggctgagtagtattccatgttgtgtgtatatatataccacaatttctttatccactcattgattgatgggcatttgggctggttccaaatttttgcaattgcagattgtgctgctgtaaacatgcatgtgcaagtatttttttcgtataatgacttcttaggaatccaattttatttttttattttttggacagagtctcactctgtcacccaggttggagtgcggtgacgcgatcttggctcactgcaacctctgcctcctgggttcaaagtgattctcctgcctcagcctcccgaatagctgggattacaggtgtccgccaccacacccggctaatttttgtatttttagtggagtcggggtttcactgtgttagccaggctggtctagaactcctgacctcaagtgatcttcccaccttggcttcccaaagtgctgggattacaggtgtgagccaccacacgtggccagaatccagttttagatatgttggtttgagatacctgttagatttccaactggaaattttggcagtttggttatacagatctgccaaaatgctgtggagtatttagatgatatttaaagcaatgagactgtatcaaataacagaaagaaaatatagaaaagggaagagggcccaagaagtatctggtgtcctttccagtgtgagtgaaaaaaaaaaatgtatcatgaaagaggtagttgtcaacagtgttaaatgttgctgatagggtcatataagatgaagactaagaactgaccattgattttgataacattatgaccttgataagagtggttttgttcgaatagtgggacagaaagcctgactgaagtaattttaagccacattgagaagagaggaattgaaaacattgagaaaagctttttttttttttctttttttttttttagagagaagtttttcaggaaggggggttagcaaggaaatggagtggcagcttttggggagagtcaagaaaaggatgttttttgttttgagatggagtcttgctctgttgcccaggctggagtggtgcaatggtgcaatcttggcttactgcagcctacgcctcccaggttcaagtgattctcctgcctcagcctcccgagtagctgtgattacaggtgcccgccaccacaccttgctaatattttgtagttttagtagagacgggctttcgccatgttgaccaggctggtctcaaactcctggcctcaggtgatccgccttggcctcccagagtgctgggatcacaggcgtgagctgccacacccatccagaaaagggtgttttttaagctacatgtttgcttgtgagaatgatcccaatggagaacaacaacaacaacaaaaagatgatgtgggaggaagaatggagaactgctgtaatgaggtccttgagtagggtctagggtacaagttgaaggatttgacttcaaatagaagcatgttagattcatcaatggtaacaagtgaggagatgataaatggtggttaaatgtggtaatagtttgtggaagttcttttctgattgcttcagttttcttagtgaaatagaaagcaagaccagcagccaagaaagaacgtgaggaaggaggtgttgggtgtttgagttaaaagggaaaggggtaaagtatttatctaggaaagtaaatggactagggaagtatctgtgtgtgcattatagtccactaaaggttcaaagtaatgaatttaaattgagaccaatgagcatggttgtatgtttttttccagccacatttagttgcacaggtgcgggtgtggagtaggcagaaaattggatttaaacaaggttatagttttgccaagcactatgaagggagagaggggagagtgatgataataatgataaatcatggaatgtaagctcgataaagaggagagtgaagggacatcaagagcatgagagacagtggagatttcatgaggttgaacaatgaacaatagttcaggatcaccctagtagaaagaataagctggaaagatacgatgtggagatacagaattgagattatggaggggttatagttttttgtaatggcaacaaaaagttagctgaagaagaaaagaatacttctgaaaagtataaacttccttgtagatactgcatgggtaaggaggtaattataatgagaattacaaaatagttagagctgaacaacaatgaaattacttcacattagatcttgtagagtagctaaagagagaaaactgtaaccttaaatacatgtttaaggttaaaaaattagaaaaagtgaaaataaatgagctaagctttcaactcaagaagttgaaaacagagtaagcccaaagtaagtagaaggaatgaaataaaataaagataaaagcagaaattaatgaacagaaaacagaatagcagtagaaatagtgttaataccagaagctgattctttgaaaagatagaaaattcaataagcctttttattttccaatgtccaccttgactgcagtgttctaggacttctcaaaggcatcttacatgctagtctggggcctgggatgcaaacaaaaacagatcagaggcagttattttggcaacaatagggagagagaagagtcttcaaggtcccttaaagcaacacatagaacaattgagctgcatacataaccagggcatctactttttccagctgctgcacactgagccccatcagggagggtaaaatgcagtaaacctttcaaaagctgatctagagaaaaactataggtgaaaacaaatagtatttggaagagaaatagggacaaaattaagataaacatatttaaaatataagattattttgagcaactttatgacaataagcttgaaaacttagtttaagtggacactcttctgggaaaatataaaatatcaaaatgacttaggaagaaatggcaaaacaaagaagtcccgtaacctttaaagaaatttaatcatacttaaccaccacctccccaacctcctgcccaaaacaccaagcctagagtaatttgggggatgaattctatcaaactgtcaaggaacaagtataataatacttgccttacataaactgtttcagaaaataaaaagaaggaagcgagaatctacactagattgttttgcctccaacttgtttagtaacaacaaaaagaggctaagaattgaggcaaagaaaaaccaaaataaagtctgaatacttcccacaaacagcactagaaaaagacatctgattatacctaggtggtacaggttttaaggattggacctttgactttgtgctcatccttctgtgtggaccagctttgctctttgattccagttattttaattccagttgtaatgatgggttttggacactctcagtcggtattatgaccaacagcatgtatccgtaagatagctaggtcactaatagtctgtggcatggaaaaaaatttgttttgttttaatatggtgctaactaagcatatagagattgactctgtaactttaactccagtaacacactgttatcaccacgcaaattgaccagcctagttagtaacatcatatgcaatatcatacaaactacgtagaaccatgcctggggcactcatctgttagctcttacatgccctttgtgctcaaagagaacaatttgtggttgttgtatgccagtcaattcagtcatcatggagcttagttgtttactgtattgcatgctaagcagtagactctaggaatctaataaatttgattctcacattggtcctgtttgccacaaacattgccatgcctcaagaacctcacaagtttgtttttcttagaacagtgcatatgtagttctcatactctgcaagtgtttgcctcagcataattgtgtttatgtggaattgcactggcattgcaatgtgagaatgacagagttgacaggaccactaacatgtaccctgggaattgtttcccccatccccatagctggctgaagaaactttatttctgagttattatgtagggactgaaaggttttttttttgtttttgtttttgtttttttttacatatatacacagattgttttttacctacaatgagcaaaaataatctggacaaaaaaataatgctctccctgttttttctttcaaatgtatacatatatttgaaatcttaggcatagggaaaaacttttatgtcatcttcagagctacagccatattttttagctagaaccaactcttaaatctctcccgacagaaccttaaggaaggggacaaagtgatctccaatggaaatgtgaaaggcataaaaaggaaaagttagatatctggaggattcagatgacacaaagaaaataagttgaagataaaggaaatgagagggtaaacctagtagtacaatggcatctttcatcttcaactattttaaagtatttttacctgagaacgtgaagataaagtgtatatagatggcacgtagacaactaataaatgaataaacatttacattgcatatgtcagaagtatctgcaaagcaaaaagggtgcatgccagttcattgttgataaggaagagtctttcatatactcttccaggatctatgttattattgaaaaaaaaaaaaaaagaagttagatgttaagtttgggagtatttttagtaaacccagatgaagagagcagcctttatttctggatcaactgcaaattcacaactatgaagactagttgaaatatttaaatttctagatgaatcatacatagattgcttttcgtagggccttttccttaaaactctgcagttaactaaaagtgggaaataattatttttcttaacacctgatggaccattcagcctcatttataggctctaaagaaaactaacaaaatattttaaaaaatcaagttgatgacaatttaaaaacttacatagaatttctgaaccttctttaagttataggttacattttcaagaaactgatcgttatcaaacttgtgagctgaaatttaagtgtgttgctaccaggcagtaatacgttttgcctggcatacagattataagcacaacttaactatcacagatatctttgagaactaaatggatttatttattttaaaagttattctaaaattaattctgtacctttctcctctgtacctttctccttaagttttcaaaacacctttcttgacatataatttctgtacaactgcacatatttaaattgtaatatctgatgaatttgaggaaactatctccctaattctccctaactcttaactgtactaaatatttatagtcttaacaaaaatttcagataaatcatatgctttaaagctacttattcagtgtttaactgacactatatagagcccttttgctacttttaagctaatcaaaaaagatataatataccctgttagtgcttctgatcagttcaagcatttttttttttctcatcaaggtgctgtgagcatttggcagggtaattcttcactatgtgggtctgtttctagaatagcaagcattcagcatccctgagcctggcatttgaaatgccagtagcaccctccaatcattgtgacaatcagtgtccccacatattttcaaaagctcttgtggtaagtgttgccccttcccctccccgtgacaaacctgccccttatacctttactgatgtttctagcctatgtggcctacaaaaaaagtgtgaagggggaaaagctatgttgttcacattaaaaagagataggttttcatttctgctttttgtaagccattgctaaagttaaatttaattgcaaaatactaaactcttgaaccaattctaggacaggtttgcagaatgattttcttaaaggacctttataatctattaccctgaaatgaatttctgagacttaacattcgtaacactagggcatgattaaatatatgggagcaagattgggaacattttgtcagctagtaaagttattgtgagctccatgctgtgcaacttgtatatcctgtcttgctttgcctctctgttgctgccttgtactccaaaatagcaccatctcttctccctactcccagcaacccactagactatgcagaagccattagtggatatattttgttggtctgatttttagcttttttgcttgttcacaaagaacatgtgtcaaaggccctttattacactgaaagaattgcgtgacttttctctgttctgcattttcttacatgtggaattaaggctgactctttactctaaaatgattcattttgtggtaaagtccctaatatgtctccctcactcaggagcatctgtgcaggagtcaacattaaatgtgagttatcattattgatcttctccatcacccccaaaaggggaggattttcacatcgcataaattaaacaggattgagatggaaaaatcagaagaagaagaagtgacaaagaacctcctgtttcctttagaacttatttcctgcccccaagtaatatttttggcccttctaagtacccagtaataaaacgtcgctataaaagcatagaatagtaaatgaagctgttatgaattctagactatcttccaacttggctgtgtgctgttgatggtctcctttaaaaataaattgtttgtttagtatgagatcaaaaattatttatataaaaatatatggaagagtagggcttgatattttttaacagtatggagatctttttagtgatacaaattttgagatttcctataatctctttgaagacacgaatcatgtcttacagtactttgtatatccctatccctaatagtaccttgcatagaataagaacttaatagttgttagttgatggaagaaaagtatcagttgaaaataaaaataaaaatattttctttggatcttatattcataaatggactgaaaatgactgccctgttccaaaaggaggaacagagatcttaaactatacttcttaactggtaatacttgactcatcaccttcttgcctaaatctgaactaaaatactgtatattgtatctactcagaagtttataaactaacctaccaaaaaattgatttgaggacgaggcagagacatttttgaaagactaggtaatttccacctaactgttgatctcctttgggccttaaaggaccttgtggttttgttactagaaaagcagtccgatctggaccccaagaaagggttcttagatctcacgcaagaaagaattcagggcaagtccatacagtaaagtgaaagcaagtttatttagaaagtgaaggaataaaagaatgactccatagacagagcagccccaagggctgctggttttatggttacttcttgattatatgctaaacaaggggtggattattcatgagttttccaggaaagaggtgggcaatttccagaactgagggttcctccccattttagaccatatagggcaacttcctgatgttgccatgacatttgtaaactgtcgtgtcactggtgggagtgtctcttagcatgctgatattttataattagtgtataatgagtcatgaggacgaacagaggtcactctcattgccatcttggttttggtgggttttggctggcttctttatcgcagcctgttttatcagcaaggtctttgtgacctgtatcttgtgctgacctcctgtctcatcctgtgactgagaatgccttaacctcttgggaatgcagcccagtaggtctcagccttatttacccagcccgtattcaagatagagtgcctctggttcaaacacctttgacaaaaacataccaataccttagtctactatgtgtaatgcattccaacatttgctattctgtttattcactttttattgatctggttgtggccactaaattgattcataacctaataatgagcctcattgtaccttcagcccaagtgactgcctgtttccgttagcaaacccaattctttggtgaacatataatcttagagtcctctgtaaagagagactatctttcaaagttgtcaggaattaaaaaagaaagtcacttccttgtgcccctttctcactgtagtgagatgaaaaaactctgttttttttttaaacactgttaaacttacagaaatatttcaagaataaagaattgctgtataccctttacctagagatcacattcacttttttttttttttttttttttttttgagctggagtttcactcatgttgcccaggctggagtgcaatgttgcgatctcggctcaccccaacctctgcttcccaggttcaaatgattctcctgcctcagcctcccgagtagctgggattacaggcatgtgccaccacacccggctaattttgtattttcagtagacatggggtttctccatgttggtcaggctggtcttgaactcccgacctcaggtgatctgcccgcctcagcctcccaaagtgctgggattacaggcgtgacacattcacatttttaccagttgtcctaatgaagtccatgggagcagaaagatccaatccaggatcactatacccaatttttgtgtatctctagttagactttccttgacttatatgaccttggttttttgggggtattttgttttgttttgttttgttttgttttgttttgttgttgcccaggctgaagtgcagtagtatgatcttagctcactgtatcctctgcctcttgtgctcagaggatcctcccacctcagcatcttgagtagctgggactacggtgggcaccaccatgccttgctaattttgggtttttttgttttgttttgttttgttttgtttttttggtagagacggggttttatgacattgcccaggctaatcttgaacccctgggctcaagagatttgctctccttagcctcccaaagtgctgagattacgggcatgagccatcacgcctggctgaccttgatatttttgaagatagcaggccagtcatatatgtccctcagtttaggtttattcagtgttttctcatgattagacccagcttatgcatttttggccacagtgtcatagaagcgatactgtactcttctcatttcatgctgtcagtttgtcatgttactagtggtcttgtctttgaggactggattgagatgacgtctgccaggtttctccatggtaaagttagtttttcctcttttgtgattaataaatgttgtctgatgtggtactttgagattgtgtaaactccagtttctcctctacttttacccactactttgaacatccattaatacttctttcttggattgattttacagtcatggttgccaaatggtaatttttctaactttattaccccttctacatttattagtaggcattctattgtaagcaagaagcttttctcctcctatttatttttttcattcatttatttatatcaatgtctactcatgggttcctagtcagtgggttataattcattgctatcattatttattatgatgctcttattatcccaggtttggctttttaagcaggcttctgtgtccttgtgtcatatcatttaagtgttgtttgaggactttctcaccttctagcacaagagatcaggctcattttctttccttaccccagctctggaattagccatttctccagggagccctgttcctcttagtacaaagtggcatttagaaacaatgatctgggcactaggtacgctaaatgctgctggagtgttgctcttcccaggcccctttcagtggacagagctaggaaagacatacatatggatgcatttgcttacatatacatgtacatttacatctttatttctttatctatctatattgaaaatcatgagttcataccaacatggggttctttctagctttccctttttttttttttttttgtatttatgtctgccttctctaacaatgagaaacctagttgccattttcaatatgtttacttatttgctcaatcccttgtgtaaagccaatcccctaactagaccgaagtagaccaggctactacctcaccactgtaccctcctcttattgccagggctctttgccttctaagaaataaggaaagctgggaagagggaaggaggaagataggtagagataagttttttcttaaagcatttgaaaaggagattctatcatctttttcagtaaccttttacataatcacaaggaaaataaatgcatagaatataaaaactgatatttaagctcttttttcagattttcatttggattcttacatatattttataaatgcacatgcatgttaaccaagtatttttttgtgataatgaccatgtattgagcatgaccgcatgctaggcactgtgatggatgattatgtgtgtgtgtgtatgtgtgtgtgtgtgtgtgtgtgtgtgtatcctaaaccatataacaactctgtaaataagcatccttatcactgttttgggtgatgaaccaagtaagattcaatgaggctgaagaacttgatcatatcagtcagttaagcaggggttagaatttcaatccaggatatctgacctcaaatacacacccttcccaaaccatgtgtacagcaccatggtatattgctagcattggaaatcatcactggggagcattttatcaaacatcacccttaaaccatgccatttaggtttttttaatttaaaaaaataaaaagaggaaaaagtagaaattactcaactggttcattaatttcttcctttactaacttttgggagagttgagtcaatgagagtcgatgattagtattcacatcatgagacattttattgacttattcacacattagatatgtcccatctaaaaaactaacatatgcagttcctctatttgatagttcttatatttgttggaaactctgttgagccgactacctggtgctcttaattccattataacaacgccctaaagtttatagacttttttcttccctcttttttacctacaagaaataaaatagatgaactcaacatcctatcctgcttatctggaatgagttattttctaaacaagtggctgtttgcaaagctcatcctgtagaagtctgtggtcaagaatatttccattcagttcttatttttacaggggaattaatatcttttcagtcagaaaggaacaataaatgcttgttggctgggttgaaaaaaattaaatctacaaaaagacaagtgaagaaagaaagagctcacattcaactttctggagaatttatctctgtttctctgtatatctgatgtgttcctgcaagtgtctcaaatacccagaattttactgaaggatttgaattggtagatcttttcagatctgtttttactttactttaatcaaccaaagtttattcttcaggcagttgtgttttgctcccattttactggctgtgtgtctttggccaagacacttaacctttcagaacttcactttcttcatctgtaagatagtaatatggtcacgagtcccttaacgacagggatacattctaagaaatgagtttttaggcaatttcgtccctgagcaaacatcaaagagtgaatttaacacaaacctagatggtacagcctactacacacctaggctatatggtatagcctattgctcctaggatacaaacctgtacagcatgttactatattgaatattgtagagctggaacatgataagtatttgtgtgtctaaacatagaaaaggtattgtaaaaatactgggtaaaagattagattaaaaatgatatacctgtatagggcatttaccgtgaatgaatgcaccttacaggactagaagttgctttgggtgagtcagtgagcaagtggtgagtgaaggcctaggacattaccgtacactactatagactattaacactgtgcacttaggctacactaaagttataaaaatgttttttctttcttcaataataaataaccttagcttactataatttttttactttatacgtttttaaaatttaatgttttgacccttttgcagtaatacttagcttaaaacaaacacatacagctgtacaaaaatatttctttatattcttaatctataagcttttatctgtttttttttttaactttaaaactttcttgttaaaaactaagacacacacacattagcttaggcctacacagggtcagaatcatcagtatcactgtctttcacttccacatcttatcccattggaaggtcttcctgcatggagctgtcacttcctatcataacaatgccttcttcggaatatctcctgaagaacctgcctgaggcaattttacagttaacgtttttatatataagtagaaggagaagtacactctaaaataatgatttaaaatatagtatggtaaataccaggttaggccgggcatagtggctcacgcctgtaatcccagcaccttgggaggctgagacgggccgatcacaaggtcaggagatcgagaccatcctggctaacatggtgaaaccctgtctctactaaaaatacaaaaaaagaaaattagcccggcatggtggcaggcgcttgttgtcccagctacttgggaggctgaggcaggagaatggcgtgaacccgggaggcggagcttgcagtgagcaaagattgcgccactgcactccagcctgggcgacagactgagactccgtctcaaaaaaaaaaaaaagaaaaagtaaataccaggtgataagaatttttcagttccattatagtcttatgcaaccaccattgtatgtgtggtttgttgacagaaacatcggttatgcagggcatgactgtacagtggtatacttttcagtgtggttgagaggatcaggtgagataatatatgttaaaacactttataaaatataaaagagtttgtcattgttactacttcctagaagtggacataagatagaagtaaaaagagacaaagaggccagtttgtagtaaaagaggtttacattccctctctaattgccagtgagtgtgaaatcactgtatgaatcttacagaaacaggtcaggaaactgtgtctgatcaagttgttcttgccatgcctttaaggaataatgtaaaccggtgactttcattcaacatatcaaaaaagtgtcactaacctttccctagccagtcatgctaccaagcatgggaatgttagtatttaggtttacatcagtatttctttaagtgaaaagatctaatggagactcaccttatcagatgagattagctatataagctatatctataatatacatcatataagatctgaattcccaagataattggcaagttgtttttgtttgtttgtttgtttttgagacagagttttgttcttgtcgcccaggctagagtgcaatggcacgatctcaaggcttaccgcaacctctgcctcactgtttcaagtgattctcctgcctcagcctcctgtgtagtagctgggactacaggtgccccccacaatgcctggctaattttttgtatttttagtagagacagggtttcaccatgttggtcaggctggtctcaaactcttgacctcatgtgatccacccaccttggcctcccaaagtgctgggattacaggcgtgagccattgcacctggcaacagttggcctttgagacacactgtattctggtttatgatagaatttatcagtcttcttaaggaagatggaataatttccaggacccctaataaaggggttctgattcattctcaatctaaaagaatgagtttgtaaaactcttttcaacctatattcctcagaccaacttccaagtagttgatcacttcccttgatttaatttcacaaagttaatcataggaataaagaagttgtcaaggcagttagaaaagaatagcatattgagaaagtttgaagtgaaaagtataaatttcatgtggaaaaagggaaagcaggatagagtttccaagagtccagagaaaagagggttgttactttggggataaacccgttggcttagaaaacatttggcctagaaattttggttagtgtagtggtaacaacaaagtgcaaaagattaaattttagatgtttcttccaggtcaaatccaaaatccttcaacactatgcaaataaattcctctctttttaatttcgttttccctgtactactgagtcctgtagccttgcaattgcactactgtctgttttctctcttcatttctgacccttctttcttttccctcacctttataccactttccattgtcattttcccgattgtggcatcttaggaaactctggtaagctttatacttacagatccagccagtaaggtctgtaatggacagataactttctttgcagtgagccagagcttcagtttgcttcctcacggtgcaacaggaatggcatctcattaaaattgaacattaagggcctgaaggtgctttgactaatttttctgtctgggcgttgttacttaagagatctagaagttgaaaaatcccccttctcatagtattcggagcaatcagccttagagactgctgcctactctgaggcaggggacactggaaggttggtgaggtttgcctctgagcatgcccccaaagagcctccctttattcctagaagctggcaggctttcttttcctcctacaagtggtaacccgaattctgagttgaaagtgaatctttgcccttggctcctctccagcattcctcactgagcgaatagggatttggaatgtcagaaaatagaagaggggaggggaaaagatgtgtgtatgactgtgagtgtttatatgtaaaagcagcttcgtctgggaggacttagggaaacttgacttcctcagactgcttccttcttataaactcttggttccttatttatcatttttcgtttttgttttttaagttgtttgacctgattttatcatagtagttccaaatgccttacagcccagtggagtcaagctaaggaaagacagcatgatttccacaggatttgtatttcttccctctggataaagtgatagtagttcccagactcgctgccggcaggatccaaggtcgtctttcctccgggatttaatctggtgtcatcaggaacctagactcaggttttattggagagcaaggctcaataagaagtgtcctttgaggagaatcaaggactcaatctaggcataaaaggtgttgctcagcacaataccctctacggtaagctaccagtcctgagaacctgtggtcaaagctgaattgaaaatattgatggaactcagactctgtgtaactggggactggttcagagctcaagactataatttacagggctgcttttatcctttatttagttctatccaaagtcatcttgcatcaactcaaaaggagagattctgtgagggtaacctacagggaaatttcccagctttgtgtgaagaatccagtggttgagtgtctatctgcatcctgaggaaccatgtcctctttatatacccgaagtaaagaattcactcggaataggaaatctcagtctgattctcccccagcatctccctccccgactgccaagacgctccgagtaagcagcattttttatttacgtatgttcatagctgtgtcaaaggtagagaatgtgtatatatataacttggggcattaggtttagagcaaagggatttcagagcatatgggaatcagtacagggaaaaaaaattgcaagtaaagaccctgtaagtttctctgcaagaggttatggttcataatacttaatgtagtcttaagtaaaagcagacttaaatatgtcgggctacagtttctgccttttagcttttaactatcggttgtaaactgcttaacagtaagattttacagtccttatcactttatcttacaaggcttttctcaatttctacagctattttagtcactgcctttcttgtgttttatgagtcaatactatgtttcaagagaaaaacctctgaaatggccacacaactatatacattaaacttcagttttgcaagttctgtgtgtgtattcatgtatgtatgtatatgaggtagagtatgcttttgcctattttgtatgtctgtctgtgagaaagaccaaaatgagcaatgagcaaggagttatggccacttggaaccttactccttaatcaccaagtaccttcaggaaatgtcttgcttaaaagccaaagaactaactcttggccattgacaaccagctgtatggaggtgtttgtgatgtcctaggtagagccatttgagacttttctccattttctctaatgaatgtctcagtgaagagatttacatatgggcatttgcatctgatttagtgtcttcctctgtgggaagctgataaaagcaagaactgctaccaatagcaagggatgagaagctctgatgggcatattaggtagcaggcaatataacagttactttttcaggaactagattgcgctttgctgtatatacagagtaagaagaaggacggccatagcttccttatttagggagctatggggagaaaatttgcaagaagcctggatagactagtgtgggtttttttttcccccaattattttgtatgcattttcaatgtctttcttaccagtataaattaccatgtagtggaatttggtatatggcatgttggtctaagacctcagctagggatgagaataccaaaagaatattgttacgaagttattttattcacaagtttttgtgagagcaccaagaggggctccgatatatatgttactgtcatcgagttccaggagtgtctcttcaacacatagactggtacctttttttcccaaggagccacagaatgctttcaccccactagctgttgggtattttttgctggctaccaattgaggtccacaaaactgaacaccttacttcagttagtgtttatctttgctcccttccctcttatactgagtagtacctttagttgtaaagatccccttattaatgtctcttcaccactataaccatagctcccagagcaatgtggtgagcagtcaacaataacctgtttggtgaccttcccccattttccctttctgtttttcctctgctttcttagagttaggtactgctttcgtcttgtctcacttctaacagctgccatccaacctccctaccctcgtttcaccacccctcatccctgccttttagacagaggtcacagtgggagaaaatctgagttacaggaaactaaaacacagatggcttaataagagactgcttcccaattttagtggtcactggccgtggattcctacaataccatcaacttactctaaccaacttccagtgtccaaatggcttgagactataataaagagaatgttgattttcatataccactcatgttccattatgttgcttatgtctttaatgtcagagaaagatatgcaagactcatttggtggctgctgacactaaggactggttataaaatgaagatttcatctcttaagatctccctagcctagttcatttcctctcatgtccaactaattagggtactctttaaaaactggttttgagtgtattttaacaactggttttgtgatggtgttgtgctcatatgtcttttgatgcctggttgtaactggctggtcctcagccaccctgaaaggtgggtattgctatccctattttacatatgaggaaactgagatacatagaagagaaatggcttgcctagcattgctcaactagtaagcagcagagccttgattaaagcaccaagctctctgactctaaaaccccatattcccagcaacattggagtacatctcaaatatatttgaaggtcaagtttaagaacatgctaaagggcaaagatgacagttaaaagcttaagtagctgtgggagtccaaaatttatccttgatggagacacaggaaactgaaattgcagaaaggaggaaagctgtatttataggccaagggagggaattggcaggccataactgaatctcctgtgcctggttctcaaatcccagtcatactctctgggaccatggagcccacagaacctgagaccttatgggcttcagggtctttgtatttctctagaaaagtggaaatgcttgagtctttacagtaaagatactgggaagtttctgtgtgcatttcagagttaaagtcaggacagctctcttactgtcctcttccaaacttctttaacttgtttgtatacatacatacagtttcttctagagatggcacagagttacagagggacagcacctgatccaacattcttcaaaacggaggattgaaatttcagccagcatttagaagtttgattcttttttttgagtgttgttaacagggctaaatagtaaatgcccccatataaggaaaatatcctcagagagtatttttaaaataatagctattcacatggagagaatattttggacactgtaccctttgtcaaatgttcaagcagtagtaaaggcaaactataaactgtaagtcaaacaagttattatttttaacttgagaaaacaaaaggcaggatgatttttcagtgactagaaaacaaacttttattatatatgtttacttttaaactcgtaacagcagctgatgatatactccctaatgaaaaatcactcatatatagaagatagtgcatgtcctcaccagccaagaagatttttgtttaccttctctagtttgtattttgaaaataataaatatttttaattctctgaacacaaaattatgctattaaacatggtttttaaaaatatacatcccagctgggcgcagtggctcacacctgtaatcccagcactttgggaggctgaagcctcgtggaccacgaggtcaggagttcgagaccagcctggccaacattgtgaaaccccatctctactaaaattacaaaaacttagctcggcatggtggcgggcacctgttaagcttttcgggaggctgaagcaggagaatcgattgaacccggaaggcgggggttgcagtgagccaagattgcaccattgcactccagcctgggcaacaagagcgaaactccgtctataaataaacaaagaaacaaacacatccctcttcctcactagagaaaatttcatccatccttttggcatgccctcactcgctcctaccgacagtaagaatgactgttataagtggtatgctcctaatattgctattttggtctctgttgatcctaaataatgaagtaattttttttactgctacttttggctttcatatgaagtttccattagttcagtatcttttttgtgtctaaaagttgagaagttcccttagtaacagctctgatcatctctgatttgttactcaggaaaagcggaaaaactttcagattcacttgcatttctaatgggaaccacaccaggtagatattgatgagaatttgaaagctcagtctcttttctcataccacgaaacaaccctaatataagatgctgggttcatacaattagtagtaaaactttcttttgacagtaattttccaacattaaaaaaaattatttttcttctgagtcttcgtagttaaagaaaaaattctaaactacaaatacattagacacttctagctcttgatttttaattactatgtatattattgggtctaacatttataaattctataaattaggaactactcaatttagatggtttagcatttttaaattatcctaaaagtaagagccaggtaatctttggtcagtattctcaaatttttcttatttgctaatttaaaaatttttcaatgcagggtatatttaaaggaaacaaatactagagtatgtccaaattgtagtgcttatctgatatttattatattgaataaatcttgaagtaagtgggtcattagctgaaccctgggaatcttttaattaggcacattttcattgaattggtatttgttataataggatttgacctgtatttataaagcaagatcagtagcattttcccatttagtctggattgctattccttcagttctaacatgtcaatttaaaaaaatgacaaaaacaaaaaaatacaaagatgttacataatatttttcagtcagccattaatgtgcataaagggaacatttaatcaattagctttgttttataaccagtcctacaaactaattagggtacatttgataaataattggatgataaaggattgttgccttcatgagagcttgtctacatagcaactttggttagcaggccagaggcattctgcctctttgccttccagactgtcagtgttgacaattattttttgcatgtgctttgtgccttcctctgacaagtaccaaacagttatttagcatattatcgtatcctctatacatccaacactacatctgatgcactaccaatctggaatccatttttactccactttataatccgttgtcatggaatgagaaacacttggatgaacaatgctaattaagagtgcaatctgttaaccattttttccgcctaattaaaagcaggagtgtattcgttttgggggttttttatttcactcaaggaaaatcaatagcagtaattgttcagcccaaggaatcttcctagaatagtaaaacctgtgggaataaaagtagctttcccatttggacccattacatgaattcttagtagagactggcctagttaactcatgtcctacgtagagctgggggagatggcatctgaattcttggtttgttgaccagagagactgggagcttcgaagacatcagctccctttcctgcaagcggtgtcctgcccttctactctaatttttagttccatgataaatgtgtatcaaagccatctgccctattgtgaatcctcccacaacattttatgagcatctgctttgtagtaggctttatattggacaccagtattcataaatgaaagacacagttcctgccctcaaagaattggcagtctaattggggagataaagaaaatcaagaattagaacaccagggaggtgaattttctaataaagacataggttcagggtgttttagatcagccatgtggttaatacattagcctgatgtttggagaacaatagaagctagatggacaaagaaggaaacagtacattacaaaggtagaaaaagaatatgagaacataatggcattattctgagagctgcatatcggtgtggctagaacaaaagatatatttagaaatgtaataagaaatgagagaggaggcttagcaaacccaggtcacgtgaggcttagtatataattttgaggatttggggagttatcctgtggataaagaataaaggaatgaagatttgaagtaaagttgctgtgctcagaattgcatattagagaaataactttggcagctatggaagctggactgggaggagggtcaggacatgatcaggtcactggcctttgattgcagtattccgggtgagaaatgttaagggcctaggcagagatattttttctgggaaatacagagaagcattcagttgtttagaaggtagaattgataagatatggactgatagaatggggataaggatgagcctgagagagggcagagtcaggagtgactaccaggtctctggtttaggtgactgggtagaaaatggtatgataagtatcaggtgcaggggctcacacctgtaattccagcattttgggaggcagagatgggaggattgcttgagcccaggagtttgagaccagtctgggcaatggagtaagaactgtttcttcaaaaaattgttaaactagccaggtattgtggcacgtgcctatactcttagctacttgggaggctgaagtgggagaatagcttgagctcaggaggtcgaggtttcagtgagccatgattgcaccactgcactccagcctgggcaacagaatgagactctgtctcaaaaagaaaaaaaaaatagtgtgacaaaattgagttggcaaacacaggaggctaaatgctgttgagtggggaaatggtttcactttggatatgttaaattagaggtactttgggacattcagatagtgatttccagaaactagttggtctgacgcttgggagaaaattatgggctaaaaatactgatatttatgattgaagccataagagtggtaagcttgtctaaggagtagatgtaacataaggaagggctgagagtaaacctcgagaggagtaaccacaagcagataagagatatgtttctttttctaatggcgctttcctattccatcaccactggaatcacatgcaggaagacagcaggtcttgtatctggtttctttgttcaaaggtattgtggtcaaacttatgttacggtgatgagtttcagttctcaaaggattcagaaatttagttaagggtcaattggttatgagttttgtgttgggttctagttttgttttcagtacctaacctaagctgtgtgacaaatacctaagctgtgtgacaagggattattttttaaagtttggaaaagttcccagactattcagcattggtttttaatttcttttcttaatctgataatatttgggtgagctggcaatttattactgtaagaagaccaaagggaaacaatcaaagttgcctttcatcagctttttatttcttttaagcctcttttttattctattcttgacctggttatcatgcagtgagtgatggttatccacaactgggatgttagttctcataacagttccaaaatccaacagctttctttggttacacagcatggaaagagttctaccagtgacatgattagataaagatactgaaagtgtgtctggactttaacctcttcataggtcattatgaaagcaacattttcatataggagttgtacataaaattgcaagtggctattttaaaagttgtttgtatgaaaagttaaatattctagatttaaataaaattgtaaaatagatgagagtatattatagcattttaaaaaatgttttgcgttgatttccaaaatcaactttacatggttggttgtctggaaggacatatatccatccagacagtaaaataatgaccttaaatgtgtgtagattagaaagggaagtaggaattagcctggataatcaaaatctacaaataatcaaaaccctttacttgagtgctgaggaatttatttgagcttattcctcttgtagccaacaaacattgggagagccaaaagaccaaagagggacaagagagagaatagaaaaaagtacagagaactgtagtaatatcaatagctaaaatttattgaacatttactctttgtcagtgctgtaccaagcacttacatttattgtctcatttaatacatttgataaccataaacaccaagtttactatctcattttaatgacagggacactgaacagagaagttaagtaatcatgtaagatcacataacttagtaaatgctggagccagcaatctggatcaggagcctcagccttaaccagtaaggcatgtaactgttctagtgaaactactgtctcttctttaaatagctcctagattattaccagtatccctgactattgaatctgacttggaaagagagatgacgacaacaaaagctatattaaggaaaaatgtaacagaattacaggaacagacaaacctagattagtaaaaagtcagaatgttttgttttgttttgttttgttttttttgagacaggatctcgctctgtcacccaggctggagtgcagtagcaccatcatggctcactgcagcctcaaactcctggcctcaagcaattctcttgcctcagcctccctaatagctgggactataggtgtgctggggcctcaccaacttgttgaccaagctggtctcaaactcccaacctcaagtgatcctcctgcctcagcatcccaaggtgctgggcttacaggtgtgagccactgtgcccagccaaagtcagaattttacataattttaaaataggtgtggtggtgcatgcctgtagtcccagatactcagaaggctgaggcagaaggatcactttgagcccaggaagtagaggttgcagtgagccatgatcatgcgctcgctcactcgctcgctgtctctctctctctctctctctctctctctctctatatatatatatatatatatatatataattttagtatttataagtatctatgataaaactcaggacctgttaaattgtaacaagttctgaattagtagggcctgaattactgaggtttttctcatctgaggagacccttccctgccaaaaccaagaaaataaactacaaaagcatcccctgtcccaaaagtctacattttaaaatacctgttctgctctgggaggtggtttagccccctaaataagaaccttgtgcatttgaagactcaagttccctattgggggtatgaaagtggaagaatcaaagaaagcttcagttctttatccttctgaacttcatctttcaaggcagactagcactttgggatgactgtggccctcgcaaggccccaacttatgtaagatcacttacaagtcacacataatagtgtcatttttcatgaccacccagtttcagacttcaagctgatgtatccactaagcttgttccttccattatcaccttgccaagaatatctagtcagtattggtctctccctttcctaactacccctttttatttactgtatgtactagatggtctaacatttgattgcatttaatcaattacctttttttttttttttttgagacggagtctcgctctgttgcccaggctggagtgcagtggcgtgatctctgctcaccgcaagctctgccttccggattcatgccattctcctgcctcagcctcccgagtagctgggactacaggtgcccgccaccacacctggctaatttttgtatttttagtagagacggggtttcaccgtgttagccagggtggtctcaatctcctgacttcatgatccacccgcctcggcctcccaaagtgctggtattacacgcatgagccaccgtgcccggccaactttcttgaattacactctgttttatgagtgtgcatattttacctcctcagagaagagctctttgagatcaaagagccatgtcttagattctgtaattgtcgattttattcctgtaagtactactcacaaggctgggcacatacaggtgcttaatgtaaatgcagggaatgaatgctgctgcctgagatttgatctctccgctcctatcccatttagccatctggaaaggagtcagaggccacacacacttgagaatcttatttctaacatgaaggctaaccatagatcttcccaagtcaattcagattcctgtttattgcaatttgctagtatattggtcactccaaaatatgtgagttaatatttttgtttttgtgggaatcaaaagagaaaaagcctgtggaatctactagaaataaaaagttctaccctatgttacttaggtcccaagtattaatatttatttcctcatgaaatgtgaggtctggagagcctcactaattcctttgtaaaagttttgattcacagcctagtccaaataaaaataaagttactgctacccaaacaggctgctggactgtgacatttaccatatgaaaaaacccgtctcttcccaggcttcatggaaagcttacttcctaaataggtataatggtggtcagtaacatcatgacaggctagtggggagagacctggaatctcaattagagaaatggagtgaaactcaaacagtgggatttaaggcctaaataaggacttttaaaatttacgatatactctatgctgtattctaacaatattttggagggactgatcaggcttcttaggtgttcattgaggctgtgtttttttttaaaatcatctgaatgtatttcatagtttcagatgcccatacacatctgtgtgaacctaaaactccaagctatggggaaagtaaatatagatattaaatgtgagaaatgtgacccatgtgctagagccacacaagttttagagctcctcattcccctgttggtcattttcatcctatatagtacacagcatgtgaaaggctcgatggaaaatatgccggaggctgcaaatgcatttatgaatcacaagagtttatgaattatacatataaaatggcttgccttaggtattttatggaggccttagtatatccatatatttccttctacaatgagtgcattttgtgagtttccaaaagatcagaaattcttcagaagctgggaatattcacaaaagggaggtgcaggtctgcatagatgctaagagctttaaaattctaataatattaggtagcacaatagagacaacaaaagatgagtctatcatttaatgaacttaatggtttttcttttaaaatatagtgatatgtgctgcaatatgtgagatgatgttacatgatatcatttttacatgccttaaattgatagggtagtcacaatctggcatatgagatttttcagaaatatttataatatgaactgaatgtaaatactgtatttgactatgtttaactttttgttctatatgtattaagtagtcagtaaagacaaatcaagacatataatatgatgaagacatatgtgatttaatacttgcttttaaaagttaatttttccttggaagtatactctcttacacatatgtataccaggtcacatggacgcctgtttttttccctgcataagacagcacttttggtattgccctgattctgaatgtatgtaatcacctagtgcagctgagaggccatgtgctatggatgtttcttttaggatgttacagataaattaaaccattttttttttaagggagatccttgtgatagttggaatttctaaaatgcctccccaaaagtcctcacctgatctgtagaacccacgtatatgacaagatagctctcgcatgattgttctgttacatagcacagttgaccttaagttagggaggttttcctgggtgggcctgagctaatcacatgagcctgtgaaggcagagagccttctcagcagatgatggaacgggaagccagagaaatgtgaagtgcgaaaagaactcagtgcttcaatgctggtttgaaaatcagaagggccatgtgaaaaggaatgtaggagcttctgcaagcagtaagcagccactaccctgcaaggcagtgggtacctgaaacctcacaggactggattcctgccaacagcctggatgagcttgaagcagattcttccccagatgctcctgataaaagccagcagcagactccttgatttcagaccgttgagaacttgaggagggaacccagcagaactgtgcagacttctgacctacaaaactgtgagataataaatggttttaagccactaaattttgttttggcagcaatagaaaactaatgaaattgaaaatttgatgataatttttttgatataaaaaacagcataggcctcattatcattgccctctactgtcacatctttgcataaatcttggaagttgttgttccaccctcacatttatttccagattatgcaggatccccagataaattactagaacaatgcaggcttcacttcaaagttagagactggtagattctctttatttcaagtttcctaagaatcttctctgtttgaattatgaagaaatcttttcccttaagatagaaggatggaaaacttttgtctctcttagacttatatatgaaaccagaatgattcttaaactcaaaagttacaaaattatactattttgcaattaactcagaccatgattaggtttgcagtacctctgaaaatttgaagggtccttgctgcagccacactcacatcattggcttgttcatcatcagtcaatattctgagaaaactgaagggaaagaagatggttctctgtagaccatcccagaatagctcaaattgtttcccctggctcagctagtacacaagaacataatataaaatgttccttctgcttagtccctcttcaggagaaaatgtaaatagaagttttttcccatcactgtggggtcaagccatgacttcaaaaggaacttgagttaaaccagtttcagccttggcagcagacatgtgacttggtctcattcctttcccttgggcccagctttcctgagccacaattttattttaaacttggtaggagtttggttttaattatgtgccttcctgaactcctgataactttcaagttaaaagtttttgtggggatttttctaagccagtctctggtgttttgagggccctacacatttcacaaatcaaaaccagtctggtttctgtccctttctaggattgccatctgaattaatggtgatcttcattctgttcttttattagaaacaggcccaagcaatgagattattacgggagaatttcaagaggtatgaaagaaagaagtctgcttcttagttttgggacatttttaaaactatggtctatccagctaatcattctttttacctctactctacaatgtattcatattggtttctgagcagcttttagtctcttcttctctagagtctcatttacattatctgttgtccccagttgggccataaaagctgtgaaagtaattccttctttgaacagtttctatctagttcagacacactagagagtctcattttagtggccatcatttgtcttcaacagaaggtagagcaaaacaatctttaacaaaaacacttagagaagttctaagacttccagattagagcatacagcataataaatttgtgaattaacctaccaattggagaaaagattcatgccttttctaaaatatatgatatcatcatgtgcagataagctattcagactctacttacagagtagactaacttctgtttttgagaagagagagggagtgtacagaggaggaggatggaaggatgggaccattgccagagcatagataagatgagtccgcattcctagcctctaaaggatcatcgatttggctggagtccctaagccttgtgttctaggacttccccttattttctgcccactcagctgacctcttagaatcctcttctctgggagaagcttcagtgttcatttccctaccttatgttctgcttgcctcttctgatgtcacttcctggctcactgttcccctgagattacttaggcaaactcccactctgtcttatctcctctagatttacttagtagtctccctgcagggttggcagtcagctttcttgaatgaagtcgtgttagtctaacagttgatttgatctgtgcttagtttgaatgacaggaggatgaagaggaaaaattaaagttaagtcttctgagtcaatccagccactctgcttctttacccaagaaaccccatcttctctctccctaaatccaactagtgttttttcatcaaaccccggattatctagggtatcaagaagccaagcaaaacactagtttctagaggtattccaccaatgaaaattagttaggaagtatgatctaaaaaccaaagccattttatcagaattgggggaattaaacattaaaccctatatacttttaagctatcttgtcttactctttttaggctaaaaacctgaaaggaaaccatttctattacagcgagaataattcacccttagaagtccagttttcttccttttttgaaataatattgtttgtattaaggtaactgtgttactcctactgcatccaaagctcactaatctctgaggttttaggagatttatctactctcctctaattggtagggttgactttcccaggacattgctaaggttagcccctgaaggcaataatatttaaaaaaataaaaaataaaggattccacatagctccaaaagtcaggtaaaagctggagggaattagagatagcaaggaaagatcaaggattaacttgcaagctctattttctctaatatctggatctaggaaaattgtctaccgccttgtctgctggatcactcatcacctacgcattttataaaaggctacccaaaaagaaattgttaacaaggaatgttaacaagcctttaaaagctaataaacaacagactgtggtgtttgctttcagttactcctggcaagcagaagtaagagcgtaggtcatcaacttcctaggtggctgtagggaacacctcctacagtaagcctatagggacaaaaactggtatgggaatcacaagtgtgagcaccattatcattaccttcctccacatgctctcatttgtggaaaaattaatctaggcctctcgaaaaccctatggaatctgccttttcatgtccaggaaccctgtgggctttttctgattgctgcttgatagtgctaacctattttttgtgtttttcaatttttaagtgtttgtattttatgtcaacctcctcagtgaaggtcatacagtataaacagccatactatacagccatatatctgaaaactttcttggcttaattgtgcttctagaacattctaaatgaaaagggttaatgtcatttaaaaagtaaagcaatggaaattattagcatgctttgatttatagataatggctaagattgatgcttggtaaaaccctaattttcctgttttaatgaaaaaaaaaaaaaaaaaaaaaaaaaaagcttgtttcgtcaccatagaggcagctgccagagtctacacagcagaatttaaaactaaagatatagtaaaatcttacccaacaaataggatatttacaaagaagaaactaaaaaaaaaaaaaaaaaaaattcaagtgaggtttcacatttcaagaaaaagtcagcagcaaaaaagcatgatttaattgtcagaaagttaggcctcagtctgcacaccatggagaaatgagctcctagttcaataggaggaggaaaaggcccaagggaccagtttgattgtaaacaggtcatttttccatacctaagacgatgtggaaagtacatctttggaaagagtgtcaagaatgctacccccatatgaagggtatagtttgaaggctgttctactcagaagcactgagagaaactaaatggtcttctaaattattgtttcatttggttacatgtgaattcaattccttgaaccaaaggtacgaagttttaacttggtactctaaccagcatcaatagccaatataatattctttttttttttttttgagacagagtctcactctgtctcccaggctggagtgcagtgacgctatctcagctcactgcaacctctacctcctgggcttaagcaattctcctgcctaagcttcccaagtagctgggactacaagcatgtgccaccatacccagctaatttttgtatttttagtggagatggggttttgccacgttggccaggttggtctcgaactcctgacctcaagtgatccacctgcctcagcctcccaagctgctggtattacaggcgtgaaccactgcacctggcctaatacgatattcttacaatttaaaaaatgaaagcagaggaatggtggcagggaagctgacattttaagagttcacttccttgtagttatcacagttaattcttactgttagaataagtggtaacttgccaaggtcacattgctagatgtcagagcagaaattagaaatcaggtctagccaaggccatcacacttctcagagcattaacaattcaattcagttagtgtttattgaacacctattgtgttctggccctgtaggtactaaaaatataattaggaataagatggaattttagggaaacgttccctccataacaatatgtttttttaaaaaatgtatgtatctcttctggatctttgttatcagaaaaaaaaatgtgtgtttgtgtgtgtttctctaatatgatcttcccaaaactcctatcttttaggaggttttcttagttggagccaatgggttaccactgttatctccatagcacgtattctcatgttttccctacattgcttcaggcgaacttgttaattatgttcacagtgctctcctggttctgtcgtgcaacttgttctgcttcttcctcagtgcctcctctacagggctctgcacacagtgggctgttaaatacaatagatgctttacatttgctggtatggagttcaggctcaattattcacaagtatttgacatgtcacaataaatagttttcctggacgtgaattttaattcacccagatgctaggtcttctcacaaagctaatgagtgacatagcccatagcccaggatctcagcttcacttggatactttttgtttgtttgttttgttttgagacaaggcctcactctgtcacccaggctgaagtgcagtggcacaaacacagctcactgcagcctcgacctcttgtgctcaagtgatcctcctgcctcggctttccatgtagcatggatcacaggtgcccaccaccatgcccagctaacttcttaaaaattattttgtagagatggggtctgccatgttgcccagactggtcttgaactcctgggctcaagtgattctcctgcctccagagtgctgggattacaggtgtgagccactgtgcccagccctatatatgtgttagttcttgagaggtgattaaaatttagtttcttttttgaaaaaagatatcaagaaaaaaaaacttaaggtaaagttgagaaagtaggcaatgatagtgtggggtatacatatgaatgccactagagattagatatataaatgtgggacaggaaaaatgcctggaattgtcctgaattttagatttccaactttcaggattctcaactcaatgtatgagaatataccatatacttttcttaatgagtcctaatgattcccccacctcaaatgggggcatgtctccatgttcaaaaaccttcgtttagtccagcggtatttaaccagggctgtacagcagaatcacctggggtactttttaaaaatacatataggaaggctgcattctagacctactgaaacagcatctccagtattgaggttaggacatgtacattttgcaaaagtgtgcaggattattctgatgagtataacccctgatttaaagagagattctatgaggaaatgtcatcgtttatcaaggtgactctattcagtcctctttagtcatatgtgctgtcactgtatacctctcctggacagctgtagggtgtggtgtgttgggttgtcctgctatgttgtttgacaaaccagtggcttccagggactgtttaatgcaaagcagtgtcattgagtgactcctcagaagttcaaggattcattatccattttgtagattattggacctttgcttctcttcctcctcttgtctgtcttgaagattttgttgttctttaacacttcagaaagggaaataattaagtgcatttaaatcaattgaatttttatttgccagagttctttaaaaaaaaaaaaagggataggagggtaaaggtcatctacagtaaaaagtaaatgtcaaacacagacataagcactttttgttgtgtgatttgtttacaatgaccaagcttactggttgtatctataaaactcctttcttttgagacctcagagtacctactttttttttttttctaaccagcatcctagggacaaggatgggagtttctcccctctcccttactcttctactttcactagcaacctaggagaaactgaggaagtctcctgagttttaatatttgtagttgcagtattcactcagggcaagtttgggagtttgtgaacaaaggaaattaatagaatgaatgttgagatccagagaggccaaatgtcacatagaaagtcagtgatagtcactcctagaacacaagcttggctagttagttgggtggggagttgggggcagtttttgatcattttacattttgctaacttctagtttaaaaaggtgctatccctaatgcctcaaatctagtgaatcatggcatgcaaagaagtgtgaactagggctaagtcacctttgtgtagtcaatttgattgcttttcttaaatggcacccccatctccagctgtgaagttcagccatctgatttgaaaagtgcatttatagatggaaataatacaaatcagtctcttgctaatgctgttttcttttcttttttctttttttgtttttgtttttgtctcctttctctagcatgaaagactttctaggtaagaactctccctgttatatatgcatgcttaatacttgtgagtgaatgcatgtcgaattaaacttagctttatataataattcagtaatgtttctcacatcctttccatccttttcatttccacagccaccacaataattcagacttttattacctcctgcccaaagcaatggaacaagcttttcaatttaccttcctgcttccagattctcctctttccagttcaccttgtagacttccactagattaattttttttaaagcaccagcgtaccaggcaccatgctcggtattagggaaacaacatgaataagacagtatccttaccttcaattagctaacaagccagtagagagacagatcatttcaacagaacatagtaagtgcccattagaagtacagacaggtattctgagcacagagaagagcaattaatctaatctgatggttcagattgaggttagatactgttatttaatagtggatccaacaaaataccttatacctagatgatgctccttagtagtttgttgaatgaacaaactaaagacctgttttgcaattgctgaaaaattaaagaaggatatcaaaattgggggaatgaccctctgcagtttttcacctagtatctaagggtacaaaactaatcttctgaaagaagaaactaaataaaaaataatagactatagagccaaaagttggaatctttctttttctactgttactctgatggagaaattaagagattgggagaagatatagttatgggactataggccaaatgagtttccttataatttgtttggtattgagctggttctgtcttattaatatattctaatgttcttcttctgcttgccctctcaccaggcagcagctgaggacaaatcatttacttctaacctagcagaaaattacttagttttgcaaaattgttggagagtggtattttgccgtaatcttttgtgaactctctcgtattataatagccatttgtgaaaggaaactttttcccacagacttcaaaatatgctatgaaactgtaccaattaaaacagtgaagcactagctcaagaataaacaaagagacctatggaacacaatccatagccccccaaaaatcacatgtataaggtgacttcatctcagtgaggaaataattattcagtaagtgatcattaggacagttgattatctgtttgagcaattatatccttcccttcagccataccgagaaacaaatggatttcagttggcttacaatttgtaagagaaaagtgttttaccataaaagttagcagaagagaatattttataatctttatataggaaaagcctttccaagtgtgataccattaccggaaaggggtcctgattcagaccccaagagagggttcttggatctcacgcaagaaagaattcagggagagtccattaagtgaaagcaagtttattaggaaagtaaaggaataaaagaatagctactccatagacagagcagctggttgcccgtttttatggttatttcttgtttatatgctaaacaaggggtggattattcatgcctgccctttttagaccatatgttgtaacttcctgactttgccatggcatttgtaagctgttatggtgttggtgggagtgtagcagtgaggatgaccagaggacactctcacggccatcttggttttgtgggttttagccagcttcttcactgccacctgctttatcagcaaggtctttatgacctgtatcttgtgccagcctcctatctcattcagtgacttaaaacgccttaaccgtctgggaatgcagcccagtaggtctcagcctcattttacccagcccctattcaagatggagttgctgtggttcaaatgtctctgacaataccataaagataaaaatcatcaaatttaattatataaaatttaaaatctctaagtaagacactataaacagagacagaaagtgaagtgggaaaaaatatttgctgcctatattagttttaaaagcccgatgacgagttagtgggtgcagtgcaccagcatgtcacatgtatacatatgtaactaacctgcacattgtgcacatgtaccctaaaacttaaagtataataataaaaaaataaaaataaaaaaaataaaagccctactctacaggaggttcccctactacaataagaaaaagatgattaccctactgaacaaaggctatgaattggcaattcagaaacaaaaaaaaagaaaaataaccaaagatattgattgttcataatgattttaaaatattaaaattaatgacagatacatatttctgtcataagaaatatttcataagaaggtaactggacaaaggcactaaggtttatagataagtctgctcattttagcattgtttataatagctaaaaaatttgaaaaatttaagtgtctatcatagaagattagttaaattatcttacaggcatgtaatggagaagactgcagtcttttttttttttttagtgaggcaaatctatttttacttagatggcaagatgtccacggtcatagtggtaagtatagagaggaggaggagttagacaatagtgtatgttatctgaatttatttatagaactatgtattttaacatatatgcttgacattctgcaaggatatgaactaaacagttaaaagtagttatttcttaggcaggattatggggtgaccctttcactttctactttagatacttcagtatgaactttttctacaaccatatattgcttttataatcaggaaactcaataaagagatttctattaacaaaagaagaagaaaaagaatgttttgaagaatgtgggacttagcatctctgtgagtgaaaagaggccaccattgtcattaggagctaattactttgcctctgccttctctgtgtcatccttattgcttctctatctcttctaatacttatttcagcttccccacccccagctatggcaaatagctaccacaggacagatacatcagatgcaattttcacagttgtgactcttcaaaccatcccagttcaggatgtagcactctgcagggctgatttcagtttcatatgtgctgccttttaatttggaaagagcaaagtctgagaaaaatataaaccagcgttaaggatttagggtgatagttgtacacttaaacaggtaatcagctgagagatccttcccttaatgaacttaccaatactggaaataaaaccactatcaactctaagagctcagttgctaaaatatgtcaaaattctaatcacaggcacagcagtcttgatgtggaatatggataagatggtagaaaactagctatttgggcactgtgttggtatccctaaaatgtttgggattccagcaaacctgtagagcacctaaaaggcatacgtagcatgccctagtggccatttcattcctattcaacctccagctcagatctctaagtccacatgtttctgattcattgacagttcattgtaatcatttttccaagagccattgaaattcaagaaatctttacttttaaaagcacacttttgagggaagctgttcaatcctaaactaatatgaaaagctcttaagatttaagtcagctcataggtccaaaccactaatttttcaataagcttcattcttggcaaatgatggtcagcctccctctccaagctcgtgcagtttagccctgaggtctgggaacgctggcagagagattgaaggaaagaatgttatgagttgtttctggccagggctccgaaatacttcttagaaaaggcgcaaactacccctgagcattaccttctccccactactttgttctcaaaaccaatttttatctttaatattatctcccacaggttggaatcgggaggtagtaatcctacaaccagtgattcttacggtgaccgggcttcagcaagagcccgtcgggaggcccgggaggcccgcctagccaccctgaccagccgtgtagaagaagacagcaacagagattataaaaaagtagggtctttattcaattttccggttctttggtgacatgtaaacctctcagccttcctccaccacacccagaaaaattaccatagctctgaataagcagaagaaaaggcacttaagtaataataattccttgcagttttctgggtttacttcacctctccaaaaaactagataaagaccccttcagatattgaggtgttttgttttgttttttgagacaaggtctcattgttacccaggctaaagcgcagtggtgcaatcataggtaacttccctctcaaactcctgggttcatagggtcctcctgccacagcctcccacatagctagaactatagccatgcaccaccacacacggctacattttttattttttatggagattggatctcactatattgcccaggctggtcttgaattcctggccacaagcaatcttcccacctcagcctcccaaagtgctgggattacagacgtgagccaccatgcccagccatatgttgcttttagtgcagtaagtgtatagttagaatcaggtatttagaagtgtagggaaaagtaagaaattaagaatataaaaagggtgaaaaacctaatgctgtctctctgagcccctgagaatcatttggtagactgttatttttaacaaacatgtgcttctaataaggtcctgtgaatatcaactaaatactacttggtgttagtaaaaaaaaaaaaaaaaaagaaaagaaaatcatcatcactttacagtttatttccttttttcttgtagaatagtacctaactccaagagtagacttaaaaaccttccctttcaggtgtttgcgataccaggaaaaactatttttgtaaagaaaatatttaggatgggcatggtggttcatgcctgtaatcccagcacgttgggagggtgaggcaggatgatcacttgagcccaggagttccagaccagcctgggcaatatagtgagacccccatctccacaaaaaattgaaaaattagctgggcatggtggctcatgcctgtagtcccagctactaagttaggaggattgcttgagcctgggagttcaaggctgcagtgaggggtgatcatgctactacactccagcctgggtaacagagcaagaccctgtctccaaagggaataaagagtgcttgttctgttaatgttttgttaagcagaacttgactaaaatcaatatacacagtagactggttccaaaaaaaaattgtctttttcattgctcttttaagcaatgaaaatgtcccatagtaatgactgtttttcccccagagattaacattattgaagttggagcatcatcattctctttctgttcatcactttgaaaaagcaagagaccagttggctgaatgtactctgctccctacccttccttcattttctctctctaccatatagtggtggcttggggcacagagccctgggcattctcatgtgatgaaatggtgtgagttctaacgcgaacgctgatcctcttttttccctctcctctagctctatgagagtgctctgactgaaaaccaaaaactgaaaacaaaacttcaggaagcccagctagagctagcagatataaagtccaagcttgagaaggtggcccaggtaagacggaagaagaagaaaaaagatgagaaccaagggttgatgtaaggaagcaaactagactagggatctaagggacaggaagtaagatagagtcaagatcaggccttctcggggcaatgagatagaagcttcttagattctaatttattttaggtttcaatcagtgtttaacttaaaaaggaaaactgataattcagtgaacaattcctgatggtctgaatgctaataattaatactatggctcatcatctacttatttattagtagaaaagcataaaccagcactacaaagctagtcctagacagttcctcttgtcctgttcattatgtttcagttcagtttatctacacttcacctcttggagagagataagcaagaccctattaaacctagggcagagagataacaaattaagcctagagaagtaagtggtttgcttaggccatataacaaatcaagggcaaaggtggtgccacaacatagggttaagtcccaaagcaaagattctgtagcatatgttatctccccaagccaccactctttttcagcctacaaataaggaatattagtggcagaaagactgataaactatttcctctcactgccaggtttgatttaattagatgatgctttagaggatgctggaggtaataaccttgtcaccagtgaaacaaactccgcagctgaaagctaaagcaagcactgcttttggttattgctgagttatcaggaaacctattgagttatttccctcctagaatgcctggggacttagaatttcgaaagctgaactgaagtaaaaatgattctttagcaggaaggcttgaaatgaaaaccagaggtggctagtcattctggcaatatgactggctatccaaaagcaaagactaaaatgctagggttgtacagtaccaaatacatggagtttggagggcaggggtgttgattaccctctaaacatcctattctaacccctctggaattgcatgagcaggagggtgccaacacttggaagacagccccacagagctgcgtaggactccagcaagacagccaggacactcactttctggagaagggcttacccaggtgtaaaatgtgaactgcctgtcagtttagaagagccaccccctttttcctgattatagtagcccaacatggctctactggaaatttctgagacttactgcaacacaaatagataataactaggcttaaagtgattttgtggaataagaaaagtaggtttctaaatctaaaagagaaaaatacacacatagctatagccctgccataaggcagcggggtggactgaataaatctcactccaacattattgagccaggcaaaaaaaaaaaaaagtctcattcacagtagaccctcaaaagaaatctggggctaatttttattctgaatggcgccacatattggcagtggtttataaatacagatcttatgctggttcttgtcagttattactaggattgttttacagaaaattaaagagcagtcatgtgaggaaccacaggaagagcagtttcacctgctccccactcttctcagcggaagcttctgacagcatatgtcttgacctttaggggttctcagcatttccaccagcccatgccttagaacagtgagcagtctaacaagctgctgacattgacttgcacagagggcactgaaaataaaatcagcctttccagttgctggggaaaagcatttactctctggcccactgctttgctgggtgtgtcaaaatatacttagttttgccaaatacaagttattgaaattcataagaaatggtgctgctacaaaccaagtctctgccatttaccaaaaatggagttgtttggcaggacagtggagggagggcttctcagcctcacacatttgtatggagacagttaccacatgaacatacacaatatttttacataaaagatccaccccaactctaagggagtcaacattaaaaacagaacaaacaaaaaactagttctttgtgtatataaaccttgaaaatcatgaaatcatcacaacttctacagctcctcaggcttaggaaagaaagacttacgaggatattaacaagctgtaggatctatttttgcgtttttttctcttccttctgcttcatagtagatgcagcataaaggcagacagccatgcccttccaaacagaaggtgaaagcccaggacaggagccagaattctgagttttattgttagttctggccattccttaattttttttttaaaaaaagaaactgctgcaagaagaccagcataatttctatatttatttaaatgttgtctctgcatgacactaagcaaaataaaaataatcacccagcagttattaaatgtctactgaatgtaagaaattctgctgagttctatgaccctaaggccaaaagggacttaagggttttttattccccttttaaggaagggccattatctgaggttattctgttttttttgccgtgaggctaagtcttttcagcccctctgcaaaatttaagtcaaagatgatctaaaataaacattctaaatcttttattcaaataaaattaccttatctggaagcccaatatataagacagatgaaagtggactacctctgttcaaagcagggcagatgccatgaatggactcctaagaaccccttaaagcccacccacatatgaaaactgctgctctaaaagaaaaatggtatcaattcccaaaacagaaagaataggggaaaggggattatttagacaagtgccattggccttagacattctcgctcaggagttgccagccttttaaagaaaagccttttttttttttttgttatttcctctgggttgtgatattactcatagaatgaagagaggagaagaatggtgagatgtaaaattgtaattagcattgaagacctgtggagagagagagagagagagagattgtgtgttgtaagtaatttctttgtaatttcagggaatactactactgccttcccctccccagagggaatcctgcaaacttcagagaggtgataatgttaggcttagagatctatcagaacctgtttgctggggatccctgctataggggaagtccaaagttttactgtttatttctagatgtctagtagtgaagctgaactagactgggcgttctactggcccttagacaacttaaataacaactgttttccttccatttgcaccagcagaaacaagaaaagacctctgaccgatcatcagtgctggagatggagaaacgggtatgcgcatgtctgtttccccctccaccccatttcatctcttctttctgactctctcccactttgttattcatgccaatggaaaaagtccatcttaagaaggagggagttctgccacattccattcccagcttgatgataaattctttttgtctgactctaggcagtaatttgattgctagtccttttgatttcctcagatggtcagtactttccacatatttagtcttagggtgggaagggtccttggaaggtcatctcgtacattgttctgactgtgggcagaactgcatacacacacaacccataacattttggtttactgtaaatcattgcatacacacacacacacacacacacacacacatccaaggtctctttaccgttttcataaccttgaacagaaaggaagctttcagtgggaccctctgccatttaggtcttacgacttgaaacatgagccaacacagtctttcacttattttgactgaggggaggatttctggttcaattgctgatctcctcccaactgtactcagaatattattctgggattttacattcttggattgggaaaattcaattagatttattgatggaccctagctttgatttggccctggagatataatatgttcccatctgtcctgttgttgtctgtttaatttggaaagcagctaagttttacattttattcctttggcctgtaaccaaacttccttggtatcccatctgatcaaaaactcctcattgggtttaggctaaaccaagagtcagttgctgggaaagagaaatggaacgggagagaagcaactacagggggagggaagaaactagggggagagatgctgtttcttagacaatgatgtctacttcccggctcaccatctgctcctcatcatgagagaagcagtttcctaggaatttagggagagcattactgaagataatgatgcctttttgataatagagagcaagggccctagtcacttgcagacatttgaaattctatgaaatcttcaacctgcacagagtaactgaatgtcttcttctgtttgcatattagcaagttgcttctccatatatctactgattttatgataggagatttagataatgtgatttttatcagtgaggtagctccatcttacaagtggcaggatcagatagtgctcagatctcctgagtaaggtttgcctgagtcagcagacaaacctttgaccgtgaatctgctgatcacacagcagctgggaggcagcatttttactcccttctgaattcaataatgttcaacagtctcattgttccgaaacaggagaggcgagccttggagcgcaaaatgtcagaaatggaggaagaaatgaaggtatgaagagattttctttctttttgtatgcctgttctctgaatgcctgccaagactggatatttgagcataggcctgccccctccagatttcactacaaactcaatatctgcaagaagaaatgatgtgtaaaaaagtgagcatctctcctcagccatttcctaggctctctcagctcacacaacatccattgaggacaccttaaaggcattctaggaaaaaatactgcctttggtttaaggagaggtcttggcaggcttgaaacaaacttgagtttaacttttaaggcttttcaagcagtatctttgccctctagagggtaaatgagaaggctagaacaagttttccagctctgggagcctcccattgggtgcctggggaagcctgagcatggccataagctttcttccctggtgcccctcccaacccatccctttgctggcaagaacacagattgaatcattctgcagcaaaataaaaatgtattcacatattgatttcctgccccagtacattaactctgaaatattcagggatgcttggcactctcccactagaataagctcatgccaccagatacacttcacagctcactactttcctttctctcctcaccatgacctgcagtgaccatcacctccattagccactttaatggacagctgccatcctgggcagttttgagtgctaagaactggaaatctacccaaagcagtcaatttgctgccatgggaggcagtggggcagggggaggggaggagggtgaaaggggcaagatggatacagagctgcagggaatatagagctggtcagggtagccacctggagattattttgaaacatctgattcctgcaatgcatgatgacacatgcccataatcacttagcacctactcagcttttttctttcttcaggcatcttattttaccagatacatgatgccaagcattcatttggtgagacagggttattcaactgggaagccaaagcactgggatagtattaggcagatccccaaatgtctttctatgagcaagcatccctaatatgcagtttgggagagacatttattgttccagtggcctaaatagattggttatttattgaaaaaaaaaaaactttttaagacctgttgaggttatagtttacaccagatctggtgctcataatcaatcctgttactctataattccagaatgaaggagaaatgctgagccttgcccttgcatttcctaccactatcccaaggctgtaactgtaacattcacatagaattttaagcaatacctgcttatatctcaaacattttaaatcttccaagttgattcaagcagcaagaaatagaaataataaataattgattctcatgagatggtagaacagtatgccctagcacctaaacttctgcatcttgtgatttttttcaaacgcaccttactaccacacagaagtattctctcccgcttagagcagtgagttattagagataaccagttcttttttaatttttaagagatggagtctcgctatgttgccctggacttgaactcctgggctcaaataatcctcccatctcatcctcccgaatagctgggactacaggcacgtgccgccacacccagctgagctaactgtttcttgatgagtgcatatccacagctccttgttgcatggaggctcctccatttttgaaacctcctgagttataccatctgtactctgctgttaggcagctgtcagtgttccttattaagaaatgtcctaaatgctgatctagagcatgtaattgaggcaaaagctagaacctttcaaggagtacctgggagcccaaagccagcctccactcaccagtcatggggctctgtgtcacatcaaagcaggcccacacacaaaaacccagaaagtggtcaaattagagaaattgaggccctttgttatttttattccaattctaaatttggaattatggaagccccttcagtggttctagttgccctcaattctgtaggttgagataggcttacattttttctctgtctctttatgctatcagtctatgatttcctaaactagatcatgagttctttcctttcctcaagagattataagatacgaaagtgtttgctctccccagccataagccatttgccagcaactctaaaatcaattgtaaattatcaagtggagccagatcatgaatgtttagtccctaaaccaataggtaagctgttgtgaggctgttttttgttttttttttctctttgagacggagcctcactctgtagcccaagcctgagtgcagtggcacaatgtcggcttactgcaacctttgcctctaggcagattcaatcgctcaagcgattctcctgcctcagcctccaaggagctgggactagtagtgtgtgccaccacacccagttaatttttttgtatttttagtagagacagggtttcaccatgttgcaccaggtggtctcgaactcctgagctcaggggatccacccacctcggcctcccaaagtgctgtgattacaggtgtgagccatcgcgtctggccaggactgattttttttttagttaaaacattcagattcagtcaggtgtccattattctccattatccattacaaagccaaatgaagaagaaatgcctgtaaactctaaagcccctaaacactatttgctcaaatcaaagcccaatgccaggtttgcagatcgtccagcaccccctagaggactaagggagaagcatctgtgcctctgcattctcaccagttttatttttctgtctgtacctacttgaagacaaaaacttcaaagatgcaaatatataaatatgataaaattggtatgactggccctaaaagagtctaagaaaatacttgtttagctctcaagctcttcattcagactatggtttatggtgaccaacattgctagagtgattaatagctaaaatctctctgtactaggcagccaaaggtacaggtgactgtctggctgaactgggacccagtagagcttggggccagttggtcatgcttgttgcatattcattttgtacagatgctcaaacctccttggagcaatcagtagggaacagtagagggggctgatctccagtgaacccttaaaaatatagtaggttactcaaggaaagaaagtgacttcagtcctatttttctaactctaccaaataaagtacaaaggccaggtgaaatgggggaaccatgagatgggctaacccagatgtatatgtggctctgtggttatgagatgtgttgtgcctttctggacttttattggaaaggtaagtatttatgaattctcctcaagagaaactccacccagatcctagattggagtaggattatatgccaacttctgacaggtgtgcatgtcagtgtgagctgtgccaggcctgcacctggtcttggcgcccacatcagatgtgattacttctctactgcatcctccactcagcatcagcctccttgtcagaccttctccccttcctttcctaggtccttgcatgagagggacccagcaaccaattcctttttagattggtcctggaatttttatttttctttggaaagattactagctgaccctgctccttagccctgcccttgcccatcctgcgctgggccctgccccttctcctctcctccttgccttgccttgttttcaatactgcttcctatagaacattgaccagattgtttcctgcctctctccctcatgctgataacttccaaattctttcaccttgatctgcttatactcacttgtcagattgagtcactttcatcattcatgtctttaatgttattccctgggaggtaagtaccacttcatacaatgacaattatttgataatgattatgttgaaagctttggtccaatgtcaacaccaaagaagggtgagagccagggactttccattggcttttaaatttggtccctgcccattgctttaatcttttccatatgctgtaccatgatctccctcctctatcctcaccatggccaagatgcttacagtgggcaaggaagattgcccggtcctcaccctccaatggctacatgagacagtttggctagcctacctttattccaaggtggtcattctttctctttggttaaagagattcagcagtttgtctctgcttgtttttccttttcactgtttttccccttcatgctacctttcattttcttgcttcttcactcccaaacaactataactccactaatctttcatttctatccttctcatcttatagatatgagagacttttctctgatacctggccacctttttgtagtcattataacccacaggattgtccatcctcatctgtgaaaccccatttgcataaaaaaatcattattctcctcccaaagagttgatggtctcagtttcggggcagtgcagatgactacttaggaaggacagtagcagagtcggcaggcctttgatataattccaattattaaagtctttaaatgtcttatggaatatggggtatcaggaagaatgtctgtgggctggttattctgttccgcttgcaacactgacaggcagaaagggctggactagcacattggtccagctagtttcattatcattgggcttttatggtttctccagcttttttgcacagctataatttccagagtatgagtctgtttatgaacacctttaagcagctcccaaactgcttgaactgagacaaagaaagcatgattagctgtgaatttagtgatgcatataatcttatagcaggtcagagacaggttagcagtttttggatcctgaaacaatctctctggactgcagaggaaaactatcagggttaatgaagcttcctacaaagcaggttagaggacgatccagagagctgacagttctttcttattttggtatgtgtaactttaaccttctaaacagtacatgccccacaaaaaaaaaaaaaaaaagcttaaataataggcctctcttttattttttaaaaataaatgaggccaaatgcagtggcccacacctgtaatcccagcactttgggaggctaaggcaggaggattgcttgacctcaggaatttgagaccagcttgggctacatagcgaaatcctgtctctacaaaaaatataaaaattatccaggtatggtggtgcatgcctgtagtcccagctactttaggaggctgaggtgggaagatggcttaagcctgggaggcagatgtttcagttttgtgccactgcactccagccaaggtgacagagtcggaccctatctcagataaataaacaaagtgaaagaagggagctgagtatgaggggaagattagaggaagggagagagaaaggggcagcagctagatttaagaacacaccaagtcctcagctctaatctcagtcatgatgaagggtccctgaagttatgcctcaaccatgttaatttggttcagaaggctccaaaccacatgctggactttcattctcaaaagcaatccatatgtgccttttgagagcctggcagttatattcatatggcatatttagatcttagccaagaatcagacatagctctccttccctgttgcttttctccatcatccttccacctgccacccatttgctccatgactcctgcctttctcatttcctttcttgcatgcaaactaaaaacaaaaacaaaaagtcatgtgatttctttgtcctacttttctctcctctggtctgtcttgtctctctctgtcttttctgtctgtccttttcatgtctcaatctctacagaacctccaccagctaaaacagattcaaaccttgaagcagatgaacgagcaactgcaggctgagaacagggccctgacccgagtggtggccagactctcggagtccatcgagtcctcggacacccaggagctctagttcttgcccctactctccaactcacttccctcctccactactccaggcaggttcagtcttcttgttagtcccagaagctctgtgctcatcccctccatccgagcctccatatgcaggttcctgcaaagcttggttatctgcagatggaagcagccaggactgagatcatagaatgggacataccagcctaggtcaagggaggcagtgagagagacctcagctgggctaccaatatattcatttggtaaggtcaccacattagcttctcttcccctggagactgagtatgaatttgttcactcagctacacataggtatacacgtgtatgtgcatatacctgtgtacatgcacatatacatatttcattgacggggtcattgccagatggaaattgatctttcttagccaatagcaacccaagtccaacccactcccctggagcaactggggttgggccttgggtaaccaagggcaggggctctcaatcttggctgcaagaaacatctaggagcttttaacgtatacctatgggtatattttaaacatatacatagcttttaacatatacatatagggatgtctgggtccatccccaaataatcagtggtctgggttgagacccaggcatcagtattttttcaaacctctcctattgattccttatacaaccatggttaagaaccacagccctttggataccagacagtcctcacggctgacaacattaccgatggagaggactaaaactcaaggttggaactgttcctgtccagctccactaccagcaaaaacactctgcatcccattattcaagcataattggataagcattctttgcctccttctgcagtagtctttgctttcttctcccaccttaggaggcatatctctcattcccgtcacaaatctttgggccctagggatgtgcccctccctgtccttagtgtgtgggctgtgaggcagaacacagcctatataaatgagaccctcatggagccaggccctctctaatgaggccagctttgcaaaggatatggcaggcagtggagcagagagcaaggatttattttcaactgagaaccaaaaatgtgcttggcaaactggatcctttccctagctatggatctgaaagacaagctcacagacaactggtttttctatctcaagatggtatgatggggtcaccactcctctgagatgaatttttaattgtcagcaacaatctaattagtcctgaccagagcctgttctttctttcagcctatttgcttttgccttcagggttagtagctggcaactaatatccactagaactgaatcacccgaattatcatagggctgagctaatatcctgctgtagatgctatcataggcagaaagaaaattgaaaggcaagttctaccatggcctggctgtaagcagccactgttaggtccagactccatgctttaaagttagcctcaagattcctggaaatttttacttaggctaaactagggaccccccaaaaggtgtcccagttatttttagtatccctttgttgcaagatagtataggatatggggcaaaactagatctcatgctttcagtagttaataaccttaacagttgtcatttatttaaggcctgtgctgaatgctttatatagtttttctcatttattccccaaaacaattattgtaaaaatgaaaaaaaaaaaactgagtcacagattaaataacttgcccaaggtcactccgagagtaagtggtagaaccaaaattcaaaccaaatatgtcaggttccagagtgcaaacttttcaccactgtaatataagctgtctgcatatttggcacagttttcaccatttgttaagcatgtggcccaaacaatgcaagaaggatctattgagcaactacactgtgcccccagcattgcagctgagggaggaagggcagcattctgctttctgagcactgtgacttccttgtcaaagcctaacttctaaagagccatttacctaccaaaagattttgctgctgtaaagaaagccattgcctggtacatgaccatagcaagggttagcaaactgtgacccaccaccagtatggcccataagccatacaaatagtcaaaaaagaaatcaaaagaagaataatattttacgacatatgaacacgaacattatatggaatttaaatttcaatgtccaaaataaaagttttattggaactgaaccaaactcatttgtttacatattattgttatgtctatgggtgcttttgtgctacaacagcagagctgaggagtagcaacagagactgtttgacctgcaaaccctaagatacttattgtctggcattttacagaaaaagcttgccgattcttgccagaaggaaggatgagataactaagccaaactggcagtgcagtcgagagattttactctacctttttttttttttaatagttccctggaaaaatcatcttatctcagcatgtagagcaaaccacttaccaacaaaataccagaggggactcccttcccactttccttgtagttaaaagcaagacagctcatgcaagactcatcctgagtccctctcaacctacagctagccttgctctaggtctctgaagctttaggacccctgtagccccttcctctttaacacattcctcaaagactgtaagaagtaacagttgagaaatgtgtacttaattttatttgcccagggtatctttaacaccaaattgtggtaagctgggaacttaaaaattaagaaactaagatccagagagttaaaatgataaagctttgctaaacttcatacttatatcgtactttcacatatgttcttatttaaccattctttaacttcaagtggatatcagataacactgttcatttccccctctctctgctgagattgaactttgtggggcttcccccgccccttgatttctacattccacctcttaacactttttgccactccctttagatgtcaattgtagcatgttgcagctgcaaaactgccttgtccaaatttttttttcaaggaattgacttcttaatgtggaaataaatcactaaaactctacaagactctacaagttgtttatacattttttaaggcagcttagttctgatttgatgagctgctaagcagtgaaatgtaatccattgccatatatagcttcttcctacctattatggaaatgtggctttcgtctcacttatacccaagctgcagccccagcatggggcgttaaagagcagattgaacacggaaacatgaggccaccctgggttttttctaaaaatctcattgaaatgagtttccaagcattcagtctggtaggcaaggctacagggatagaggaacgaaggagagggcagccagagctgctttgattaaatcagaggtaggagaccagggtcaaaggactgcaactttatttttatattttctggattaagtcttcttaataaagtttgcagattatttgcctgccctcccacagtcatgagaaaactcacagtgattgtaggaacactcagtatcgcaaagctcattatgtatgtcaacacacttccacatctgttacctcctgtgagccttgcagagtccctaccatacgagagagtaggacagggactgttgttcttacgaaagtacaaaaatggaaatgcagagaaggcgagtgatctgcctaaagtaatagatcactagtgacaaagacaatgctggaatttcagtttctaggcgtcaaacatttttggtgttttgttttccatcccacgtgtaataaaagaatgatctttggagtcaggcacactgggattcaatattagctttgctgggtgccttgaactagttatggcacttttcatttccccatttgtagaaatcgggataacaactgtatcatagtctcatgaggcactagggagaccctctagcacagtgccatccacattatagatattcagtaattttctttttatttccctgatacaaattatttatgtatctgtgattcatatttgtgtacatacacatatatttatataatttaacctatatcttctctgagagatcaaggaaacagattatattccttaaggcacagttagatctcctaagtggttaatagcagagccagagctagaactaaataggcctcataacacctcagcacaggtcaccctttactgggggcattacctgcccctggggtcctataggttgaaatgactagtcaaaggacacctgtattgaacagatacagatgtagctttctgtagcctgcatagtggcgatgtacttacctgctatcctaaatcgctcttgctgccagtgggacccacacataaactgtacccttatcaacatcccattaggatttttcagatgcacagcgtacttgttgaaagtgcctgatcatgtaacaaagacttgaacttccaggatggaacttgaggctatttttcctttttttcacaagttagacaacagtatgtgtaatgttccaggatagcagaactaataaaattgagtttccactccctcccctgcccaacaagcatctatttctgtgaattacaatgccatcccctaaaactgctgatgaggcctctgggtatcctttggtgactgtcagtggggagctttggggaggattaaatacatgcctagtgttcactgtgcctcacagctctgtgagtgtaagttttctgagttttaattgttgaaagtggatatgtatagtatgaccagtgagaatttggaggattattcaccgaaggcaccaagtggaggatgcttaaatcatcttgtgcatatggcaagaaagccgagtactgcctctctggcctttgctcttgtttttgatgagatgtgaagcagtatcctcctttaactcttctagttgaccaccaccccctttctgaattctttccctatgtcctcaccagcccattttggctctctccccaatttctttaggggtgagtttaagggcaggagaaattgaaagtggttactgattcagtagaatgaaaggatatacagtgtgaaatgtgaggtctgcctatgaagaaataagatattactgctaaatatgccagctcaaaagatggagtggctataatctccctaaagattaacattaccaactcaataaaaaggaagattgaagggaatttcatccctgggagaagggaccatgagagtttattccacacattgtctcaaaaggccctgctcaccaggctggcctggcctggtcagggagggccaaggaggatcctgccaggctctaactcacctttccctctgtcaccctacaggtgttaacagaactgaaatccgacaaccagaggctgaaagatgaaaatggtgccctcatcagagtcatcagcaaactgtccaagtaggctaggctccagatttatgaggaaagaaagggacagcatttgctgcccccacccctcttttccagtccttgccttccaaccaaaagaaatggatgttttggtggaaggacacttctttctatcaccctcttcagtcacctctatacactctacattttctctgcactttcaatgccctgttcttccaaacccctatcccaagttttatgacagttttaattgaagcatgattgtggtaattcgagccatctggagaatgctctggggagtacaccaggctcagctgtggacccctcaacttcctgctgctcagctactttgtccacattggatttggtccaaacatgtaagacttctaccctaatcagtatccttcagctttttacattaacccagtgtcctctgatataggtgagtcttgtggtagccactccaggatcctgattggggtgccaagagaaacagcaggatgttgaattgatcatcagatgccctctggaatggttagcatccaaggtgacagtgactgcattgaggcgctctattcttcttcacctctcaggaactgacttttattttttctgtcaacacccagtaatctccctaactagttttaacccttattcctccctcatacctagccatttctccaaggcgcaaatggccctggcttcatttattcctttcctttctatccttttatatttttcccttccccaccccctcactcaatggtataaaagctaggacagagcacctgacctcagttgtctttggccattgtgggaagtcattattctggagacaagaaaatcatcactctggtgccttggtggcagcaccactgcctgctccctggaaggtagactatggcataagtgtcagctcattgttttcgtctcccacttatcttcccccttcaaagtgattttctttataagaaaatttgggctctgaatactccattctgcctcacttccttgaccttgttttcctctcttcgccctgacacctgcttctaatgagaaatgaagtcagtgcaaggaggaatgagaggtggggaggggagattgttgagagatggactaggaagtggaagcaggctggaaagacacatatggcgaaagtcaagtatctgaggccacttgcaacattgtgacaaagaagatggaagatagcagcctactgggctgtgagaatagtggtgaatttgattatttccagtggttagatttagcagagagatttactttcttagaaattaataggggaaatggcacttaatagaggtttaatggaatgaagtactttcaacccattgatgagagtcatggaagtttagagtggcaagacccagaggtcattaggtccagctttctattattgtgtcacagggacccctgctaccacagctttcacccatgggcatggtcaggtagcctctggtggctatgcatttattactcaaaagttgggcaactctaataacgagagagtttttcctcatatcagctgaagtctgcctgtggattctccttgtagtccagatctactatctgcaactctttaacggcacttgagatatgtgcagtgggtggtctccccctcagtcttactttgagctgctgttactctagtcctttaagtcattcctcatatggcatgcttttcttacctgtcacatcttggccatcctcctctagacaaaaccagcctttaaaatatcatgtccaggcctggaaagaatacaaatccagtgcaaaattaaaccattagttcttgatgataacctagcattaatacttacagtattttctttttgtaggagttttatcccttggttcacttgagtgtgcaagtcattaaatcctcatcattttagggttgccagtgatattcagtgtttagagtggttcattcccttaatatatactacctctgtctgttaattctttcctaacatgacatgtagctctccatggtcctccctctgaaacaccacatgctgtttaaactagaagctgtaattcaagatcccaattccaccaggtgcagtggctcatgcctgtaatcccagcacttcaggaggccgaggtggacagatcacgaggtcaggagttcgagaccatcctggctaacacggtgaaacccaatctctactaaaaatacaaaaaattagccaggcgtggtggcaggcgcctgtagtcccagctactcaggaggctgaggcaggagaatggcgtgaacccgggaggcggagcttgcagtgagccttgatcacgccactgcactccagcctgggtgacagagcaagactccatctcaaaaaaaataataataataaataaataaaaaatcccaattacagaacaggagatatgtttcctctgacaaaaccccatttttagagtgtataaaattctgtctttcatttccaaccatttttcaagagaagctgctactatcttgagacttcgtattatcatgggagtactgtaagttcagttctcagggaatgctaaattagagtaataagttttatatccttcattctgggagaggaaatcaacataaggtgttgactaattgattatcctggaacattttgaatattggggaaggaagatgatacttctttctcaagaaaagaaaattggattattaggaatacatcttgacccttttccactcaatagaccagggaaaggggttacagagagcctcctcagatctgtttgtgcctttcaaaagtactgggggcagattctcaaaactcttagattggtgttgcatccctgccacttcacatgacccttccatgttaaagctgacttttcttgccagaaagttttccttgtgacaagaaatttgcaagcttttcaatctcaggaatactggattctatagccaagaactcatgaaagtaagtgtaaactatcctaggtaatttcaggtactttctcttatgcaattaattttattaactgatttctggtctatctccagagataaaataccattccttcacaactgtattgtctggaagccccatgagatggtaattataggccttctactagccagcagttctctctggatactggcatcagcaggtctcctttttcttgtgctgcttggacaggtacctactgctggcctcttcagtggccacaatcctcagtcctcacctgctggtttggagactcatgagcaccccaggcagctcaagctgaataaatagctgcagacatggccaacaacatggggctcaggtctgtcacttaacttagagtctttacatgaaatatcagaatgggaaagagaatgttcctggtaaaactctgttttcattaatttgttatttttcaaaaaccgagccacacctttggaagtaatgatttggccattccagagattctggggctaaagtttgtttttccagggctgctgatccttttccagatagctccagagtatgatgaccccagccccatcccaatctctagcgaaagggttatgcaaatctcagggtgttgcctctaaagaatctaaagaatagacatgctttgggcttactcagtgtaccagattctctagtgggccattctcatttgatgttccctagaacctccctgtcttccaactgcaggatgtgtttacttctcttctgggcttcccctggtttctgtcctagttcccaccccaagtttaagaagacttagattcatttattgctatctgaggccactagtgagatttcagatctctcttttgcaacattttacccatttcccttccccaaaccatgtgcttattagatggttccactcaggaagcaaggaagctaaaactcaagttaatggtctgtggatcccacgaaagtgtgtgtaaactactgactgtttctccactagaggcatttaattgagccaaagatgatggaagaagaaactctcaaagccatgtactttgttaggtgtctggatttttggcctgtttgcagcctctcctagccacagacagacactgtctcctctcagagaaaggccagtgtttcggtccaggccactggtgagtgtcggcacccttgaggtgggcatggagtgagcagaagaagcctggagaagagagaactatttaaaagtgttgccagttattcagcttccaggcggctttgcacctccaaaggtgcaaaaaggaaaaagaaagcagaaaggattcagcatttaagcagaaagaaaagggaaattctactctaccagatgagccactggttccactggagcttatcagtgaagtaacactgcaggagccctggtatccttccctcagagatatcatcaggggccctcaaaccccattgtttatgccagcactgaccgcactttaagcacacacttaccaatcagaggtcgtgtaattggcctaaatctaggcccagttattactacaaatcttagtcaccatactctctcgcccaggctggagtgcagtggtgtgatctcagctcactgcaacctccacctcccaggctcaagggatcctctcacctcagctcccgagcagctaggactgcaggtgtgcaccaccatgcccagctaatttttgaatttttttgtagagatggggttttgccatgttgcccaggctggtctgaagctgctgggctcaagcaatccacctggctgggcctcccaaagcgataggattacaggcgtaagggcccacgcccagcctaccatactgattttcaaggcagggtctaacccttcataagatgtgagttcttccaacccaataagcaggcagctttgaggacaaaaaggcaacattaaaagataagaccctagaagtcagaacatctgtattccaaggccaccccttctccttttagtcatgtgactttgggcaggtcaccctccctgtctgtaaaatgaggttggactggataatctttatgtgccctttccttttggcttaaaattctgtgatttattcattcttaggaagatcagcatatttattgggatttctgcttcaaaaattctttctaacctcaaaaatccaagtccagaattttttgttttcttctggatttaaactgtttaatatgagcacatcaaggttgacttctcatcctttttgggaagtgaatttaatattgagggtaattgaatgatgttgcaatggctttccctcctgctggcttggtaagaatattaaagcctgcagaggtggaaattggagctcatggagaaatggatagaaagcaatttgttgcaggcagcctttggacaagttgttttaataggaaatagacctgctgcttcataggtttcctcaaccacctttcctcagctttcttaaaatgggatctacattggctcttcacacccaaatagcagactaatcgtttttctgcttagcaccgtctggttcattgtcttgaactctgccttacagcagcaagaaaattttcctcgacaagaacctcaatctttagttccattgagctccccctctggattttggacttaccagaagtaggaggttctgataccattcaagatggtctttccttcaaagcaggtctgaagaggagactaccaaagcagtgtttacaaacccagagtccacacaaccatattgcatagaacagcacttggctttcacaagcctcctacaggacctggtgtaattggagtgaaagggcagagaccctggaagtggaggtggctgtgtgctgcgatgggaagaaggcagaaggcccaggggctttggacatagagcagggtggaagctgcaagtactgggaaggaagagagtttcacagaaacaaagctttgtcacacagaaatgagttctgtctcactggtgacttcatccctcaggctccagctgagcagagattttaatcagcttccttaatgggtattgacactgctcaggaagcagtagaccctgtcagggacagctattgatcttttgtgttctgattagattggaaaatagatcaacttcattgtagtccaggaactgttggtcacagctactaggaatgaggtgatttctgagggctgagaaaaaacacagaatcttggccagcagccagcagctgcatggtgaaagatgcattcacttctcctttgagagttggggttgagggcaaacatagaacccaggtttggcttacaacccagtgtcccggaagccctccttcgggagaactgtaagtaagaggtgggtgtgtctaaagacaataccattaatgaatgttctggccttacctaaaaaggtttagcaatttggggataactcttggatctagcttatgtgcgttcacatgcacatttgctagcccagagcttttaaaatgaggtctggcatatacttgattacaaatgaaaactcagaaaccaattttatttattaaatcatatcttttgtttttccccctcccttctaatcccccaaaggacctatttgagctgttccccaattcatctgcttattttggaccatgaatctgccagagtgatattttctgttatttctcctccaaatttttccctgatgtttccaataaagatttacttgggtggccccttaaggtgacatcaggatgctcttatgtccttccagaataagcatacacttcactcctctccctttcatctccctctgcattcttaattccttgcttttctcacttggagccgagggtgctttagagaggtggttttccatgaatcagccaagattcctgtagaagttgggtataccaaccaccaccaccaccgccccctattccagtttcaaagctcctcggctatgctaatgtcccctcagagatgaggtttgacttttaggcccgtatgactcctccatagcctggccaaggagaccatgagtagccatgtctggtttactctttatcctgagactgtttatagcttaaaacagaagtgtgtcttcccagcacaaacctaatcaatcagtgtatcagtgcatctggtggcaacagctcagcccattcaaagagcaaggattcaggaaaggcacactgatggtggggagcctcttaagagcctctaatgttctcccaaaaccagagttgagagtcggagtgccagtcgtcggggcccactattcctgaataagggacatgcaagggccagaagtagcttgactctcgcctaaatatctgtgcctttgcctgtcctttctcccactctactgaaacccggaacagattcccgcttgccttctgatgaagagaggttaggtaaagagagtttggaggaaaaaagacaccaggaggcaggctgcggggtaggagagggttctgagaggaggcagcaatccagaatacctccttttctagccagcatcccttgaacttttgaaaggttgtgcctaccactggctggcacaccagggcaatgatttccctgcagaaggaaggaaagaatgtttcacccttgcatccttcttggagaagctacagcctgtgctcagttgagtggttcacactcagactttggctttatggttttccttcctccttgtctttgccctgaccttgatcaacaggggtgaaaagaaccaccctgaggtttccatgcctctcccattttagtggtagcattttgtgtctttactccacccttcaccctagttccaccaaggttcacacaccagatgtaactgtttttcagctgagttgtatggattaacttcagtccactgtaaatacacctgggatggggtggggttggggttgtttagggagaagcagccagacttgctttgtgaactgaatgtatttttatgcaattttgagtggcctttcaaccctaagatgaatggttttgttttactggttgttgttatatagttttgagtattctgtgtttgaaagtttgggaataataatattcacttctatatgatgcctgtaaacacaacagtatttataaatgagtaaataaaactgtgttttaactttgtgactgtctccacagttcagagcatgggatttctagaatctcacatctggggcagcctcttctgattttacatcttatcattggtgggggcctcgcccaccagcctcctacaactcctgtccacatagaggccccttccccagggacagccacagtgagtcatggccactgagaagggtctctggtagtatcaaggaatttcctaaatggagtcaggccaaggagaagcctagattggcgttcaaaagaaccgtaagatagatagatagatagatagatagatagatagatagatagatagatatcaaggttccaagcttcaagtaaccaagagtatatacggttatttcttggaagacaccaggtttaagtgacaaaggtgttgaggccatccaggtgaacactagcacactctagtacatgggaaagttgaggtctagggaggtggtgatttccttgggctcatggaagtctcctgccatcacccttagtcatctgctatatccataagtcttcatgaggtcattgtttaattcaggagatccaaaactatcctgtagttccaaactacaaatgtagttaacttgggggctattgaaggttaaatctaaactcaaaatgaaggagccatgcccagagaagagctgttcaggcccgctggcagggtttgtacgtgggtggccaggtctgaccccaggcagccaggatctgggtctggtttctccatccagcaagccctgcctctggctttgctcagccctgtgtttcctgccaagcggaaatccctggtcactgacttggggagaggtcagggagggaagattcttctcccctgatgtcacccagctgtttgtaacccaagcagcagcagaacaagcacacttgatgtcatggttgaagaattcagtcctgtcctggggcacaaaacagaggcaaagaagcatgaccgatgcaaagggttcctagactgcaaatgtcatttctctttctgacccccactggttgtagtaaggtctgcagatacagtatcacctagccgtcacgtggtccagccctcttggggggaaaggagaaggccacaacctattggcagagtaaaaagctcatattcttagccaggagaccctcaggtgataaatcccagtccgtctgctgaaaggctcatgcccctcaccctacccagccttagggactgaagcagcaagacaggatagatgttaaaggatctgggctcatgctccctcaggtgggcagctcccatccctgcttgcattcactgcccccatgcctttggacctgatggacaagcaca

SEQ ID NO: 23592 - DNA, 3141 bp, Homo Sapiens
ttccatcttaaatactagtcatttggtattattctattcttctcttttaggattcatatacattgcgcttacttgtacagcatttcgaggttgatgcttttctattctccatggctttttgcattaaaaattaagcaacaggccgggcgcggtggctcacgcctgtaatcccagcgctttgggaggccgaggagggcggatcacgaggtcaggagatcgagaccatcctggctaacacggtgaaaccctgtctccactaaaaatgcaaaaaaattagctgggcatggtggcgggcgtctgtagtcccagctgctcagaagactgaggcaggagaatggcatgaacccgagaggcggagcttgcagtgagccgagatcacgccactgcactccagcctgggcgacagagcgagactctgtctccaaaaaaaacaaaaaaaaattaagcaacagattttaaaaaaaagaacaaaggaaagagtcattgggttaaagacctaagtagtgtcataactctctgtaattacatgtccataggagaatgtattgaaatacaaaaccacatgttttcttgatgcttcacgtgcaaatgcttgttctttctttttattcctggtcgtctttcattaagtcataaatgccccaagaataaccagtctctgcgtggtatagagagtctaatagcctttgtattaaatcttctttggcttgtaattatctagatgtttcagaaagaacaagtggatcctcttcagatgaaattgcagcaggtgaatggacttggccagggattaattcagagtgcaggaaaagactgtgatgtacagggtttagaacatgacatggaagagatcaatgctcgatggaatacattgaataaaaaggtgagtgacaatggggtagcaagtgtactggaaacggaaggcatagaaaagagacatctgaatctaaggtttcccgaaacctgaatggaaataaaaatttagcagttgcaatctataattactaaaagaggtcagtagtaatttgaaaactactttctccgttctcataatgaacctacatgttcatgatacaggtcgcacaaagaattgcacagctacaggaagctttgttgcattgtgggaagtttcaagatgccttggagccattgctcagctggttggcagataccgaggagctcatagccaatcagaaacctccatctgctgagtataaagtggtgaaagcacagatccaagaacagaaggtaagtgagaatgttgggacagtgaactgtaacagccgtagggagtagtagacaacacatttgcttatagtttaagaagcagttcaggagttttagtagaatcctaaactactttgtgtcgtcctgaaaagaaaggtggaaattgattttcattatcttacttaaatctggtttactgtggcatatattagactgaataattttacctgttcatgtatcctatttcagtgttcatctacaattttgtgttaagaggtttttggtgttttcagggtcagcaatattctaaatagtgttgtatatcatgtacaaagttttatctatattttttgttggtttaatttctattttagtgcagttttttctttttaaaaaaaatttatcccaaaggaaattttatttttttctcagctttattggtatatagttgacaaataaaaattgtatatgtttggctgggtgtggtggttcacgcctgtaatcccagcactttgggaggccgaggcaggcggatcacaaggtcaggagatcgagaccatcctggctaacacggtgaaaccccatctctactaaaaatacaaaaaattagccgggcatggtggtgggcgcctgtagtcccagctactcgggaggctgaggcagaagaatggtgtgaacctgggaggcggagcttgcagtgagccgagatcgagccagtgcactccagcctgggagacagagcgagactctgtctcaaaaaaaaaaaaaaaaaaatgtttataatatacaatgtgatggtttgatatacatatacgttgtgaaatgtttaccgtagtcaagataattaacatattcatcacttcaaatgttaaccattttttacggcacttttctcttggttcaaaggaagttccctgttagtcacataatgacagtcactgctccatttaaaaatttaagtgtgtgaaaagtatacgagtggtgagaactgtgctatatctcctgtttttgccccaaggatgaaaaaaacttcttttactcaatgaagcttaggatttggcgggttggtttcttttgttttttttctttcttcctagttcagatttcaaaatgatcctgtgttacagcttttcattctctttataatagttgctccagcggctcctagatgatcgaaaggccacagtagacatgcttcaagcagaaggaggcagaatagcccagtcagcagagctggctgatagagagaaaatcactggacagctggagagtcttgaaagtagatggactgaactactcagtaaggcagcagccaggtaagatcaaaggaattttgaggagtgggtcagaggtttgttttgttcttcttcgacttattatcactataagttcttggatgattcatatagatttttggaaggtgtttaatggcttttatttgaaatgggataagattttagagatgatcctcataatcagaatcacactcaggaaatggtctccagcatcttcataaatttccgagagctggaaaactcattgctctgtgtggttgttctgctgtagtataatcatagttccaaatgacagacacagactcctacagtccagccgagttattttctgagtttttcaaacagatttccccctcttatatttataaataatgcttttgatacttggaattgaaatgtgtcatatttcttttctattagcttatagtaatattagatttttttgcctttaggagctagtctgtggttctgttaaatatctgggaattcaagagatgcatgaacttacctcaataaatggtcaaaaagacaggcaacaaatcctccttcaaggaaatattccctttctcttttcatagctataagttatcctgtgacttgagcttaataagtcacatag

SEQ ID NO: 23593 - DNA, 772 bp, Homo Sapiens
ggataacccgcggccgcgcctgcccgctcgcacccctctcccgcgcccggttctccctcgcagcacctcgaagtgcgcccctcgccctcctgctcgcgccccgccgccatggctgcctcccccgcgcggcctgctgtcctggccctgaccgggctggcgctgctcctgctcctgtgctggggcccaggtggcataagtggaaataaactcaagctgatgcttcaaaaacgagaagcacctgttccaactaagactaaagtggccgttgatgagaataaagccaaagaattccttggcagcctgaagcgccagaagcggcagctgtgggaccggactcggcccgaggtgcagcagtggtaccagcagtttctctacatgggctttgacgaagcgaaatttgaagatgacatcacctattggcttaacagagatcgaaatggacatgaatactatggcgattactaccaacgtcactatgatgaagactctgcaattggtccccggagcccctacggctttaggcatggagccagcgtcaactacgatgactactaaccatgacttgccacacgctgtacaagaagcaaatagcgattctcttcatgtatctcctaatgccttacactacttggtttctgatttgctctatttcagcagatctttctacctactttggtgatcaaaaaagaagagttaaaacaacacatgtaaatgccttttgatatttcatgggaatgtttaaaaatagaaataaagcattttgttaaaacga

SEQ ID NO: 23594 - DNA, 1473 bp, Homo Sapiens
atggccacctccccgcagaagtcgccttctgtccccaagtctcccactcccaagtcgcccccgtcccgcaagaaagatgattccttcttggggaaactcggagggaccctggcccggaggaagaaagccaaggaggtgtccgagctgcaggaggagggaatgaacgccatcaacctgcccctcagcccaattccctttgagctggaccccgaggacacgatgctggaggagaatgaggtgcgaacaatggtggatccaaactcacgcagtgaccccaagcttcaagaactgatgaaggtattaattgactggattaatgatgtgttggttggagaaagaatcattgtgaaagacctagctgaagatttgtatgatggacaagtcctgcagaagcttttcgagaaactggagagtgagaagctaaatgtggctgaggtcacccagtcagagattgctcagaagcaaaaactgcagactgtcctggagaagatcaatgaaaccctgaaacttcctcccaggagcatcaagtggaatgtggattctgttcatgccaagagcctggtggccatcttacacctgctcgttgctctgtctcagtatttccgcgcaccaattcgactcccagaccatgtttccatccaagtggttgtggtccagaaacgagaaggaatcctccagtctcggcaaatccaagaggaaataactggtaacacagaggctctttccgggaggcatgaacgtgatgcctttgacaccttgttcgaccatgccccagacaagctgaatgtggtgaaaaagacactcatcactttcgtgaacaagcacctgaataaactgaacctggaggtcacagaactggaaacccagtttgcagatggggtgtacctggtgctgctcatggggctcctggagggctactttgtgcccctgcacagcttcttcctgaccccggacagctttgaacagaaggtcttgaatgtctcctttgcctttgagctcatgcaagatggagggttggaaaagccaaaaccgcggccagaagacatagtcaactgtgacctgaaatctacactacgagtgttgtacaacctcttcaccaagtaccgtaacgtggagtgaggggctgccctgggcccaccactgcccaagagttcttgctgttggcgtactggaccctcctccgaactgccttaccctgcttattcctgtctcttgcactgtgctctcccacaagtccagctgcaacccagagatagtggaaactgaaattaggaaggaaatcatcaataactcagtgggctgacccatccctcccaggcgctggggaccaacctagcaatgaaggttgggaaggttgttcccttccggtgccaggtccagattccctccatgatttgggaaccagcttaggcaaaaagagtccccacaagatgaaaataaagatcctagttaccaaaaaaaaaaaaaaaaaaa

SEQ ID NO: 23595 - DNA, 1108 bp, Homo Sapiens
ggagaccgagggcctggcggccgaaggaaccgccccaagaagagcctctggcccgggggctgctggaacatgtgcggggggacacagtttgtttgacagttgccagactatgtttacgcttctggttctactcagccaactgcccacagttaccctggggtttcctcattgcgcaagaggtccaaaggcttctaagcatgcgggagaagaagtgtttacatcaaaagaagaagcaaactttttcatacatagacgccttctgtataatagatttgatctggagctcttcactcccggcaacctagaaagagagtgcaatgaagaactttgcaattatgaggaagccagagagatttttgtggatgaagataaaacgattgcattttggcaggaatattcagctaaaggaccaaccacaaaatcagatggcaacagagagaaaatagatgttatgggccttctgactggattaattgctgctggagtatttttggttatttttggattacttggctactatctttgtatcactaagtgtaataggctacaacatccatgctcttcagccgtctatgaaagggggaggcacactccctccatcattttcagaagacctgaggaggctgccttgtctccattgccgccttctgtggaggatgcaggattaccttcttatgaacaggcagtggcgctgaccagaaaacacagtgtttcaccaccaccaccatatcctgggcacacaaaaggatttagggtatttaaaaaatctatgtctctcccatctcactgactaccttgtcattttggtataagaaatttgtgttatttgataggccgggcatggtggctcatgcctgtaatcccagcactttgggaggccaggagttcgagaccagcctggccaacatggtgaaacccggtctctactaaaaattcaaaaattacctaggcgtcatggggcatgcctgtagtcccacctacttgggaggctgaagcaggagaattgctcgaacctgggaggcagaggttgcagtaagctgagatcacgccactgcattccagcctgggcgacagagcaagactccatctcaaaaataaaataaaaaaa

SEQ ID NO: 23596 - DNA, 3984 bp, Homo Sapiens
cacgggaggcggtgatgcgggcgcgggcggcctcggctgcgccgagagcggagacacaggctcaagatggcagattccgactgaggctgggggggccgagctcgcgcgccgctttcccgtccccgttgccatgaaccgcggacaccccggccccgatggcccccgtgtacgaaggtatggcctcacatgtgcaagttttctcccctcacacccttcaatcaagtgccttctgtagtgtgaagaaactgaaaatagagccgagttccaactgggacatgactgggtacggctcccacagcaaagtgtatagccagagcaagaacatccccctgtcgcagccagccaccacaaccgtcagcacctccttgccggtcccaaacccaagcctaccttacgagcagaccatcgtcttcccaggaagcaccgggcacatcgtggtcacctcagcaagcagcacttctgtcaccgggcaagtcctcggcggaccacacaacctaatgcgtcgaagcactgtgagcctccttgatacctaccaaaaatgtggactcaagcgtaagagcgaggagatcgagaacacaagcagcgtgcagatcatcgaggagcatccacccatgattcagaataatgcaagcggggccactgtcgccactgccaccacgtctactgccacctccaaaaacagcggctccaacagcgagggcgactatcagctggtgcagcatgaggtgctgtgctccatgaccaacacctacgaggtcttagagttcttgggccgagggacgtttgggcaagtggtcaagtgctggaaacggggcaccaatgagatcgtagccatcaagatcctgaagaaccacccatcctatgcccgacaaggtcagattgaagtgagcatcctggcccggttgagcacggagagtgccgatgactataacttcgtccgggcctacgaatgcttccagcacaagaaccacacgtgcttggtcttcgagatgttggagcagaacctctatgactttctgaagcaaaacaagtttagccccttgcccctcaaatacattcgcccagttctccagcaggtagccacagccctgatgaaactcaaaagcctaggtcttatccacgctgacctcaaaccagaaaacatcatgctggtggatccatctagacaaccatacagagtcaaggtcatcgactttggttcagccagccacgtctccaaggctgtgtgctccacctacttgcagtccagatattacagggcccctgagatcatccttggtttaccattttgtgaggcaattgacatgtggtccctgggctgtgttattgcagaattgttcctgggttggccgttatatccaggagcttcggagtatgatcagattcggtatatttcacaaacacagggtttgcctgctgaatatttattaagcgccgggacaaagacaactaggtttttcaaccgtgacacggactcaccatatcctttgtggagactgaagacaccagatgaccatgaagcagagacagggattaagtcaaaagaagcaagaaagtacattttcatctgtttagatgatatggcccaggtgaacatgacgacagatttggaagggagcgacatgttggtagaaaaggctgaccggcgggagttcattgacctgttgaagaagatgctgaccattgatgctgacaagagaatcactccaatcgaaaccctgaaccatccctttgtcaccatgacacacttactcgattttccccacagcacacacgtcaaatcatgtttccagaacatggagatctgcaagcgtcgggtgaatatgtatgacacggtgaaccagagcaaaacccctttcatcacgcacgtggcccccagcacgtccaccaacctgaccatgacctttaacaaccagctgaccactgtccacaaccagccctcagcggcatccatggctgcagtggcccagcggagcatgcccctgcagacaggaacagcccagatttgtgcccggcctgacccgttccagcaagctctcatcgtgtgtccccccggcttccaaggcttgcaggcctctccctctaagcacgctggctactcggtgcgaatggaaaatgcagttcccatcgtcactcaagccccaggagctcagcctcttcagatccaaccaggtctgcttgcccagcaggcttggccaagtgggacccagcagatcctgcttcccccagcatggcagcaactgactggagtggccacccacacatcagtgcagcatgccaccgtgattcccgagaccatggcaggcacccagcagctggcggactggagaaatacgcatgctcacggaagccattataatcccatcatgcagcagcctgcactattgaccggtcatgtgacccttccagcagcacagcccttaaatgtgggtgtggcccacgtgatgcggcagcagccaaccagcaccacctcctcccggaagagtaagcagcaccagtcatctgtgagaaatgtctccacctgtgaggtgtcctcctctcaggccatcagctccccacagcgatccaagcgtgtcaaggagaacacacctccccgctgtgccatggtgcacagtagcccggcctgcagcacctcggtcacctgtgggtggggcgacgtggcctccagcaccacccgggaacggcagcggcagacaattgtcattcccgacactcccagccccacggtcagcgtcatcaccatcagcagtgacacggacgaggaggaggaacagaaacacgcccccaccagcactgtctccaagcaaagaaaaaacgtcatcagctgtgtcacagtccacgactccccctactccgactcctccagcaacaccagcccctactccgtgcagcagcgtgctgggcacaacaatgccaatgcctttgacaccaaggggagcctggagaatcactgcacggggaacccccgaaccatcatcgtgccacccctgaaaacccaggccagcgaagtattggtggagtgtgatagcctggtgccagtcaacaccagtcaccactcgtcctcctacaagtccaagtcctccagcaacgtgacctccaccagcggtcactcttcagggagctcatctggagccatcacctaccggcagcagcggccgggcccccacttccagcagcagcagccactcaatctcagccaggctcagcagcacatcaccacggaccgcactgggagccaccgaaggcagcaggcctacatcactcccaccatggcccaggctccgtactccttcccgcacaacagccccagccacggcactgtgcacccgcatctggctgcagccgctgccgctgcccacctccccacccagccccacctctacacctacactgcgccggcggccctgggctccaccggcaccgtggcccacctggtggcctcgcaaggctctgcgcgccacaccgtgcagcacactgcctacccagccagcatcgtccaccaggtccccgtgagcatgggcccccgggtcctgccctcgcccaccatccacccgagtcagtatccagcccaatttgcccaccagacctacatcagcgcctcgccagcctccaccgtctacactggatacccactgagccccgccaaggtcaaccagtacccttacatataaacactggaggggagggagggagggagggagggagagaatggcccgagggaggagggagagaaggagggaggcgctcctgggaccgtgggcgctggccttttatactgaagatgccgcacacaaacaatgcaaacggggcaggggcggggggggggggggcagagggcagggggacgggtcgggacaccagtgaaacttgaaccgggaagtgggaggacgtagagcagagaagagaacatttttaaaaggaagggattaaagagggtgggaaatctatggtttttattttaaaaaaaaaaaaaaaaaaaaaaaa

SEQ ID NO: 23597 - DNA, 1433 bp, Homo Sapiens
caataatggccgttgtctcagaggacgactttcagcacagttcaaactccacctacagaaccacaagcagcagtctccgagctgaccaggaggcactgcttgagaagctgctggaccgcccgccccctggcctgcagaggcccgaggaccgcttctgtggcacatacatcatcttcttcagcctgggcattggcagtctactgccatggaacttctttatcactgccaaggagtactggatgttcaaactccgcaactcctccagcccagccaccggggaggaccctgagggctcagacatcctgaactactttgagagctaccttgccgttgcctccaccgtgccctccatgctgtgcctggtggccaacttcctgcttgtcaacagggttgcagtccacatccgtgtcctggcctcactgacggtcatcctggccatcttcatggtgataactgcactggtgaaggtggacactttctcctggacccgtggcttttttgcggtcaccattgtctgcatggtgatcctcagcggtgcctccactgtcttcagcagcagcatctacggcatgaccggctcctttcctatgaggaactcccaggcactgatatcaggaggagccatgggcgggacggtcagcgccgtggcctcattggtggacttggctgcatccagtgatgtgaggaacagcgccctggccttcttcctgacggccaccatcttcctcgtgctctgcatgggactctacctgctgctgtccaggctggagtatgccaggtactacatgaggcctgttcttgcggcccatgtgttttctggtgaagaggagcttccccaggactccctcagtgccccttcggtggcctccagattcattgattcccacacaccccctctccgccccatcctgaagaagacggccagcctgggcttctgtgtcacctacgtcttcttcatcaccagcctcatctaccccgccgtctgcaccaacatcgagtccctcaacaagggctcgggctcactgtggaccaccaagtttttcatccccctcactaccttcctcctgtacaactttgctgacctatgtggccggcagctcaccgcctggatccaggtgccagggcccaatagcaaggcgctcccagggttcgtgctcctccggacctgcctcatccccctcttcgtgctctgtaactaccagccccgcgtccacctgaagactgtggtcttccagtccgatgtgtaccccgcactcctcagctccctgctggggctcagcaacggctacctcagcaccctggccctcctctacgggcctaagattgtgcccagggagctggctgaggccacgggagtggtgatgtccttttatgtgtgcttgggcttaacactgggctcagcctgctctaccctcctggtgcacctcatctag

SEQ ID NO: 23598 - DNA, 1818 bp, Homo Sapiens
acgaggctgagcgggacctgcgagcagcgcgggcggcagcccgggggaagcgtccgggaccatgtctggagaactaccaccaaacattaacatcaaggaacctcgatgggatcaaagcactttcattggacgagccaatcatttcttcactgtaactgaccccaggaacattctgttaaccaacgaacaactcgagagtgcgagaaaaatagtacatgattacaggcaaggaattgttcctcctggtcttacagaaaatgaattgtggagagcaaagtacatctatgattcagcttttcatcctgacactggtgagaagatgattttgataggaagaatgtcagcccaggttcccatgaacatgaccatcacaggttgtatgatgacgttttacaggactacgccggctgtgctgttctggcagtggattaaccagtccttcaatgccgtcgtcaattacaccaacagaagtggagacgcacccctcactgtcaatgagttgggaacagcttacgtttctgcaacaactggtgccgtagcaacagctctaggactcaatgcattgaccaagcatgtctcaccactgataggacgttttgttccctttgctgccgtagctgctgctaattgcattaatattccattaatgaggcaaagggaactcaaagttggcattcccgtcacggatgagaatgggaaccgcttgggggagtcggcgaacgctgcgaaacaagccatcacgcaagttgtcgtgtccaggattctcatggcagcccctggcatggccatccctccattcattatgaacactttggaaaagaaagcctttttgaagaggttcccatggatgagtgcacccattcaagttgggttagttggcttctgtttggtgtttgctacacccctgtgttgtgccctgtttcctcagaaaagttccatgtctgtgacaagcttggaggccgagttgcaagctaagatccaagagagccatcctgaattgcgacgcgtgtacttcaataagggattgtaaagcagggaggaaacctctgcagctcattctgccactgcaaagctggtgtagccatgctggtgagaaaaatcctgttcaacctgggttctcccagttacggaaaccttttaaagatccacattagccttttagaataaagctgctactttaacagagcacctggcgtgggccaagtgcctgatactcccttacactgaatcatgttatgatttatagaaatacctttcctgtagcttttatagtcattgtttttcaaagacgatataccagccctcacccaggttttaaaaaagcactggtaggcatagaataggtgctcagtatatggtcagtaaatgttctattgattatcaatcagtgaaaaaaaaaaaaaaaaaaaaaaaaggagattataaaagggatgatgaacatggagctgcatctttttaaacgttgttttttgatgcttcagactcttaatgcttttatataaagctatcaactgtatgttgatcacagtttataagaaagaacaaatcaagattggcaatccttgccgatcttttagaaataccttttctggagaaaaaaaatccacatgaagtgcaataagcttataaagctaagtagttattaatatttctattaacatgatacaaaggatgatgattgtaagtgtttactgactggcagcttttatttcagtattagcacagcgtcttgccagtgttggaggccatgtattatttcagttcaactggatgaaatgttaaataaactcagaatgaaaaaaaaaaaaaaaaaaaaaa

SEQ ID NO: 23599 - DNA, 3473 bp, Homo Sapiens
ggccggcctggtcgccagcctaacccggcacagtgagcggagcgcctgggcggcggcggcggcggcgtgatggctccggccgcggaccgagagggctactggggccccacgacctccacgctggactggtgcgaggagaactactccgtgacctggtacatcgccgagttctggaatacagtgagtaacctgatcatgattatacctccaatgttcggtgcaattcagagtgttagagacggtctggaaaaacggtacattgcttcttatttagcactcacagtggtaggaatgggatcctggtgcttccacatgactctgaaatatgaaatgcagctattggatgaactcccaatgatatacagctgttgcatatttgtgtactgcatgtttgaatgtttcaagatcaagaactcagtaaactaccatctgctttttaccttagttctattcagtttaatagtaaccacagtttaccttaaggtaaaagagccaatattccatcaggtcatgtatggaatgttggtctttacattagtacttcgatctatttatattgttacatgggtttatccatggcttagaggactgggttatacatcattgggtatatttttattgggatttttattttggaatatagataacatattttgtgagtcactgaggaactttcgaaagaaggtaccacctatcataggtattaccacacaatttcatgcatggtggcatattttaactggccttggttcctatcttcacatccttttcagtttgtatacaagaacactttacctgagatataggccaaaagtgaagtttctctttggaatctggccagtgatcctgtttgagcctctcaggaagcattgatgaatcattccaccaagaaaacaaacaagcacctaccatagacctggcagaataaataaggaaatccttaaagatctacaagttcaaatatgtcatgaccatcacagcagaggagtgactttctgactaatgctgccacccacacagagaataaggagtagggcctgctgggtgtttagctcatggctttatcttatttgtccccctcctcctttcacgctccagtttataaagaaacagagatgatgtgtgtgtatgcctcaaatgcagaaacagttgggcttttcttaacaggttaacagtttgtgctggttataagaaattaaccttcttttctttttgccaagggttgcatgtgaattatacctttcttaatatttgattaaataatgcagtcagctaagagccaacaaaaccccatatccagatagttagctgtgagccagcactcagctgtgtcagatttgattaatattgtattaatctcatggatggttctcaaaggtaaaaaaagagagagaaagagagagagctagctgtgggattctgtgtagttcttcactatctgttccagggctagtcggaggatcataagcaagctcagacctgcccccagttcagtacttgaccacatcccaggatttatggtgtctgtctatggccacagccaaccagaatgagtgggtcatcttataacctttctgaagctccatgaggacatgtatagaatgctgcaccttcagccagctctgctctgatctttgcagatctttaagttgtcactgtttctacggctagacaaatatgactggtggtctagactacccatagttcatcctcctcacataacttatttgaagttgtcagggaatgccattacactctgatttttaaattatgcagtattttccagttctcagagaggtcatggttgtacccaagggaagtgtgttgcattaactaaagctaaaattatcagaatcctatttacataaagcatattaaaatatctgctccttaattttctgaaggaaatagatgtaagtttctgctacttgaaacctacagaaccgacaaaaattagggtgctaaaaaaatgacagtgaaatctcatcgtaaggcagctagttctaatttgcatttgaatgtataacaaattgcatcacttttcacaaacttaacacctgcctggagtaaaaatctgatttgacccctctgctcatgtttcatcatatttgtagctctgcatcatttagcatttttatgactttttttgctttatataaattattgtaaaatccagattgtttttaccacatgatgacgtgactcaggattaaatcctgagctacagtttcaaaaggaaaatcatttttttcttatgcaaagatggtaaaacactgttgtcattttttccagtattcaataagtagcctttgtacaaatttaaaaccaaaaactattctgttgtttttcttcacctactagccttagtttttaaccaagtatccaaggatgtcaacttgacatccttcccttagcatgccaacaagccattagactgattcttccacctacttttatgaacctccaggaagaaaaacacttgccaaaacattaagagaactttgattctgccttaagagggtatagaactaaaccatttgaaggcacagcccataagactatacttgattttgccccaagattctgacttctggctacatttcacctgcagttacctgggctatcggccgtgatacattttttaattcatttgttttccaccattatatttttatacttttcagttagatatacttctgcataaagagtatatatacagtgtaggataaaggcatatcgtacatggcaatgctgttaaacatggtaagactgaggttctgcaggattaaagtcagattaagggtacagaaagcacaccttgatactgaggccatttagagcaatttgtttaatgagtggttcagccatcaccaccagtggccacctgttcaataaaattgcctagcaccacagtggagagtcatctacaccccaaggtgagctgtaagactggccaattctttgaagacctttttttctgttgggagaatggaaagcagaaagggaagccaggctctttaatgttccaagtcagctgtgcctcacacaaggctctctttttagctactaagtaacatactcaagactttgtatctgtgcagcattttatggaaatcactggtgacctataggatattactaaattatttcaatagctttatttttttcctacttggattctaggtggacattacagagttgaattcctcactaccccctcccgctgtcatttgttttattggaaaacttcatgttaactagagtgtacaaaaagtctgtttcctgctgagccaatagtgatttgtttgcatatcacctaatgtgaaaagtgctcatctgtgaactctatagcaaattatattttagaaaatactttgtgaggccgggcatggtggcagagcgagactccgtctcaaaaaaaaagaaaagaaaagaaaatataaggatgtaaaagaaaaaaaaaaaaaaaaaaa

SEQ ID NO: 23600 - DNA, 3976 bp, Homo Sapiens
gagaggcgggggattggtatgcgagcgaatgtgcgaggggagggaggcgtcccggcggagcgtggtactacgaccagcgcgggccggagggggcggggggatgcgccgcggcggcggcggcgcgggagctggggttggtgtttggcggcgccagagcagcggatcccggtctcgccgcagcagcagcgcgggtgtcgtgcaccgcctgaagacgccgtacctttctaccctcccacctttttttttttttttttaaataaccggaaccaatgaacgcagccgggatcagagctccggaggccgccggtgccgatgggaccaggctggcgcccggcgggagcccgtgtctgaggcggcgggggcggccggaggagtcgccggcggcggtggtggcgcctcgcggagccggcgagctgcaggcggccggggcgccgctgcgcttttacccggcttctcctcggcgccttcatcgcgcctcgactcctggcccagcgtggggctggctgctgcggcggcggcgctgggctgcgttgctggtgctcgggctgctggtagccggagcggcggacggatgcgagcttgtgccccggcacctccgcgggcggcgggcgactggctctgccgcaactgccgcctcctctcccgccgcggcggccggcgatagcccggcgctcatgacagatccctgcatgtcactgagtccaccatgctttacagaagaagacagatttagtctggaagctcttcaaacaatacataaacaaatggatgatgacaaagatggtggaattgaagtagaggaaagtgatgaattcatcagagaagatatgaaatataaagatgctactaataaacacagccatctgcacagagaagataaacatataacgattgaggatttatggaaacgatggaaaacatcagaagttcataattggacccttgaagacactcttcagtggttgatagagtttgttgaactaccccaatatgagaagaattttagagacaacaatgtcaaaggaacgacacttcccaggatagcagtgcacgaaccttcatttatgatctcccagttgaaaatcagtgaccggagtcacagacaaaaacttcagctcaaggcattggatgtggttttgtttggacctctaacacgcccacctcataactggatgaaagattttatcctcacagtttctatagtaattggtgttggaggctgctggtttgcttatacgcagaataagacatcaaaagaacatgttgcaaaaatgatgaaagatttagagagcttacaaactgcagagcaaagtctaatggacttacaagagaggcttgaaaaggcacaggaagaaaacagaaatgttgctgtagaaaagcaaaatttagagcgcaaaatgatggatgaaatcaattatgcaaaggaggaggcttgtcggctgagagagctaagggagggagctgaatgtgaattgagtagacgtcagtatgcagaacaggaattggaacaggttcgcatggctctgaaaaaggccgaaaaagaatttgaactgagaagcagttggtctgttccagatgcacttcagaaatggcttcagttaacacatgaagtagaagtgcaatactacaatattaaaagacaaaacgctgaaatgcagctagctattgctaaagatgaggcagaaaaaattaaaaagaagagaagcacagtctttgggactctgcacgttgcacacagctcctccctagatgaggtagaccacaaaattctggaagcaaagaaagctctctctgagttgacaacttgtttacgagaacgactttttcgctggcaacaaattgagaagatctgtggctttcagatagcccataactcaggactccccagcctgacctcttccctttattctgatcacagctgggtggtgatgcccagagtctccattccaccctatccaattgctggaggagttgatgacttagatgaagacacacccccaatagtgtcacaatttcccgggaccatggctaaacctcctggatcattagccagaagcagcagcctgtgccgttcacgccgcagcattgtgccgtcctcgcctcagcctcagcgagctcagcttgctccacacgccccccacccgtcacaccctcggcaccctcaccacccgcaacacacaccacactccttgccttcccctgatccagatatcctctcagtgtcaagttgccctgcgctttatcgaaatgaagaggaggaagaggccatttacttctctgctgaaaagcaatgggaagtgccagacacagcttcagaatgtgactccttaaattcttccattggaaggaaacagtctcctcctttaagcctcgagatataccaaacattatctccgcgaaagatatcaagagatgaggtgtccctagaggattcctcccgaggggattcgcctgtaactgtggatgtgtcttggggttctcccgactgtgtaggtctgacagaaactaagagtatgatcttcagtcctgcaagcaaagtgtacaatggcattttggagaaatcctgtagcatgaaccagctttccagtggcatcccggtgcctaaacctcgccacacatcatgttcctcagctggcaacgacagtaaaccagttcaggaagccccaagtgttgccagaataagcagcatcccacatgacctttgtcataatggagagaaaagcaaaaagccatcaaaaatcaaaagcctttttaagaagaaatctaagtgaactggctgacttgatggaatcatgttcaagtggcatctgtaaactattatcccccaccctccactccccaccttttttttggtttaattttaggaatgtaactccattggggctttccaggccggatgccatagtggaacatccagaagggcaactgtctactgtctgcttatttaagtgactatatataatcaattcatcaagccagttattactgaaaaatcattgaaatgagacagtttacagtcatttctgcctatttatttctgctttgttctcagtgatgtatatgcaacattttgttgaaagccacgatggacttacaagctttaatggactcgtaagccagcatgggcttgcaaaaatttcttgtttaccagagcatcttcttatctttccacagagctatttacatcctggactatataacttaaaagaagtaaaacgtaattgcactactgttttccagactggaaaaaaaaaaaatctctgcaagtgaaactgtatagagtttataaaatgactatggataggggactgttttcacttttagatcaaaatgggtttttaagtagaacctagggtttctaattgacttgatttctggaaatgaaaacccgcgcttttattatgggaagcttcttgaactgcatttactattgtgaagtttcaagtcccgctgtaaagatcatgttgttttgttttccccagggctttcactgtgatttactgcattgcaggctgtatgataaaacacacataatttaaagagagaaggctcttgattccttatgcaagtggaagagttgaaacttgattgaaggacttaaaacattcacaaccttaagccgaggtggggggatatggggattcaggcaattgtttacacactttgaataactgcaaaggatttacggtttgtgaaaaatgtgtactgtggaaaagataataaattgaagacattattgtgtgggattgtgctgatttttgttgataacacaaaaaacactatgttttctggagagctgtgtaagctgtcttgttgcttagttgcaatataagaaatagtgatgttttggacgtaagttgtcaacaaatttctattttatattgttatatttttatgtagtttgaaatgtaaaaatgttctaatatcaagattaacaaatataaatttatggtgcaaaaaaaaaaaaaaaaaaaaa

SEQ ID NO: 23601 - DNA, 1382 bp, Homo Sapiens
actcgcagtcctgacgggcaggggctgcggaccgcccggccttggacccatccggagccacaggttggaggagataagtagctgtccccgtgctcatcgccctgtggagcagatcctgtctccttgctgacggtggagcccgggagttccagggcttgggaaggggaaggaaacctctctgaaatctgacacctgctctcccggcaaggaaacttcgcaggctgaccgaccaagaccatcactatgaccgatggagactatgattatctgatcaaactcctggccctcggggattcaggggtggggaagacaacatttctttatagatacacagataataaattcaatcccaaattcatcactacagtaggaatagactttcgggaaaaacgtgtggtttataatgcacaaggaccgaatggatcttcagggaaagcatttaaagtgcatcttcagctttgggacactgcgggacaagagcggttccggagtctcaccactgcatttttcagagacgccatgggcttcttattaatgtttgacctcaccagtcaacagagcttcttaaatgtcagaaactggatgagccaactgcaagcaaatgcttattgtgaaaatccagatatagtattaattggcaacaaggcagacctaccagatcagagggaagtcaatgaacggcaagctcgggaactggctgacaaatatggcataccatattttgaaacaagtgcagcaactggacagaatgtggagaaagctgtagaaacccttttggacttaatcatgaagcgaatggaacagtgtgtggagaagacacaaatccctgatactgtcaatggtggaaattctggaaacttggatggggaaaagccaccagagaagaaatgtatctgctagactctacatagaaactgaacatcaagaaccccaccaaaatattacttttaaaaacaatgacaatccacacaattgttgttgagtaaaccacgcacaatggcatgtctttctttttctgccagaaaatctattttaagaaaccagaatagtcaacagtgttcaaaagaattgactagttatccctgaggccctttcaaacatgatcaaagatttcccaatgtgatctcatcatcatggatactcaatttgttttttcttatagagaaaatgagtatataagacaatatacaagaagaaatatcagtgagttttaaatcagaacaagttacctgtcacattgaagaaaagggtaggcactaaagggagaacacagaaagaagaatttctaaaatattggatttacttcttatattgagtcagatgcatacttttagatttgcattggggaaaatgtactagctaaaaatggatacacaatgaag

SEQ ID NO: 23602 - DNA, 3815 bp, Homo Sapiens
ggatccggtgacagcagggagccaagcggcccgggccctgagcgcgtcttctccggggggcctcgccctcctgctcgcggggccggggctcctgctccggttgctggcgctgttgctggctgtggcggcggccaggatcatgtcgggtcgccgctgcgccggcgggggagcggcctgcgcgagcgccgcggccgaggccgtggagccggccgcccgagagctgttcgaggcgtgccgcaacggggacgtggaacgagtcaagaggctggtgacgcctgagaaggtgaacagccgcgacacggcgggcaggaaatccaccccgctgcacttcgccgcaggttttgggcggaaagacgtagttgaatatttgcttcagaatggtgcaaatgtccaagcacgtgatgatgggggccttattcctcttcataatgcatgctcttttggtcatgctgaagtagtcaatctccttttgcgacatggtgcagaccccaatgctcgagataattggaattatactcctctccatgaagctgcaattaaaggaaagattgatgtttgcattgtgctgttacagcatggagctgagccaaccatccgaaatacagatggaaggacagcattggatttagcagatccatctgccaaagcagtgcttactggtgaatataagaaagatgaactcttagaaagtgccaggagtggcaatgaagaaaaaatgatggctctactcacaccattaaatgtcaactgccacgcaagtgatggcagaaagtcaactccattacatttggcagcaggatataacagagtaaagattgtacagctgttactgcaacatggagctgatgtccatgctaaagataaaggtgatctggtaccattacacaatgcctgttcttatggtcattatgaagtaactgaacttttggtcaagcatggtgcctgtgtaaatgcaatggacttgtggcaattcactcctcttcatgaggcagcttctaagaacagggttgaagtatgttctcttctcttaagttatggtgcagacccaacactgctcaattgtcacaataaaagtgctatagacttggctcccacaccacagttaaaagaaagattagcatatgaatttaaaggccactcgttgctgcaagctgcacgagaagctgatgttactcgaatcaaaaaacatctctctctggaaatggtgaatttcaagcatcctcaaacacatgaaacagcattgcattgtgctgctgcatctccatatcccaaaagaaagcaaatatgtgaactgttgctaagaaaaggagcaaacatcaatgaaaagactaaagaattcttgactcctctgcacgtggcatctgagaaagctcataatgatgttgttgaagtagtggtgaaacatgaagcaaaggttaatgctctggataatcttggtcagacttctctacacagagctgcatattgtggtcatctacaaacctgccgcctactcctgagctatgggtgtgatcctaacattatatcccttcagggctttactgctttacagatgggaaatgaaaatgtacagcaactcctccaagagggtatctcattaggtaattcagaggcagacagacaattgctggaagctgcaaaggctggagatgtcgaaactgtaaaaaaactgtgtactgttcagagtgtcaactgcagagacattgaagggcgtcagtctacaccacttcattttgcagctgggtataacagagtgtccgtggtggaatatctgctacagcatggagctgatgtgcatgctaaagataaaggaggccttgtacctttgcacaatgcatgttcttatggacattatgaagttgcagaacttcttgttaaacatggagcagtagttaatgtagctgatttatggaaatttacacctttacatgaagcagcagcaaaaggaaaatatgaaatttgcaaacttctgctccagcatggtgcagaccctacaaaaaaaaacagggatggaaatactcctttggatcttgttaaagatggagatacagatattcaagatctgcttaggggagatgcagctttgctagatgctgccaagaagggttgtttagccagagtgaagaagttgtcttctcctgataatgtaaattgccgcgatacccaaggcagacattcaacacctttacatttagcagctggttataataatttagaagttgcagagtatttgttacaacacggagctgatgtgaatgcccaagacaaaggaggacttattcctttacataatgcagcatcttacgggcatgtagatgtagcagctctactaataaagtataatgcatgtgtcaatgccacggacaaatgggctttcacacctttgcacgaagcagcccaaaagggacgaacacagctttgtgctttgttgctagcccatggagctgacccgactcttaaaaatcaggaaggacaaacacctttagatttagtttcagcagatgatgtcagcgctcttctgacagcagccatgcccccatctgctctgccctcttgttacaagcctcaagtgctcaatggtgtgagaagcccaggagccactgcagatgctctctcttcaggtccatctagcccatcaagcctttctgcagccagcagtcttgacaacttatctgggagtttttcagaactgtcttcagtagttagttcaagtggaacagagggtgcttccagtttggagaaaaaggaggttccaggagtagattttagcataactcaattcgtaaggaatcttggacttgagcacctaatggatatatttgagagagaacagatcactttggatgtattagttgagatggggcacaaggagctgaaggagattggaatcaatgcttatggacataggcacaaactaattaaaggagtcgagagacttatctccggacaacaaggtcttaacccatatttaactttgaacacctctggtagtggaacaattcttatagatctgtctcctgatgataaagagtttcagtctgtggaggaagagatgcaaagtacagttcgagagcacagagatggaggtcatgcaggtggaatcttcaacagatacaatattctcaagattcagaaggtttgtaacaagaaactatgggaaagatacactcaccggagaaaagaagtttctgaagaaaaccacaaccatgccaatgaacgaatgctatttcatgggtctccttttgtgaatgcaattatccacaaaggctttgatgaaaggcatgcgtacataggtggtatgtttggagctggcatttattttgctgaaaactcttccaaaagcaatcaatatgtatatggaattggaggaggtactgggtgtccagttcacaaagacagatcttgttacatttgccacaggcagctgctcttttgccgggtaaccttgggaaagtctttcctgcagttcagtgcaatgaaaatggcacattctcctccaggtcatcactcagtcactggtaggcccagtgtaaatggcctagcattagctgaatatgttatttacagaggagaacaggcttatcctgagtatttaattacttaccagattatgaggcctgaaggtatggtcgatggataaatagttattttaagaaactaattccactgaacctaaaatcatcaaagcagcagtggcctctacgttttactcctttgctgaaaaaaaatcatcttgcccacaggcctgtggcaaaaggataaaaatgtgaacgaagtttaacattctgacttgataaagctttaataatgtacag

SEQ ID NO: 23603 - DNA, 2484 bp, Homo Sapiens
gcgtccgcccacgcgtccgctcggtccccggggccggcggacccgcgggcaggcactgcccgggctggacgacgtctggccggctcccggcgaagggcagcggaggagcggcccagagcgcgcagctagggcactggcgaaaccccgggacagtccctctccgtgcgggggcggcgcagagcagtcccatccccggggtcccgggcgcggctgactgccggctggttccctgcgcgcagtagctccccgagccgggctgcaccggaggcggcgagatggtcgcgcgcgtcggcctcctgctgcgcgccctgcagctgctactgtggggccacctggacgcccagcccgcggagcgcggaggccaggagctgcgcaaggaggcggaggcattcctagagaagtacggatacctcaatgaacaggtccccaaagctcccacctccactcgattcagcgatgccatcagagcgtttcagtgggtgtcccagctacctgtcagcggcgtgttggaccgcgccaccctgcgccagatgactcgtccccgctgcggggttacagataccaacagttatgcggcctgggctgagaggatcagtgacttgtttgctagacaccggaccaaaatgaggcgtaagaaacgctttgcaaagcaaggtaacaaatggtacaagcagcacctctcctaccgcctggtgaactggcctgagcatctgccggagccggcagttcggggcgccgtgcgcgccgccttccagttgtggagcaacgtctcagcgctggagttctgggaggccccagccacaggccccgctgacatccggctcaccttcttccaaggggaccacaacgatgggctgggcaatgcctttgatggcccagggggcgccctggcgcacgccttcctgccccgccgcggcgaagcgcacttcgaccaagatgagcgctggtccctgagccgccgccgcgggcgcaacctgttcgtggtgctggcgcacgagatcggtcacacgcttggcctcacccactcgcccgcgccgcgcgcgctcatggcgccctactacaagaggctgggccgcgacgcgctgctcagctgggacgacgtgctggccgtgcagagcctgtatgggaagcccctagggggctcagtggccgtccagctcccaggaaagctgttcactgactttgagacctgggactcctacagcccccaaggaaggcgccctgaaacgcagggccctaaatactgccactcttccttcgatgccatcactgtagacaggcaacagcaactgtacatttttaaagggagccatttctgggaggtggcagctgatggcaacgtctcagagccccgtccactgcaggaaagatgggtcgggctgccccccaacattgaggctgcggcagtgtcattgaatgatggagatttctacttcttcaaagggggtcgatgctggaggttccggggccccaagccagtgtggggtctcccacagctgtgccgggcagggggcctgccccgccatcctgacgccgccctcttcttccctcctctgcgccgcctcatcctcttcaagggtgcccgctactacgtgctggcccgagggggactgcaagtggagccctactacccccgaagtctgcaggactggggaggcatccctgaggaggtcagcggcgccctgccgaggcccgatggctccatcatcttcttccgagatgaccgctactggcgcctcgaccaggccaaactgcaggcaaccacctcgggccgctgggccaccgagctgccctggatgggctgctggcatgccaactcggggagcgccctgttctgaaggcacctcctcacctcagaaactggtggtgctctcagggcaaaatcatgttccccacccccggggcagaacccctcttagaagcctctgagtccctctgcagaagaccgggcagcaaagcctccatctggaagtctgtctgcctttgttccttgaagaatgcagcattgtctttgtctgtccccaccacatggaggtgggggtgggatcaatcttaggaaaagcaaaaaagggtcccagatcccttggccctttcctccgaggacttctatcctccccaggcctttgtttcttcggctaaaggtacagttcctttcaagaggtaacagcactgggatccaagcagggggatgaaaaactcagcagagaaattcgagaccattttgcaagactgtgcccttctcctcaggaccccctggctcagttcttgaaaaacggtgtcatatttagtcagaggccccacccccaggaagcatggatggggatgaaggcacaggcgtctccaacctcagaggccctttgtggggtcaggacacagagtgggagggagactgatgcaggcctaccagtccctggctttttgtctggggctggaataaagaggtgccttcagctggtgggccgagaaaaaaaaaaaaaaaaaaaa

SEQ ID NO: 23604 - DNA, 7320 bp, Homo Sapiens
cgctgctggggttaggattctgcgcggcgaggcaagatgctcaagtccaagacgttcttaaaaaagacccgggcgggcggcgtgatgaagatcgtgcgcgagcactacctgcgagacgacatcggctgcggtgcgcccgggtgcgcagcgtgtggaggggcgcacgaggggccggccctggagccgcagccccaggacccggcgagcagcgtctgcccgcaaccgcactacttgctgcccgacactaatgtgttactgcaccagattgatgttcttgaggaccctgccatcaggaatgtaattgtgctacaaacagttcttcaagaagtgagaaatcgcagtgcccccgtatataaacgcatccgagatgtgactaataaccaagagaagcatttctatactttcactaatgagcaccatagagaaacctatgtagaacaagaacagggagaaaatgctaatgacaggaatgatagagcgattcgagtagcagcaaaatggtacaatgaacatttgaaaaaaatgtcagcagacaaccagctgcaagttatcttcataacaaatgacaggagaaacaaagagaaagccatagaagaaggaataccagctttcacttgtgaagaatatgtaaagagcctaactgctaaccccgaactcatagatcgtcttgcttgtttgtctgaagaagggaatgaaatagaaagtggaaaaataatattttcagagcatcttcccttaagtaagctacagcaaggcataaaatctggtacataccttcaaggaacatttagagctagcagggaaaattacttggaagctacagtatggattcatggcgacagtgaagaaaataaagagataatcttacagggacttaaacatttaaacagagctgttcacgaagatattgtggctgtggagcttctccccaagagtcagtgggtagcaccatcttctgtggttttacatgatgaaggtcaaaatgaagaagatgtggagaaagaagaagagacagaacgaatgcttaagactgctgtaagcgagaaaatgttgaagcctacaggtagagttgtaggaataataaaaaggaattggagaccatattgtggcatgctttccaagtctgacattaaggagtcaagaagacatctctttacacctgctgataagagaatccctcgaattcgcatagaaaccagacaggcttccacattagaaggacggagaattattgttgctattgatggttggcccagaaattccagatatccaaatggacactttgtgagaaatttaggtgatgttggagagaaagagactgaaacagaagttttgttacttgaacacgatgttccccatcagcctttttcacaggctgttcttagttttctgccaaagatgccctggagcattactgaaaaggacatgaaaaaccgagaagacctgaggcatctgtgtatttgtagtgtagacccaccaggatgtactgatatagacgatgctctacattgtcgagaactcgaaaatggaaatttggaggttggtgttcatattgctgatgtgagccattttattaggccaggaaatgccttggatcaagaatcagccagaagaggaacaactgtgtatctttgtgaaaagaggattgacatggttccagagttgcttagctctaacttgtgttccttaaaatgtgacgtggacaggctggcattttcatgtatttgggaaatgaatcacaatgctgaaatcttaaaaacgaagtttaccaaaagtgttattaattcaaaggcatctctgacatatgctgaagctcagttgagaattgattcagcaaacatgaatgatgatattaccactagtctccgtggactgaataaactagccaaaattctgaagaaaagaaggattgaaaaaggggctttgactctatcctctcctgaagttcgattccacatggacagtgaaactcacgatcctatagatctgcagaccaaggaacttagggaaacaaattccatggttgaagaatttatgttacttgccaatatttctgttgcaaaaaaaattcatgaggaattttctgaacatgctctgcttcgaaaacatcctgctccacctccatcaaattatgaaattcttgttaaggcagccaggtcaaggaatttggaaattaagactgatacagccaagtctttggctgagtctttggatcaggccgaatctcctacttttccatatctaaacactctgttgagaatattagccactcgctgtatgatgcaagctgtgtacttctgttctggaatggataatgattttcatcactatggcttagcgtctccaatatacacacattttacttcacccattagaagatacgcagatgtcattgttcatcggcttttggctgtggctattggggctgactgtacttatccagagttgacagacaaacacaagcttgcagatatatgtaaaaatctaaatttccggcacaaaatggctcaatatgcccaacgtgcatcagtggcttttcatacccagttattcttcaaaagcaaaggaatagtaagtgaagaagcctatattttatttgtaagaaagaatgccattgtggtattaattccaaagtatggtttagaagggacagtcttttttgaagaaaaggacaaaccaaacccacagcttatttatgatgatgagataccctcacttaaaatagaagatacagtgttccatgtatttgataaagttaaagtgaaaatcatgttagactcatctaatcttcaacatcagaagatccgaatgtccctggtagaaccacagataccaggaataagcattcctactgatacttcaaacatggaccttaatggaccaaagaaaaagaagatgaagcttggaaaatagctatattcaacaaaaatcttcaaagactggtttcttttttaaaagaaaaaacttgaaagaacacttctaagcctaagtgtgtgatacagtttgttacttttaagtacattttaataatttcagacatctgcatttttattgaacagttgactgtatctgacccatcatactactatacttctgggttgaacagaattatttatgcagaataattcaattgaatatccatcacttaaatacagtgacaggacagcaacttcagggatctgtaaagatcatttaaatggagtgctcatctcattgaggagcagattaattttgcgtaagtactttgattatttaatatttgtaagaaaaaactttcattttcctacagaggaaaatagaacaattttagaagcaaggaacaatctcttttctaagtcttggaagctgtcagtgttgaggatgtaatctcctttgccatctttaattcacctaacttacactaggtgttctcttactgtctttaaaagcttcctgtattttattagtggtccttgaaaaactgtgaatgtttgggaattggtagaaaggcaaaaagtaggatattttgacctgactggaaagatggttgtgtttttattgccaggtaataagtgtgatcattgttgaacttcagctccagtgtctctccagaataagacattggcattcaaatgtctatatcttgttacttacaaaataaaaaacagataattagtggcttttaaattgtagttatatcagtgtatatacacgaggggaactgtataaagacatactaaagggaacagattaaaataagtattattaataaaatttggtgtgccagactgactacttcccttgctaatcacagagattagtaatgattaaattaatatcttcaggaatattttgggatagggttgccttaaaacattttacttggcttattcaatttctaaagcacttacgttgtgccaggttccactcaagtaaactatctctgccttcaaggagcttgcagtatagtgagaaaagcctgccaagtaaatcagcaggtatactaaataggtagtcatttaggcactcaataaatgttgactaatttttccagtttcctattactgaggaaaacctccatacactgaggcagaaacttgtgtcagttggaggaaaatagacttgagtagtctttggtccaggtaaaatgggtcagtagacactgaaacagtagagtaggagtcaaaaagccttttctgtgaagtgctagaacattttagactttgttggctatggtctgtattgcaactatagtacacaactctgccgttgatagtgtgtaaggagccatatacaatatgtaaacaaatcaacatgactgtgtttcaacaaggcctgatttgttaagtttcatatatagtcatatgtcacttaatgacagggatatgttctgagacatgtcacttggcaatttcatcattgtgtgaaaatcatgatgtagttacacaaacctagatggtataccctatggtatcctatatgggatagcctattgctcctaacctacaaacctgtatggcatattactgtactgattactgtaggcagttgtaacacagtgctaagtatttgtgtatctaaacatatctaaacatagaaaaggtacagtaaaaatatatatatagatatatataagatataaaatggtacacctatttaggacatttaccatgaacaagttggcaggactggaagctggctctgggtgagtcagtaagtggttagtgaatgtgaaggccatgatattactgtgcactactgtagacttttataaacactatatacttaggctacataaagtaatttcactatgatgttaccatggctgtgtccgcaggcaataggaatttttcagctccattgtaatcttacgggatcatcatcgtatatttggccattgttgaccaaaagttatgcagcacatcattataattttgatgtgtcacaaaacattactcatttgatttcccccacccccgccaaccatttaaaaaagtttgccggctaggtgcggtggctcatgcctgtaatcctagcattttgggaggacgaggcgggtggatcactcgatgtcaggagtttgagaccagcctggccaacatggtaaaacgccgtctctactaaaaatacaaaaacttagctgggtgtaacggcggatgcctgtaatcccagctacttgggaggctgaggcaggagaatcgcttgaacctgggaggcggaagttgcagtgagccgagattgcaccactgcagttcagcctggatgatgagagtgagactccatcgcaaaaaaaaaaaaaaaaaaaagaaaagaaaattagccaggtgtggtggcaagtgcctttaatcccacctcaggaggctgaggcaggagaatcgcttgaacctgggaggcagaggttgcagtgagccaagatcgcgccactgcactccagcctgggtgacagaacaagactgtctcaaaaaaaaaaaaaaagaagaaaaactgcctacaggccatagttaacctgcaatagagaagaaagggaagtagggcagtgcatgactggccttaggttttttctttccaagtttattttcttgtgcttcagctactagaaaggtttaattcagggataagtcccaattgagtagttcaagatgatcagagactttgctattttcccctaagttctattccataatctaaaatgttctgtttctagtgccagttcttatgctaagcaggttacgtggaatatatcacttaactcaaaaagccctgttaagccaggactgttatctccatttaacagatgagaaaatggaggtttatggtctgttctcacactgctacgaagaaataccccaaactgggtaattattataaaggaaagaggtttaatggactcagttccgcattgctggtgaggcctcaggacacttatacaatcatggcagaaaaaggagaagcaggcacctttttcacagggcggcaggatgaaaatgactgccagcagtggaaatgccagacgcttataaaaccttcagatctcatgagaccggctcactatcacaggaacagcatggaggaaaccgcccccatgatccagttacctccacctggtcccacccttgacacgtggggattgctacaattcaaggttagatttgggtgaggacacagagccataccatatcagcccagatcaagtagtgacagagtagggatttgaatacaggttatagtcactattgtgttatttcttgacttttgtactattaaaaaactgtagccagtgaggcttctacccttagtacccagaactccttttaggtatagcaattgtttttaggtaaatttatattgagtttaacacctgtgtgattaaagacaactttccaatgtagtatctgtagccatgtcccctaatggctattagtgttcatggttagtgtgttgaagatgagccaggtacataacgcggcacattttctgcaggtcagcagtaaggtttcaaggtacagttatggaggaaagaagaaaatgacacattgataacacaggtctttattcccttttgaatgagacagtttttaaaagttgatttataaatacaaaaatacattctccaaagatagtatttccaaactgttatatacccatctactcccaacatggatataagttttttaaaaaaatagttgtatataacatacatatctgccccagtgttacttcacaggcctatgccctacgggaactccactctcccagccccactttttctcttggttctcccacattcttattctcccacatccctacccacgtttgagctggaaaggatgtccctaccctaggcatgaggtatattttattctgggcaccacacatttgccccatagataacaatacacgtgatgatgtcactagtactacctttctagtatttacatacttaaaagtagtaactagaacagttatcactggaactaagaattttccccacagaggtgaacaggaccaaggaactaaaatttcaggaaacctgtttaatttcttttgtatctttgaaaagttagttttatatctaagatttcttcacataggttataattcatctgtatgttcaagcttttatgtaaaaatatatagtgccttcagttttaacatagtttcacatgttctcagaactgctaaattcagtgctaccagtaaggcttaataagtagttcattgaccctgtaagataggagcactcagctctgtcacaatttgttgttaaacacatcactcaatgtaagtataaaaatatttattgataaaaaataaacttataattcagcaaaaaaaaaaaaa

SEQ ID NO: 23605 - DNA, 7240 bp, Homo Sapiens
ggaaagaagtggaataattaggaacctagggtggggtagggtagcaggacatttcaaacattaatgagcatatgagattccaggtcttgttaaaatgcaaattctgattcagctggtaggtgaggtctgagattgtgcatttctaacaagcactcagataatcttaaggctgttggccccagggtcacacttatagtgattttctagaacccagttggggaagtgaatcttgggcaggagaaatacacacctcttgcattgagtttggagatctcatctgatataactttttaagaaagaaaaataattttccaaatatccaattgataagctttcccactaagtggctttcccactaagtggctgcgttatgaaaattgcttcactttgaaacttctggtcttggtaatatagaatttctgtgttctcacagtgcttgattgagaatatgatattgagattatggcataaaatatagtggctgtacaaaaaaaatacattattaggatctctaacaattatgtaaaagtcattgcttcatgggtagagctcaaactttggtgtgagacctggttttattcttggcacttactctgagttgtcttaggcaaattaataccttaagcaaaaatattctcatgtacattttacatgagaattataaatgaagtacataaagtccagcagtcacaaatgttatctattattaccatcgtcctaagacygcaatcagctatagtgaaagtagtctcaaagattgtttcataaatcatcagattcacctaattttctaaagaatttaaataaggagatggaatgaatagattgcattttgtttccatgcacaggggaactgtgcatatttcttctgtgactcggaaatggtttaacttttaaaaatcccaaaatagctgaagttagcagacatgcaatttaccaaggatgattggaatttttatctttcctgtaataatactatacccaagcacactgctcatgaggaaaacatttttatgtgaatcttttactcttgggggcaaagaatgctgtttttctttttgataactatgtttatagaatctaaatcaccctgagcaattatttcaacatctaaagttattattaccattcatgtttcatttatagctatttgaattttgatgaatttcaatatggtgctacagtgatagggcaagtgcaaataagttcaatatatgggtacggtctaaagctattttaatttttttattacaactgctatgaagaaaattaggatatgccatattttcacgttttacagttggatgtcctatgatgttctcttccagagaacagagctcggagctctggaaatttggaggcaactgatatgtgctcatgtctgcatctgtgtgggttggctgtatctcagggacagagtctgcagcaaaaaagatataattttgaggactgaacaaaattcaggaaggactattctcattaaggcagtaacagagaagaattttgaaacaaaagattttcgagcctctctagaaaatggtgttctgctgtgtgatttgattaataagcttaaacctggcgtcattaagaagatcaatagactgtctacaccaatagcaggattggataatataaacgttttcttgaaagcttgtgaacagattggattgaaagaagcccagcttttccatcctggagatctacaggatttatcaaatcgagtcactgtcaagcaagaagagactgacaggagagtgaaaaatgttttgataacattgtactggctgggaagaaaagcacaaagcaacccgtactataatggtccccatcttaatttgaaagcgtttgagaatcttttaggacaagcactgacgaaggcactcgaagactccagcttcctgaaaagaagtggcagggacagtggctacggtgacatctggtgtcctgaacgtggagaatttcttgctcctccaaggcaccataagagagaagattcctttgaaagcttggactctttgggctcgaggtcattgacaagctgctcctctgatatcacgttgagaggggggcgtgaaggttttgaaagtgacacagattcggaatttacattcaagatgcaggattataataaagatgatatgtcgtatcgaaggatttcggctgttgagccaaagactgcgttacccttcaatcgttttttacccaacaaaagtagacagccatcctatgtaccagcacctctgagaaagaaaaagccagacaaacatgaggataacagaagaagttgggcaagcccggtttatacagaagcagatggaacattttcaagactctttcaaaagatttatggtgagaatgggagtaagtccatgagtgatgtcagcgcagaagatgttcaaaacttgcgtcagctgcgttacgaggagatgcagaaaataaaatcacaattaaaagaacaagatcagaaatggcaggatgaccttgcaaaatggaaagatcgtcgaaaaagttacacttcagatctgcagaagaaaaaagaagagagagaagaaattgaaaagcaggcacttgagaagtctaagagaagctctaagacgtttaaggaaatgctgcaggacagggaatcccaaaatcaaaagtctacagttccgtcaagaaggagaatgtattcttttgatgatgtgctggaggaaggaaagcgaccccctacaatgactgtgtcagaagcaagttaccagagtgagagagtagaagagaagggagcaacttatccttcagaaattcccaaagaagattctaccacttttgcaaaaagagaggaccgtgtaacaactgaaattcagcttccttctcaaagtcctgtggaagaacaaagcccagcctctttgtcttctctgcgttcacggagcacacaaatggaatcaactcgtgtttcagcttctctccccagaagttaccggaaaactgatacagtcaggttaacatctgtggtcacaccaagaccctttggctctcagacaaggggaatctcatcactccccagatcttacacgatggatgatgcttggaagtataatggagatattgaagacattaagagaactccaaacaatgtggtcagcacccctgcaccaagcccggacgcaagccaactggcttcaagcttatctagccagaaagaggtagcagcaacagaagaagatgtgacaaggctgccctctcctacatcccccttctcatctctttcccaagaccaggctgccacttctaaagccacattgtcttccacatctggtcttgatttaatgtctgaatctggagaaggggaaatctccccacaaagagaagtctcaagatcccaggatcagttcagtgatatgagaatcagcataaaccagacgcctgggaagagtcttgactttgggtttacaataaaatgggatattcctgggatcttcgtagcatcagttgaagcaggtagcccagcagaattttctcagctacaagtagatgatgaaattattgctattaacaacaccaagttttcatataacgattcaaaagagtgggaggaagccatggctaaggctcaagaaactggacacctagtgatggatgtgaggcgctatggaaaggctggttcacctgaaacaaagtggattgatgcaacttctggaatttacaactcagaaaaatcttcaaatctatctgtaacaactgatttctccgaaagccttcagagttctaatattgaatccaaagaaatcaatggaattcatgatgaaagcaatgcttttgaatcaaaagcatctgaatccatttctttgaaaaacttaaaaaggcgatcacaattttttgaacaaggaagctctgattcggtggttcctgatcttccagttccaaccatcagtgccccgagtcgctgggtgtgggatcaagaggaggagcggaagcggcaggagaggtggcagaaggagcaggaccgcctactgcaggaaaaatatcaacgtgagcaggagaaactgagggaagagtggcaaagggccaaacaggaggcagagagagagaattccaagtacttggatgaggaactgatggtcctaagctcaaacagcatgtctctgaccacacgggagccctctcttgccacctgggaagctacctggagtgaagggtccaagtcttcagacagagaaggaacccgagcaggagaagaggagaggagacagccacaagaggaagttgttcatgaggaccaaggaaagaagccgcaggatcagcttgttattgagagagagaggaaatgggagcaacagcttcaggaagagcaagagcaaaagcggcttcaggctgaggctgaggagcagaagcgtcctgcggaggagcagaagcgccaggcagagatagagcgggaaacatcagtcagaatataccagtacaggaggcctgttgattcctatgatataccaaagacagaagaagcatcttcaggttttcttcctggtgacaggaataaatccagatctactactgaactggatgattactccacaaataaaaatggaaacaataaatatttagaccaaattgggaacatgacctcttcacagaggagatccaagaaagaacaagtaccatcaggagcagaattggagaggcaacaaatccttcaggaaatgaggaagagaacaccccttcacaatgacaacagctggatccgacagcgcagtgccagtgtcaacaaagagcctgttagtcttcctgggatcatgagaagaggcgaatctttagataacctggactccccccgatccaattcttggagacagcctccttggctcaatcagcccacaggattctatgcttcttcctctgtgcaagactttagtcgcccaccacctcagctggtgtccacatcaaaccgtgcctacatgcggaacccctcctccagcgtgcccccaccttcagctggctccgtgaagacctccaccacaggtgtggccaccacacagtcccccaccccgagaagccattccccttcagcttcacagtcaggctctcagctgcgtaacaggtcagtcagtgggaagcgcatatgctcctactgcaataacattctgggcaaaggagccgccatgatcatcgagtccctgggtctttgttatcatttgcattgttttaagtgtgttgcctgtgagtgtgacctcggaggctcttcctcaggagctgaagtcaggatcagaaaccaccaactgtactgcaacgactgctatctcagattcaaatctggacggccaaccgccatgtgatgtaagcctccatacgaaagcactgttgcagatagaagaagaggtggttgctgctcatgtagatctataaatatgtgttgtatgtcttttttgctttttttttaaaaaaaagaataactttttttgcctctttagattacatagaagcattgtagtcttggtagaaccagtatttttgttgtttatttataaggtaattgtgtgtggggaaaagtgcagtatttacctgttgaattcagcatcttgagagcacaagggaaaaaataagaacctacgaatatttttgaggcagataatgatctagtttgactttctagttagtggtgttttgaagagggtattttattgttttttaaaaaaaggttcttaaacattatttgaaatagttaatataaatacataattgcatttgctctgtttattgtaatgtattctaaattaatgcagaaccatatggaaaatttcattaaaatctatccccaaatgtgctttctgtatccttccttctacctattattctgatttttaaaaatgcagttaatgtaccatttatttgcttgatgaagggagctctattttctttaccagaaatgttgctaagtaattcccaatagaaagctgcttattttcattaatgaaaaataaccatggtttgtatactagaagtcttcttcagaaactggtgagcctttctgttcaattgcatttgtaaataaacttgctgatgcatttaaaaaaaargtcgtctttttcttaggtgtatgtgtctgacctcaggccttttagccatatttcagtatgtggccttttttgatgttatgttttatccagtagctttactaaggtataattgatgtaataaactgcatatatttaaagtgtatactttgacaaattttgacatggtgtataccttcgaaactatgccacagtctggatgtgtttactgaaacattttaataaggaagtttatttttgataaagttatgtttttggatacaatatatttgtatggtgagagtgatgaattgttggatcatttgaataaaatcttttactaaccccatgataaaaggagaagacaacagtgagcttagaatatctataaagcaaaaaatgtagtctcttgtttaaaaaatctggagcgggaatgcaaggatacaaaactttagcatgctttgagcaaaaatttaaacttactggaatcttttataataatgtaagtggaatggaggattctaggaactgagaactgtattggaataggttcaaaatatgtaagaaatgctaatgtgggagataaaaattttatttagtacttattctgattattattaaagtaataatgtgttccttgaggataacttgtcaaatgccccaaagcataaagaatataattctgaatcccaaattccaaagacaagaactctgtgtttgaattcattctgcatataattatttataagtatagattgtgaatttttccatgttcttaaaattatttttatcttttttcatggttgcatagtgctccattgtttggccttggtaatatttagttgataattccattactgtgtatttttcacttgtttctaagatcaaacattttaatatgtgcatgttatatataaatatgtaaattctgtgatactctatgatcatctctttctttatattattttcatagacatgaaatagttgctcagagattatgcattttaagacactcatagtatatattgccaaagtggtttccagaaaggcactgctggcttcgactcctataagcagcacgtgggcttgttcatctcactgcatgtttatgaagatacagttcttttgccttgttctctgcctgatgtgtatgcagaggcagccctcaatatgcagtggttgaataaatgaatgaagaaaccactaaaaaaaaa

SEQ ID NO: 23606 - DNA, 5250 bp, Homo Sapiens
ggtagaccaacttaacactgaacccattacttttccaagaccagaaaaaaatattacatgaacaggaactacttctccttcagataagaattcaagctttgacattgtaaaccacagacgaattggagcttggcattgaaaggaggtgttctgcaatgattttttttcttgtttagagaagtttacttctacaagaagaaatctgaaaaatgacaggagcaaagaggaaaaagaaaagcatgctttggagcaagatgcataccccccagtgtgaagacattatacagtggtgtagaaggcgactgcccattttggattgggcaccacattacaatctgaaagaaaacttgcttccagacactgtgtctgggataatgttggcagttcaacaggtgacccaaggattggcctttgctgttctctcatctgtgcacccagtgtttggtttatatgggtctctgtttcctgccataatttatgccatatttggaatgggacatcatgttgccacaggcacctttgccttgacatccttaatatcagccaacgccgtggaacggattgtccctcagaacatgcagaatctcaccacacagagtaacacaagcgtgctgggcttatccgactttgaaatgcaaaggatccacgttgctgcagcagtttccttcttgggaggtgtgattcaggtggccatgtttgtgctgcaactgggcagtgccacatttgtggtcacagagcctgtgatcagcgcaatgacaactggggctgccacccatgtggtgacttcacaagtcaaatatctcttgggaatgaaaatgccatatatatccggaccacttggattcttttatatttatgcatatgtttttgaaaacatcaagtctgtgcgactggaggcattgcttttatccttgctgagcattgtggtccttgttcttgttaaagagctgaatgaacagtttaaaaggaaaattaaagttgttcttcctgtagatttagttttgattattgctgcatcatttgcttgttattgcaccaatatggaaaacacatatggattagaagtagttggtcatattccacaaggaattccctcacctagagctcccccgatgaacatcctctctgcggtgatcactgaagctttcggagtggcacttgtaggctatgtggcctcactggctcttgctcaaggatctgccaaaaaattcaaatattcaattgatgacaaccaggaatttttggcccatggcctcagcaatatagtttcttcatttttcttctgcataccaagtgctgctgccatgggaaggacggctggcctgtacagcacaggagcgaagacacaggtggcttgtctaatatcttgcattttcgtccttatagtcatctatgcaataggacctttgctttactggctgcccatgtgtgtccttgcaagcattattgttgtgggactgaagggaatgctaatacagttccgagatttaaaaaaatattggaatgtggataaaatcgattggggaatatgggtcagtacatatgtatttacaatatgctttgctgccaatgtgggactgctgtttggtgttgtttgtaccatagctatagtgataggacgcttcccaagagcaatgactgtaagtataaaaaatatgaaagaaatggaatttaaagtgaagacagaaatggacagtgaaaccctgcagcaggtgaaaattatctcaataaacaacccgcttgttttcctgaatgcaaaaaaattttatactgatttaatgaacatgatccaaaaggaaaatgcctgtaatcagccacttgatgatatcagcaagtgtgaacaaaacacattgcttaattccctatccaatggcaactgcaatgaagaagcttcacagtcctgccctaatgagaagtgttatttaatcctggattgcagtggatttaccttttttgactattctggagtctccatgcttgttgaggtttacatggactgtaaaggcaggagtgtggatgtattgttagcccattgtacagcttccttgataaaagcaatgacgtattatggaaacctagactcagagaaaccaattttttttgaatcggtatctgctgcaataagtcatatccattcaaataagaatttgagcaaactcagtgaccacagtgaagtctgagacccttttgtcacagtacagctcttgtctttaccaactgcctgaagaggccatatgctggcattttgcacaactttttggttgtttagatcctacagatgacctctgctacaataagtacgatgtgacttagtaactgcatagcagttggaaagaactgccaacttttttttctcatttttgttagtaagaagattcgcttagttattttatgtaaaaatcagtatgtgtttagttttagtgtactgaagggtaaacatggttttattttattttaccatattattttgtgttgttttatttctattgtgctgtaagttgatgtttaaaattgagaaatacttttgtcataggtaatttggaacatttacaagccatttgtaaaattttaagataatctgtaactaatacataaaaacaacttagcaaatgtgccattttcacacaacttctctctgtataggcctctgaaatatcaataaggctaaatattactttacacagtaagatgtgaaattcacaaaaagtaaaccaaacaaaacgaatgaaaaactggaaataattcgtttccatatctttccatacatccatttctgaagtattcaggaatgttttcataatcgaaagaaacgggtatccaaataaaaccaagttcttgacattggtctgttttgctgtgaatattggaaatgcttaggatcttcagacccaatagctctaattttaacatttctacccaataagaggctctgttttccactgaagctttgttggagaaagagaatatgaaaattacacattttataatttttagatgagaaaataccactagcagaatagctttgtgctattccagtataagatgaactgtaataatttttgacttccctatttcagagatagtcaatataatatgtttatctatatccatatggatggataggtaggtagatcttcatagatttttttttcttttgttagaggagagcttgatgtgattatcttcaaacccaccaaaccaacaggataattgacaaataaacgccataggctaggctgaactgtatgttactgttttcatgcttatacatatattttcaatcacatacaagtacatagaatttcacattttaatttagcaaattgatttacctaggaaaaaattatcaccttcaaagataggcatagacacataattatgcttaagcttttaacagcattttaaccgctctaaaaattaccagagtaagaaaaagctaggtactttaaagtgagtttgagaaacaagttgaaactaaaattaaaataccagccatttaggtgctttctctggcatctataaaagtaaattctagtgcctgccaagtgatggattataatggtctctagcaaatgtgtggtaaacattcatatggccattaattttaacattaaatcgtaggtagggcaatgtagtaaaatgaaagagaattaagaaaggttttgaattcttataacatatccagccatttcaattttgattgaaatgaactacaaagaatagtgtttgtccctatggtagcctcagtctctttatcactaacttggattgaaatgagtgaggccaactcacattcccatcaaacactcttccaaggaaaagcagaagtaataattggaggtaaagtttccttagagaaaataattttattctgctttgtccaattaaattattccaatggcggatggtaatattcaccatctctaattcattggtcactggtaggtaagcatgagttaaggaaagtcaaaaatgaaaatatattttgctgtgtataaattgatattttgctatgcaactcctgtaattgaatttgtataatgcaggcactttctaatttattagagattatggatcagttctgacattaaaatcatagttaattgatggatggtttttatagtttgttgataaagtggacacagtattgtctgagcagttatattttaatgcatttcagtgtttatagtagaagtttagtggataaaactttaagtccaataacttgggggtcaaatgctaatgttttattcaatgtaaaggaagaccaaaccatgtaccttatgaagacctttgttttaagacttccacacaccaaggctacaatgactgttaacctggaggaagtctctggtatggagttctgagagcttaagagctaaacatgagtttagacacacaagattctaaaatgcaaatgtttattttgaagcaggcattgacaacacaaaaactgtgtagtggtcttgatgctggattgtttctagagtcacaatgaattatttttatgagattaccttatttttatatatgacaaactacttctataatgcttattatggtaaaataaaattggaaaaaattaaaactgacctataagagtgttaaggacctaatagagtgacatatataaattaagcataaaatatgtaaccaggaaaagactgttaacattacatttatgcaaattaaatgcccttaaatttcaccatttgtctttcattttaaaggttatttgctcccgattatatgattcaagtgttataagttttagcttgaactactttgcagtaatttatttgacagatctctattctataaatgtgtaatgtgatgaagaaagagatctttcttttttaatgaaaacattaatgtgttaataccctgtatggataatgcttgacatttagtggtttccaaaatatattagtatattgttgaacatacattatgccttagaaatgcacattctgtattttgtgggatgataatctaattcagtatagaatatgctgtttggcaatgagtttgtggccagatttcaaatagggagttaagtggtactttcacaatccaaagatttttagttaaaaatcatgtagtctaatatgctgcagttatttttttatatttttcaatgcatttaattatcttttttataattctttgtactaactcagcatgtaacaaccaatttacatggaaataaatcgaaatatgataactattatgcaaaaaaaaaaaaaaaaa

SEQ ID NO: 23607 - DNA, 3613 bp, Homo Sapiens
acgtgacctggtgacagtgctggcttggctgtacagctcgatctaggttctgcggcacgggatggcggaggcgcctcctgtctcaggtacttttaaattcaatacagatgctgctgaattcattcctcaggagaaaaaaaattctggtctaaattgtgggactcaaaggagactagactctaataggattggtagaagaaattacagttcaccacctccctgtcacctttccaggcaggtcccttatgatgaaatctctgctgttcatcagcatagttatcatccgtcaggaagcaaacctaagagtcagcagacgtctttccagtcctctccttgtaataaatcgcccaagagccatggccttcagaatcaaccttggcagaaattgaggaatgagaagcaccatatcagagtcaagaaagcacagagtcttgctgagcagacctcagatacagctggattagagagctcgaccagatcagagagtgggacagacctcagagagcatagtccttctgagagtgagaaggaagttgtgggtgcagatcccaggggagcaaaacccaaaaaagcaacacagtttgtatacagctatggtagaggaccaaaagtcaaggggaaactcaaatgtgaatggagtaaccgaacaactccaaaaccggaggatgctggacccgaaagtaccaaacctgtgggggttttccaccctgactcttcagaggcatcctctagaaaaggagtattggatgggtatggagccagacgaaatgagcagagaagatacccacagaaaaggcctccctgggaagtggagggggccaggccacgaccaggcagaaatccaccaaaacaggagggccaccgacatacaaacgcaggacacagaaacaacatgggccccattccaaaggatgacctcaatgaaagaccagcaaaatctacctgtgacagtgagaacttggcagtcatcaacaagtcttccaggagggttgaccaagagaaatgcactgtacggaggcaggatcctcaagtagtatctcctttctcccgaggcaaacagaaccatgtgctaaagaatgtggaaacgcacacaggttctctaattgaacaactaacaacagaaaaatacgagtgcatggtgtgctgtgaattggttcgtgtcacggccccagtgtggagttgtcagagctgttaccatgtgtttcatttgaactgcataaagaaatgggcaaggtctccagcatctcaagcagatggccagagtggttggaggtgccctgcctgtcagaatgtttctgcacatgttcctaatacctacacttgtttctgtggcaaggtaaagaatcctgagtggagcagaaatgaaattccacatagctgtggtgaggtttgtagaaagaaacagcctggccaggactgcccacattcctgtaaccttctctgccatccaggaccctgcccaccctgccctgcctttatgacaaaaacatgtgaatgtggacgaaccaggcacacagttcgctgtggtcaggctgtctcagtccactgttctaacccatgtgagaatattttgaactgtggtcagcaccagtgtgctgagctgtgccatgggggtcagtgccagccttgccagatcattttgaaccaggtatgctattgcggcagcacctcccgagatgtgttatgtggaaccgatgtaggaaagtctgatggatttggggatttcagctgtttaaagatatgtggcaaggacttgaaatgcggtaaccatacatgttcgcaagtgtgccaccctcagccctgccagcaatgcccacggctcccccagctggtgcgctgttgcccctgtggccaaactcctctcagccaattgctagaacttggaagtagtagtcggaaaacatgcatggaccctgtgccttcatgtggaaaagtgtgcggcaagcctctgccttgtggttccttagatttcattcatacctgtgaaaagctctgccatgaaggagactgtggaccatgctctcgcacatcagttatttcctgcagatgctctttcagaacaaaggagcttccatgtaccagtctcaaaagtgaagatgctacatttatgtgtgacaagcggtgtaacaagaaacggttgtgtggacggcataaatgtaatgagatatgctgtgtggataaggagcacaagtgtcctttgatttgtgggaggaaactccgttgtggccttcataggtgtgaagaaccttgtcatcgtggaaactgccagacatgctggcaagccagttttgatgaattaacctgccattgtggtgcatcagtgatttaccctccagttccctgtggtactaggccccctgaatgtacccaaacctgcgctagagtccatgagtgtgaccatccagtatatcattcttgtcatagtgaggagaagtgtcccccttgcactttcctaactcagaagtggtgcatgggcaagcatgagtttcggagcaacatcccctgtcacctggttgatatctcttgcggattaccctgcagtgccacgctaccatgtgggatgcacaaatgtcagagactctgtcacaaaggggagtgtcttgtggatgagccctgcaagcagccctgcaccacccccagagctgactgtggtcacccgtgtatggcaccctgccataccagctcaccctgccctgtgactgcttgtaaagctaaggtagagctacagtgtgaatgtggacgaagaaaagagatggtgatttgctctgaagcatctagtacttatcaaagaatagctgcaatctccatggcctctaagataacagacatgcagcttggaggttcagtggagatcagcaagttaattaccaaaaaggaagttcatcaagccaggctggagtgtgatgaggagtgttcagccttggaaaggaaaaagagattagcagaagcatttcatatcagtgaggattctgatcctttcaatatacgttcttcagggtcaaaattcagtgatagtttgaaagaagatgccaggaaggacttaaagtttgtcagtgacgttgagaaggaaatggaaaccctcgtggaggccgtgaataaggttgaagtcgaaacatcccactggacatttctctaaggccagcttgatgaaaaaaaaaaaaagcaatcaagtcctggaaacactttcaacctagagtagttgtaggaaaaagtcacaacttctttgaggatccttatctttctcaaaacacagccattataacatctgtggaagcctgtcctggttcaggacagttgactgcagaaaagatctacagtcggctgggcacagtgtctcatgcctgtaatgccagcactttgggaggccaaggcaggcagatcacttgaggtcaggagttctagatcagcttggccaacatgacgaaaccctgtctctactaaaaatataaaaattagctgggtgtggtggcgggcacctgttattccagctacttgcaaggcttaggcaggagaattccttgaacccgggaggcagaggttgctgtgagctgagattctgccactgcactccagcctgggcaacaagagtgaaactctgtcttaaaaaaaaaaa

SEQ ID NO: 23608 - DNA, 3995 bp, Homo Sapiens
gggggctttgtgcgcggcggcggcgggagaggcggcggcggcggccagcacggaggcggaggccgagggggctgtgcacaggtcgccgcggagaggcgtgcgaattccgagccgagcgccgaggaccgtgctacccaggccgggctgccagccgcaggctcctctctggcagcagcggcggcgcggcgacccccgtccctcggcctccccttcccatcccacctcccgagccttcctcttcccgcagcacgcccggcccggcccggccgtggccctcctcagtgccggccgccatggcagaggcgtccggcgcggggaaaatctagcccggggatttcatgcggcctagctcggttccgcctcctcctcgcgcggccccagcggctgcccgcaccccagccccactccgggcctccgtgtctctcctgtgatcgcactgacacggccggggggttagaatggaacaaactgaaggcccgatgagagaaagggaaagttaaggatgctggagcagaacaatggatttctctttctctttcatgcaagggatcatgggaaacacaattcagcaaccacctcaactcattgactccgccaacatccgtcaggaggatgcctttgataacaacagtgacattgctgaagatggtggccagacaccatatgaagctactttgcagcaaggctttcagtacccagctacaacagaagatcttcctccactcacaaatgggtatccatcatcaatcagtgtgtatgaaactcaaaccaaataccagtcatataatcagtatcctaatgggtcagccaatggctttggtgcagttagaaactttagccccactgactattatcattcagaaattccaaacacaagaccacatgaaattctggaaaaaccttcccctccacagccaccacctcctccttcggtaccacaaactgtgattccaaagaagactggctcacctgaaattaaactaaaaataaccaaaactatccagaatggcagggaattgtttgagtcttccctttgtggagaccttttaaatgaagtacaggcaagtgagcacacgaaatcaaagcatgaaagcagaaaagaaaagaggaaaaaaagcaacaagcatgactcatcaagatctgaagagcgcaagtcacacaaaatccccaaattagaaccagaggaacaaaatagaccaaatgagagggttgacactgtatcagaaaaaccaagggaagaaccagtactaaaagaggaagccccagttcagccaatactatcttctgttccaacaacggaagtgtccactggtgttaagtttcaggttggcgatcttgtgtggtccaaggtgggaacctatccttggtggccttgtatggtttcaagtgatccccagcttgaggttcatactaaaattaacacaagaggtgcccgagaatatcatgtccagttttttagcaaccagccagagagggcgtgggttcatgaaaaacgggtacgagagtataaaggtcataaacagtatgaagaattactggctgaggcaaccaaacaagccagcaatcactctgagaaacaaaagattcggaaaccccgacctcagagagaacgtgctcagtgggatattggcattgcccatgcagagaaagcattgaaaatgactcgagaagaaagaatagaacagtatacttttatttacattgataaacagcctgaagaggctttatcccaagcaaaaaagagtgttgcctccaaaaccgaagttaaaaaaacccgacgaccaagatctgtgctgaatactcagccagaacagaccaatgcaggggaggtggcctcctcactctcaagtactgaaattcggagacatagccagaggcggcacacaagtgcggaagaggaagagccaccgcctgttaaaatagcctggaaaactgcggcagcaaggaaatccttaccagcttccattacgatgcacaaagggagcctggatttgcagaagtgtaacatgtctccagttgtgaaaattgaacaagtgtttgctcttcagaatgctacaggggatgggaaatttatcgatcaatttgtttattcaacaaagggaattggtaacaaaacagaaataagtgtcagggggcaagacaggcttataatttctacaccaaaccagagaaatgaaaagccaacgcagagtgtatcatctcctgaagcaacatctggttctacaggctcagtagaaaagaagcaacagagaagatcaattagaactcgttctgaatcagagaaatccactgaggttgtgccaaagaagaagatcaaaaaggagcaggttgaaacagttcctcaggctacagtgaagactggattacagaaagggtcggcggaccggggagtgcagggctctgtcagattcagtgacagctccgtctccgcagcgattgaggaaactgtggactgagattcctgtacaatttcatcccagaaactccagacttgtagtctccatgcaagatttctttgtcggcggcttgataaacagtttctttgttttcgattttgatttcgccaatcatcattattggcattttcctgcctggtttcttcttcaagactctgaacaattgctttaacagtcaaatgatttttttttttcggtttgagctggatgggtacagcttaaatcatgggtccagcctaaaaaccaccatttaacttacactgatcaatttcaacatggactgtttttggttttttgtttttaaataaagcatcattaatgcacatctgcaggggtttgccaaacagcccaaactgtatacattacaatcattaaaagttcttattttttttaatattagtgccgttatcatggagaacagcatgacagctgtctttggcagtctgtcatttttctagcattttcagaaactcatcggaaatggcggtacctgtgtttcccttcgaaagcctctcagtacagcactcctgttcctctgttaaaactccttgttaatccagtgatcttttaggccaaggaaatattttgtgatggtgttctgggtccatacaccagcaatgaaggagatagatttgtgtacttgtgttttttaatcagcattaacatgggcaggcaccctcatttatagatgtcaggaaacattcagtgaaaaacttgtagaatgggatgtgataacgaggttccagtaatctgagcagtctaacgaggcccacctcctccaccacagaacgtggctatgttccaagtgctactctcactcagcctgttgcggatcttcatggcctcaggagacttgtttctccatgggctcttctggactgcacacttccaccatagcttgctgggttgatctagatgtctgtttgttgtatggaaattttgggggaaaaaatccaaaacacaaactgtgggttgaaatattaaccgtctccttggttccttggtattcaccgtgcctgatctgcacatttcatcgtggctgtttctgtatagcctatactgcattagcccaagagattgttgctttgtaactttttgcactattgttttggctggatttgtattacacacagttttaaaaaaaacaattccacactattctctgccttttttttcctatttatttcttcccgcacaaattccacatagaggccttcccatccagctctacgtgatttggctgcacttgaacactgattgtccatttacagccctcagcaatgtgccttctaaatggcatgacatatgtagatgtgctgcagcgcttgttaatggtcacaataaatgccacttcaccaaggaagtctcagatgaacaattatgaacatccaaattttattggggggcaataatcaactgaattgcaaaatttgggggaaaatggcactatccgtgtacgaatcgaatacaaatcaaagatttgtcacatccctaataaaaacaagatggagatgtctctgcaaccatatttgtaagcta

SEQ ID NO: 23609 - DNA, 2990 bp, Homo Sapiens
atggaagtgtgttaccagctgccggtactgcccctggacaggccggtcccccagcacgtcctcagccgccgaggagccatcagcttcagctccagctccgctctcttcggctgccccaatccccggcagctctctcagaggcgtggagctatttcctatgacagttctgatcagactgcattatacattcgtatgctaggagatgtacgtgtaaggagccgagcaggatttgaatcagaaagaagaggttctcacccatatattgattttcgtattttccactctcaatctgaaattgaagtgtctgtctctgcaaggaatatcagaaggctactaagtttccagcgatatcttagatcttcacgcttttttcgtggtactgcggtttcaaattccctaaacattttagatgatgattataatggacaagccaagtgtatgctggaaaaagttggaaattggaattttgatatctttctatttgatagactaacaaatggaaatagtctagtaagcttaacctttcatttatttagtcttcatggattaattgagtacttccatttagatatgatgaaacttcgtagatttttagttatgattcaagaagattaccacagtcaaaatccttaccataacgcagtccacgctgcggatgttactcaggccatgcactgttacttaaaggaacctaagcttgccaattctgtaactccttgggatatcttgctgagcttaattgcagctgccactcatgatctggatcatccaggtgttaatcaacctttccttattaaaactaaccattacttggcaactttatacaagaatacctcagtactggaaaatcaccactggagatctgcagtgggcttattgagagaatcaggcttattctcacatctgccattagaaagcaggcaacaaatggagacacagataggtgctctgatactagccacagacatcagtcgccagaatgagtatctgtctttgtttaggtcccatttggatagaggtgatttatgcctagaagacaccagacacagacatttggttttacagatggctttgaaatgtgctgatatttgtaacccatgtcggacgtgggaattaagcaagcagtggagtgaaaaagtaacggaggaattcttccatcaaggagatatagaaaaaaaatatcatttgggtgtgagtccactttgcgatcgtcacactgaatctattgccaacatccagattggtaactatacatatttagatatagctggttagaaaaatgccactgtttttatcaagaagggaaatatatttgaaatataaaatattaaaattatgctcatttctatttttaaaaataatttaagaaattttacccttgttttcccttgttatggctcttctaattctcatttaattttaggatgtaaaaagtatatttttgcagaacaggcagcagcaataacttgtttctgttcttatgtaaataagaatccattattcgctcatgtggaagcttcttttgcatcatttgggactgccatttaaaaaaggataggtaaacaaagaaatgacaaaaataaaataaataaaataaaaatggataggtggtgacccactgagcctgatcataatacgaagaccagcttctgccactgcctttccagactcttaccactgcctgttgattaaatctaactcttcaacatcctagacaggcccttataatcttgcttcaaatgctgtgcagccatcttgcctcaacttccctctcatttgcctacagcatctcgggacgcttctgtgtttcccaagtatacgctgttctttcgctctttgtgcttcgccagtgctttccatgtgcctcgtagagttatttttcttgaagaggcagctcaaatgtcaccttctccagaagctgctctccacttgctttaggcagagtcagtcacttttcttctagattccaaagtgcctgatccacttggttgtggattcctggagcctagcaccacaccagaagcacgaggcccttgagaactgtgtgttgagtgaactaataactgtattatagaaagcataatgaaaatgtcctgtgactgaagtatgtgtagcttgttgcaggagtcacaggaaagttgactaggattgagtgtgttgggctttgggtataaaggagggggattctacgggggcagtagctcaacaaggaatagagggaggagtgtaattttggtagctggtgttgaatagggcctttgagaatcagactgaacacagtgaaatatgtgcccaaagttcagaaagatgaagtttccagaaactaagaaggtagcacaatatgtggcatcatactcagaaaggaagaccatgccatggggccagaaattcagaaacgtaattcttacattgtgattgcaatggatactcatgaaagaaagtgggtagtggccgatttgccttcagagtgacaggtagagaagggaagagcgtgtagaactgtggccatactttaggagtgtgagggatgctgaatctcccagagagctcacactggccaggaatgctgagagtagcagatgcttttcttttgggaggatagtaaaacaatttagaaccagatatgctttgtcttgattctcaagtagaataatcttcaaatgcaaaagaatacattagaaatggacaaaagtggccaggagcggtagctcatacttgtaacccagcactttgggaagccgaggcgggctgatcgcttgaggtcaggagttcgagaccagcctggccaaaatagtgaaactcacgtttctactaaaaatacaaaaattagctgggtgtgatggccacttgggaggctgagataggagaatcgcttgaacctgggaggcagaggttgcagtgagccaatatcgtgccactgcattccagcctgggtgacagaatgaaactccatcactccatctcaaaaaaaaaaaaaaaaaaaaaaaaaa

SEQ ID NO: 23610 - DNA, 929 bp, Homo Sapiens
ctgtttctgacctcctgacctggcttcccttcctggcagggtgcccgaacgcgctgatgccccgagtgctcgcagggcttcccgctaaccatgctgccgccgccgcggcccgcagctgccttggcgctgcctgtgctcctgctactgctggtggtgctgacgccgcccccgaccggcgcaaggccatccccaggcccagattacctgcggcgcggctggatgcggctgctagcggagggcgagggctgcgctccctgccggccagaagagtgcgccgcgccgcggggctgcctggcgggcagggtgcgcgacgcgtgcggctgctgctgggaatgcgccaacctcgagggccagctctgcgacctggaccccagtgctcacttctacgggcactgcggcgagcagcttgagtgccggctggacacaggcggcgacctgagccgcggagaggtgccggaacctctgtgtgcctgtcgttcgcagagtccgctctgcgggtccgacggtcacacctactcccagatctgccgcctgcaggaggcggcccgcgctcggcccgatgccaacctcactgtggcacacccggggccctgcgaatcggggccccagatcgtgtcacatccatatgacactcagagagggccaagactgcagaccttggggaccgaggacaccctcaccacgctggtgggggctggggggatggcgcgggcggtggcgtgcggggaagcgcctggggaacacctggctctgcaagttttgtgccttagcggaaagaggcgacatctctggcaagttgggagtacaggaagtagcgaaggagtgccatctggtggatccttctggtagtgacactcagacctgggccaggggccttgagacaatttacttgactggaaaaatctgaataaaaaaaagatgcttcaaaa

SEQ ID NO: 23611 - DNA, 47833 bp, Homo Sapiens
ggggttcctggccggatcccggtctacccttagcccagactcgttccggaccccagcccggcccggaacactctgggcgagacggcggtggcaactctccccttgccgccatgcacgacgctttcgagccagtgccgatcctagaaaagctgcctctgcaaatcgactgtctggctgcctggggtgagccgaggggccgcggggccgaggcggagtcagcacaggagcggtccggatcttttctgaggccggggaagtggacaggcgtccatccgtgtgggcttcggttggatgctacacgagaggggcttaggatgagagaaggcagagagatgaccaccggctatagacatcgatgtctgtggggctacttgggtgatcccagtgatccagtcatttaggggagttccccttgcttttgctctctgtgcagagtgggaggatgagctttcctttttagttgtgctcagctttggcccattttgattcccacgaagacttcattttagagggtcaaagcagtaagaagttctcagcctgccaggggcttgaagttgtccagatgtttgtgttgttttctagatgaaagtcaaccctggttttgggggcattgaacaagttaacaccatatgcttttttttccccttagtgatcattcgttcatttctcattcctgtagggaactcatgtagttagctaacctttgaatctagccaagcggttgattaccttatatccaaagtgtccaagttacctaactgtaggcggaagagtttccagactgtcttgaaacctaacccataaaaactagcatagtccttttgggattgactagtgcagaaggccgggacagacatctcttgtgtgctctgaaatacaaatgaaggtttcagggataacggtgaacattgtgctcttatccgtgagtgactggtttgataccagccgccaaagaccaaggaaatcatttctaactttcctcttaatgtttaggtcctagaaatcaaggaccataaaaagatgattcagatcccttaatcagatcttatactgagctagataggtaaccatgatgggccttatggaatcttggtggtgtctgataccatgtgcgtcagctgttcacagtgtcaccgagtcatccttgcagagttcttgatgacttcttctgtagggttctttcacgaagaattttcatgttaatgtgcacccttcctcctttagcagctctgggtctctttaaaatcatacctccacagtaagcagttctagtcctttgggttaagaggagaatcctacttcctccagacatctcaagaaaaccaatttctgtcattaaatgctctcattaaacatttaaatagaggaggagaaaaagtttttaaatgaaagacctgacactgcatgaaaggattaattcccccattgcttcatcagatatacttattaggtggctacacgggccattctctttgcttgggacagtaatacaatgatgaataagaaacagtgcctgtgctcctaggacacacactgggggacaaatacacgtgaacagattataatactagagacatatgctgcctattattgcaacatggatgagggggtacccaactcagctaaggacatatgtttctgaaagggattaatgcagctgtggctacacttgacttagctcgtcagaatccttgactctgatctcctgttggaccattagcacatagtgctcctagactctcaccaactccactttgtcacagtaaagattccttgcacctgtggttttcaggaacacagttttgaaacaataggtagcttttggccttccttgatcacccaccgaacaggagaaatgctctttggttcctaaggtgcttaggtacatattaggttacaagaggccattaactgcctcctgcttcaaaagtgctttatttccagatttgagcagcagtaattattgctctttctagtcattacccctttttaactacattgtgcctttggatggaaagttcgtccaggaacttccagaggcaggtcacacagggccaaatagtatttgaggtgtaaatgtcttagagacaacatactctgtctcctgggaaatagaaatcaggagagaacatgatgaggatgatttctttctaaactccaaagttgtataatcctgctgccttttcagcatcttcatttggatgtccagtagcatagccaaaaccgttcttgattcctctcccctcaaacatgcctgtcctcctgtatcttacgtctcagcaagtggcatttctatttacctctttgactaaagccaaaagctttggaatcgttcttgacttctttcattctgttttacactgtatcccatctatcagcaaatcttgtgtgttctacccctagaataaatctgaaatccagtcatttctctctatcttgatgattactactcttgaaggcaccatcatctgtcacctgaattactgtagtagtcttctcattgatcaccctatatttgccagtgtgccattttcagttttttgtctaccaggtagagtgaaactttgaaaacctaaatctgattccatcctctactcaaaaccctctcatggtatcacatcacaactagaataagttccaaagttttcaccctgtctggcaacatctgacatgatcaggccctgatttcttccctgtcttctgtgtacttacctctcactcctttctggtaccagtcccacacagccttctttgttccatcaatgcacaaagcacatacccacctcagggcctttacatttgctgtttccttggcctggcactcacttgcctttgtatatatggttcattcctcatttcactcagttctctgctgaaatgtcacccaaatcagcaaaaccttccctgtgtatcctatataaaagagattgccacatccaccaatgtgctgttttcttagccttatcttctaatcatgggtcaccatctactgttattttatatatttaattattattgcctctctcactccacattagaatataagttccctcagggcagtatctttgttttctgcattgctatatctgcagtacctaaaacatttcctgactcaatgggtattcattaaatatatatttaatgaataatgttaatatgaatagtaatagcttgcagttgttaaatgctaatctgtattaggcttttataaaataagactccattttacagaagaaagacctaaggcttagaaaatttaagaaatttttccaaggtcacatgtcctgtaaatcatgtctgcttctagagcctggttctcaaacttgaatgtatattcaaagcctgtaaaaaatgcagacttcacatgtatatatgagtatctgtatgtctatatatacatacatacctatattttccagagaaacaatggaaagataagtcaaaaattactaaaatgatgcccatagcagaagggagaagagaggataaaatggacaatgatagaaactagacttttcgtcgttttagctttggaactacatgaatgtttcataaaaacaaataaaatttaatttaattttattttattttattttatttcattattattttttgagactgagtctcgctctgtcgcccaggctgaagtgcagtggtgcaatctcagctcactgcaacctctgcctcccaggtacaagccactgtcgtgcctcagcctcccgagtagttaggattactgccacccaccaccatacctggcttatttttgtagttttagtagagacggggtttcgtcatgttggccaggctggtctcaaacgcctgacctgaggtgatccgcccacctcggcctcccaaagtgctgggattacaggcgtgagccactttgcccagccaacaagattaaattttaaaatgtaaatttcagggtaccacttcaaagccattgaatctgaatctccatgtgcagggcccaggaatgtgcatttttaataagtccaggtgattctaatgcagctaattgggggcttatgcccagatgagaagtactgttatttgccatgttacccaacgaagggaagtgactactatcttacttatctttgtggtccctgcagtggccagcattgggccagaaatggaatttattacatgaagttggactgcattgcactgttggaaggagctccattagggtaattatgagcaatagggcctagccctccttctcaggaggaattaagtccaaccttgtggctcagggttaggccgtcaggagttttttagggctgatactgctttgcttatgtgtgcgttttgtgtttgcttagtatgtctcactttctgttgtgtgttactgtattgagtctcagaaggcactgtccatcccatgctgcgcgtgctctgcaggcttgtcatcctctgtgttgtgcatgcacagctttgttaaataacgtgtcctagagagtggaggacccaacatgggacaggtcctctggctaatggcacatgtaatcaatcaggttgatttaaaagtttacagagaatttaatccatcggattgattcccttttatgaccagtagaatagacattttatttttttaattaattttttttttggaggcagaatttcacacttgtcacccaggctggagtgcaatggcgcacaatctccactcactgcaacctccgccgccagtgttcaagtggttctcctgtctcagcctccctagtacctgggattacaggtgctcaccagcacacctggctaattttttttttttttttgagacagagtcctgccccgtcacccaggctggagtgcagtggtacgatctcagctcactgcagcctctccctccggggttcatgcagttctcttgcctcagtctcctgagtagctgggattacaggcacacacaccaccatgcctggctaattttttttgtatttttagtagagatgggtttccactgtgttggccagactggtcttgaactcctgacctcaggtgatctgcccgccttggccttccaaagtgctgggattacaggcatgagccaaccacactcggcctaatttttatattttttagtagagacggggtttcaccatgttggccaggctagtctcaaactcctgacctccagtgattcgcccacttcggcctccgtgcccggcccctagacatttgactttttaaaatgttttgtcatgtcttagtttgggttcacaagaaaaaaaaaaagtaaattaaaaaatctattggcaagaaacatttcaataaaaatggaaaatagactcttgaatgtcatgtttaggaatttgacttcatattttggtagtgtagcttcacaggattttttaagccccagtgtgacagcatcagagatctgctctaagataactgacagcaaatgcgagagaatgcatggagtgaatgagaccagttgaaggtgtcacaggggtccccagagagactctataggaggaggctgtcatgaggtaccattacaggtagaattgatagaccctggccgacttgggaggaagctgaggctattaaaaaagataaagaaaagcaggaactggcagggatttgggggacagagtggagagagaaggatggggaagatgatgaacattatgttggccttttgttttggttgtagatttttatgtatgttatgagtggatttttaaaaaatttccacttcattttatttatatctgaaatatcagtgggtggcctaaaaatcaactttaatattgctaaattgcttgatatcatgatatctataaagttctaaatatagtatcttttacaaaacaaatattgcaaaatgaattcttttattttttcatgttctgctgcagcataaatctccagccttcattagagctgctgttatttctgatttcaacattttttttgtgtgtgacctgcctttcctttaagaccccaaatcaaagaaaatagaatcactctgtttttctggatgactaagaacatcatcctggagaaatactattgatcctttggataaggaatgtaggtgctgacctgtttttataaatataactactgccattcagacaacctttggctgacacccattttttttgacatgggtgccttagtaagtacatcacagcatgtggttgggaatcaagacaaattggggttgggatcccaactctgctgcttgccacatgtgtgactctggaaaagttatatattccctaggcctcaacttcctcatctataaaatggggatttgaaaaaaggacttacttcaagggatagttgtgaggattagtgaaataacagatgcgtttagcatttcctggaacacaatacatgctcaataaaagttatctatttgtaccattatccaagattttattttacagaggtcaagaatcaagagagtttatgaaaggaatgagtgacctttatgttatcaaaaagctaaggaagtatctgtacatgcttaccttccttgaatgatgtaatatgggtctgtcagggtaattatttaaactctttctgagcctctttttacctagaccagtgcctcccaaaatgtggtccttgaaccaccagcatcagcatcatctgggaagttgttagaaatgaaaattcctgggcctacttttaaacctactaaatcagatgctccggggtagagcctagcattctgtattttaacaaactctcaaataattgtgatacactaaagtttaagaaccactagcctagaccatcttttaaaatgtacaatttggctgggcacagtcgctcacccctgtaatcccaacactttgggaagctgaaggggcattgcttgcggtcaagagttggagaccagattgggcaatattgtgagccctcatctctataaacattttttaaaaaatagctgaacgtggtggtgcatgcctgtatttctcgccactcaggaggctgaggtgggaggatcacttgagctagggaggtggaggctgcaatgagccatgatcacaccactgctctctagcctgggcaacagagtagaaccctatcttaaaaaaataaaagttaaaaaaaagtgtacaattaaatggtttttagtacattcacagagttatgcaactatcagcacaataaattttagaacatattcatcactttcagaagaaactcagtacccattagtatttactttctattttcccccaagcccaccagccctgggcaaccgctaatctttctacctctgtggatttgcctactctggacatttcatataaatggaatcacgtggccttttgtctggcttccttcagttagcatcatgtttttaggttcatctgtgttgtagcatatatccatacttcctttcttttcattgttagctaatattccgttatatagacatgccacattttgtttatccgttcatcagttggtggacatttggtttgtttccatcttttagctattacagataatactgctgtgaacatttgtgtacaagtttttgtgtagaatatgttttcatttctgttgggtgtgtaaccaggagtggaattgctgggtcccagggtaactctgtttagccttttgaggagctgctagacttttccaaagtggctctcccattttacattcctgccagcagtgtatgaggattctaatttctttatattctcatcaacacttgttattaaatattttctactagactatcttttgagataatgaattctgtaagcttattatgttacgtcatttattttcctgaaagtaaaagcatttaaaggatgcctcttagctattattgctgaggttggatacctggtttcacatttgtacttccattttgtgattttataaactttcatcatattctttttagcagaatttaaaaatatatatctgaagatatatatcttaataaaagtatatataacaaaaaataaaaatcataataatttaatcttaaaaatacaaagcccttctatcttttttattagtttaacattaaaacaattgagccaggacatttttatcctctgatatgtctagcctagtaattattcaataaatgtgtttttaaatggttgattttcaaacatgagtataaacatttcttagctttgcaaaacacctcctatcaaaagcaactcattttcttgacacattgatttctgattacaagccccagctaaaaaaatagggttatactcaagctgattgacctttctcaaagctggtttttttttgtttttgtttttgttttgttttgtttttccagaggaatggcttcttgtgggaaccaaacaaggacatcttcttctctataggattcggaaggacgttggtaagtgcacattgctcatgcaaaaaaataagttttaatagtcagctagtatacaactgtgaaatcagttattcctggaccattaaaagagagattgaaggttagagggagcacggtgggaaaatggggagaagacttgagaatgcctagggtttttctcctccaaattgtattgccctacctgcatttgggaggtgaggatgaattgctggtttacttattactgaattacttattactggtagtgagtctctaagaaaagaggaggtggttgttttcctcctcttttctttgagactcactaccaataataagaaatactactaatgggcataagcttcctgtatatatggtgtggtggtaggaaaaaaaattaggcaacatcgatttaaaatatcttgttggcttatgaggggtagaacaagaagagaggaccagggtttgccttcatgtgcacttccccctggctgcgtgaccgtgagcaagttctttccaacatcagttttctataaactctctgccccacaaagttgttggggtggatgcaataataggctcgaagaaactgtgaaaactaaagttctaatcaaatgtgactgtcagtaatgtagagtaataactaaagtatttgaaatgtattctgttaaagagtgttttttattggggcagaaagtacctcactgcccttccttgttttcgtttctgtgctctctttatggagaatagatgtgtttaggtattatgccctggagccactctacagaaatctgcagttaatttcatacccttcaatataatatatatttctctggtaaatagcttaagagatagcttaagataaatagagctctcttgtggaacctggagcaagggtaacactgggggaaaaagcaccttactagtgcactcgggaaagagaagatatcctggtcagtttctgcagcagggtaagaaaagaaaccagagaacaaaatagataatttatttcatttctaagtttttcaactgtcctctaaatcagggtcagcaaacttgttctgaaaaggtccaaagaataaatattttaggctttgcagtgttgttactacttaactctgcctttgtaacatgaaagcagctgtaggcaatatgtaatgaataggtatggctatgttccaataaaactttatttacaaaaacatgcaaaggcctcagttaggccctggagcagtacattgttgatctttgttttaatgttttaaatttttaattctcatggcctgtgaagtggctcatgcctataatcccagcactttgggagactgaagtaggaggaatgattgaggccaggagttcgaggccagcctgggcaacatggcaacaccctgtctacaaaaaattagctggatgtggtggcacgtgcttataattccagctgctctggaggctgaggtgagaggatcgcttgagcccaggaggttgaggctgcagtgagctatgatcacaccattgctctccagcctcagcaacagactttgtctcaaaaaaaaatttctttttttagttctcggagccaaaatatttgcgttctgtgatatttgcctggtctataattttaaaattaagctcacattttaattttaaagctaaaaatgcttatcttattcagcattcaacaattgttttttgactctctgctttgctttcacatgtaagtggtgatcagaaattgaaaacaagactttataaatgaagtctcaacacagtatagacctgaactggtaatattagtgttaatctggcttggaaccctggtggcgactattccttgccctatgatcattttatcatgtcacctttgacaaattagttaatgttcctgggccttggtttcgccataggtagattaaatatagacaattaggaaatcaaattctgatttgaaacttttcttcaagaaatgccatttttccctatactcttggtgaacagtttagttctggcccagatctggcctgatgtgggccagaaatagacctgggcccgtgtgaattagttctagggttaatttggtttccagatttgagatatttcaagcctaaataggtctttgggtagactgtctttctgaggaaagggaggggataatagggtcaagaaaagactaggggtagggatcgtaggctctgatctgatctgagtcatttccctggagctcagttgagccagtgacatttttatcctctgatatgtctagcctagtaattattcaataaatgtgtttttaactggttgattctaaaatatgagtataaacattcctcaatagacatctctaggcttcattctgctcctttattttttgagacagggtcttgctgtgtcgcctaggctggagtgtagtggcgctatcttggctcactgcagcctcaacctcctgggttcaagccatcctcccacctcagcctcccaggtagatgggaccacaggcacacaccactatgcccaacccatttttgtatctttttttttttagcattacttagattttttctttttttttttttaggtttttttttccactctttttaattatactttaagttctagggtacaagtgcacaacgtgcaggtttgttacatatgtatacatgtgccatgttggtgtgctgcacccattaactcgtcatttacgttaggtatatctcctaatgctttccctcccccctccccccaccccacgacaggcccccagtgtgtgatgttccccttcctgtgtccaagtgttctcattgttcaattcccacctatgagtgagaacatgcagtgtttggtttttttgtccttgcaatagtttgctgagaatgatggtttccagcttcatccatgtccctacaaaggacatgaactcatccttttttatggctgcatagtattccatggtgtatatgtgccacattttcttaatccagtctatcattgatggacatttgggttggttccaagtctttgctcttgtgaacagtgctgcattaaacatacgtgtgcatgtgtctttatactagcatgatctataatcctttgggtatatactcagtaatgggatggctgggtcaactggtatttctagttctagatccttgaggaattgccacactgtcttccacaatggttgaactagtttacagtcccaccaacagtgtaaaagcgttcctgtttctctacatcctctccagcacctgttgtttcctgactttttaatgatcgccattctaactggtgtgagatggtatctcattgtggttttgatttgcatttctctgatggccagtgatgatgatgatgagcattttttcatgtgtctgttggctgcataaatgtcttcttttgagaagtgtctgttcatatcctttgcctactttttgatggggttgttggtttttttcttgtaagtttgatttctttgtagattctagatattagccctttgtcagatgagtagattgcaaaaatgttctcccattctgtaggttgcctgttcactctgatggtagtttcttttgctgtgcagaagctctttagtttaattagatcccatttgtcaattttggcttttgttgccattgcttttggtgttttagacatgaagtccttgcccatgcctgtgtcctgaatggtattgcctaggttttcttctagggtttttatggttttaggtctaacatttaagtctttaatccatcttgaattaatttttgtataaggtgtaaggaagggatccagtttcagctttctacatatgcctagccagttttccgagcaccatttattaaatagggaatcctttccccatttcttgtttttgtcaggtttgtcaaagatcagatggttgtagatgtgtggtattatttttgaggcctctgttctgttccatttgtctctatctctgttttggttccagtaccatgctgttttggttactgtagccttgtagtatagtttgaagtcaggcagcgtgacgcctccagctttgttctttttgcttaggatcgacttggcaatgcaggctcttttttggtttcatatgaactttaaagtagttttttccaattctgtgaagacagtcattggtagcttgatgaggatggcattgaatctctaaattaccttgggcagtatggccattttcacaatatgattcttcctatccatgatcatggaatgttcttccatttgtttgtgtcctcttttatttcgttgagcagtggtttgtagttctccttgaagaggttcttcacatcccttgtaagttggattcctaggtattttattctctttgaagcaattgtgaatgggagttcactcatgatttggctctctgtttgtctgttattggtgtataagaatgcttgtggtttttgcacattgattttgtatcctgagactttgctgaagttgcttatcagcttaaggagattttgggctgagccatttttgtatcttttgtagtgatggggtttcgccagattgcccaggctggacttgaattcctgggctcaagtgatctgcccacctcagcctcccaaagttccgggactacagatgcgtgccatcatgcccagttaatttttgtactattttagagacagggtttcaccatgttggccaggctggtctggaattcctgacctcaagtgatccgcccgcctcgacctcccaaagtgctgggattacaggcatgagccactgtgcccagcccagtctactcttattttgaactgagagggcttagatttgttcatgtctgaggcctttacaactctaggtttatttcagtcatgctgtcatcctagagcagtgttctgaaaatgtggtctctagacccctggggatcctcaagatcctttcagaggacctacaaggacaaaaccaagtttgcagaaacactaaaacatttcgttttttgttttttttttttttcactgtattgacatttacaatgatggtgcaaaaggaatggtaattaaaactggttagcacctgaacacaaatcagaacagtagtacctaacttcaaatagagatttttttaaaaaaacgaaaaaaacagtggtaccaagctgtactgatggtcattgtgtaattctcaccatgtgctcacagtgggttttgtttgtttgtttttttgagatggtctcattctgtcactcagactagagtgcagtggcgcaatcatgactcactgcaacctataactcctaggctcaggcgatcctcccgcctcagcctctcaagcagctaggactaccggcacacaccagcatgcccagatagttttttcacttcttgtaaagatgagttgtctcttcttgcccagggtggccccaaactccttgcctcaagtgatgggttttatttatttattttttcttttcttttttttgagacggaatttcacacttgtcttctaagctggaatgcaatggcataatctcggctcactgcaacctccccctcccaggttcaagcaattctcatgcctcagcctcctgagtaactgggattacaggcgcccaccaccatgcctggctaatttttgtattttcagtagagacaggatttcaccatattggccagtctggtctttaactcctgacctcaggtgatctacacctgggaggtttctcggcctcccaaagtgctgggattacaggcgtgaaccaccacacctggccagtttgtttttgtttttgtttttttttaaagctagtttcacttaaaagtgttcttggttaggcagtacaagttatttttattgtattttgacttttggcaacacatctttttagtaatctcatatgatataatgggaagtacacataaagcacttctgctgtgtgctagggtgtgaagtccgatagctgtctcaagggaaaaatgcttatgtgattgagttacgagctaaactggctacttttttcagggagtattatttttgtttgaaagaatgacaggttgtggttttttcagaccatttagatatttggcatttttttttttttttttatgaacaaagggaatctgttactttaaggtaaacaactggcagtatttgttgtgaatgataaagttagagcttttaagaaaaaaaatagaattatggaaaacttgtgttcactcccctgagtgtgacagcttctccataattaaagattttttctgatgagattgggggtgataataatgagtgtcattttttaacatcctataatgaaatgtaggtctggattggaaaatctgcataactcagtgaaccagtattttccaaatgactaatgcatgagttttaaaatcacgtatgagtaaaaaatacattcaaagtgtaaggtagaccaatgtttttttacgtaacagaaaatgaaaagttcattgacaggtgtgagatttcgctttacaagaaattacatttgttaagtgttggtgtagtatcaaagaagaatctgaaaaatctattaaagtacttttcccttttcaactatgttatctatatgaggacagattttttgtcatatacttcaaccaaaacaaattaaattatcaaaacagattaaatgcagaagcagatgtgggttcttacttatggggttattattgttatttttaaatacatatatgtttttaaatgtatgtatttaaatttctaacataaatattcatgtatataacccccaaaaaagttctttgaggtcctcagtaatttttaagattatcaagattttgagacaaaaaagtttaagaatctctgccttagaaaattctgtttgtaaagagaattataggccgggggcagtggctcactcctgtaatcccagcactttggaaggccgaggtgggtggatcacctgaggtcgagagttcaaggccagcctggccaacatggtgaaaccctgtctctactaaaaatacaaaaattagccgggcatggtggcacatgcctgtaatcccagctactccagaggctgagggcacgagaattgcttgaacccgggaggtggatgttgcagtgagctgagattgcactactgcactccggcctgggcaacagaatgagactctgtctcaaaaaaaaacaaaacaaaacaaaacaaaaaaataagaaaagagaagtattaaatgcaataataggacgctttcaagtgtaggaagtgtctgaattgtttttttttctcatgaaatgtaacagcagaataccagggcacactccctgcaactttagggccctttcttcatcccctctgctgagggacacatggaagaagtaagaccagctttggtggcatgagttcttatggctgccccaaagagtctccctgatttccagagggcaagggcagagctagctgtggggaacaactcaggtcagcagtgcgagcatcctgtccatgaagtagaaggcaggtagcagggcgtgggttcagagcacaggctttagagtcagcctgggtttgcttgtaggctccctcactggctgttacctaactgctttacccctcatgcccctcaaatatgagcttggaataataatacctacttcttgggagtagttgtgagtttacagaaaaaaatatatataaatttttaaaccccgaacccagtatgtagttattgcttcatgatagctgctctgatgatgatgatgataattattctctttttgactcattggtgacttttgaggctgaatatttttgtcatccccagcaaggctgaattcacatgtttttatggtatataactttcttccccttttttgtaacagtgccagcagatgtagcatcacctgaaagcggcagtaagtgtagacgcattgaattgctttagctctggagatgggtttgagtgtttgctctgtctccgtgatacagaacttagttagaatagttgctggaaattagttggtctagatctaaggatgctttgggctgggtttcatggcttgggctcttatatttgactgttactttttacacccttccttgtggaacactttgccaaggtactgattttgcaagataagatcttcagactcacgagtaccttgccgcttcagtgaactttgtgtgatcctttctgctgatgccgagtgaaggtgcatgaaacgctctgctctaaaattagagttgaaagcatcttatagtgcttgtaagagagctggctatttagatctctgatttttagtctttcaggaacttccaaagatttatataggagagcagtatggagcagtatttttctagtagtggtttttctatgtatccctgtatttggaactaccagtgtttatttgttttccataggttgcaacagatttgaagtgacactagagaaatccaataagaacttctccaaaaagattcagcaggtaagcagtgatggcagtccttacaagaatatttgacttacatgagaccctgtcagactagaactttggtaatgttatttattaactctgaatcctcttctctttgaccttctatttatgcaggagtgtctgctcatatatcatgtgcctgagatcctctctcacaagcagaaatgataatcacagaaattatagtgcccagaaaaatcagtgagatccctgtaactggataggctccgtggtccctttttattactgttattgaatgaacatttgctaaaccttgtcagaaatgtttaattgggtctcatgatttcctattttccagatccatgtggtttcccagtttaagattctggtcagcttgttaggtaagaaaaggagttgcatttgtatcctgtgtctaacaagaaaagatatgacctaattaatcctttcatggttaatttgatagtggttacttaacaatgaactgacgtgttccaaacctggtataacagggtacatggttaataaaggcagcagcatcctccatagactcgaactcttctctccaaggagtctcactttattcattcattcgttcattgatcaaatatttattgagcctattctatgcaaagtctggactagacattcgggataccaagttcagtgagacatagttgctatctttgagacttacattctgattatgaagactaaatgacaggaagtaatcacgatacaatgtggtaagttacagtgaaaatttataaaaagtgttgtggaatcttggtaatgggagggactatattgtctagtagataactagactttcagtaggaaaagaggccagcagcgtatcacaaacacagggaacaactagaacaaaggccttgagatgtggcagtttgtggcaaattgtttattgtggccagactaaggatatgtggtggagattggcaggatatcaggtaagagacagagcagggctacactgttgaggccctcatgtgaaaaaccatggtttcatagaaagcagccagtgaggccttttctggacatgcaggggactagcagctgatctcacactttgcgctgttgaccctggggcccaaagagtaaaatcatgttaaatgttgttcctgggtccacagataaacatctgaggtaacttaatcttcatgactaaaactagatatgaggcccaggtaaaatgattattttgattgctttgctaggaaagaaatcattgccatgggttagtacaaaatgcacaggggatttcccttttctaattggagcctcctaatgtgagtagctttgaaagccatttcttgtataaatactgcatcataatatttcagacttgaaatggacagagtataagagtgctttggactgggtgcagtggctcacaccagtaatcccagcactttgggaggctaaggcaggaggattgcttgagtccaggagtttgagaccagcctgggcaacacagggagacctcatctccacaaaaaataaacaaaattagccaggtgtggtggtgcatgcctgtagtcctagctactcaggaggctgaggtaggaggatcacttgagtctcaaggaggttaaggctgtagtgagctgagatcatgccccttttgttgatgcactctagcctgggcaacagagtgagaccgtgcctcaaaaaaaaaaaaaaaaaaaaaaaaaagagtgttttggaagtgaaagatctcttttactcaagtcagccccaattttttttttttttttttttgagacggagtctcactctgtcgcccaggctggagtgtagtggtgcagccctggctcactgcaacttctgacctcctgggtcaagggattctcctgcttcaaccccctgagtagctgggattacaggcacccaccaccatacccagctgatttttgtatttttagtagagacagggtttcactgtgttacccaggctggtctcaaactcttgacctcaagtgatctgcctgtctcagcctcccaaagtgctgggatgacaggtgtgagccaccatgccgggccaagctcaaatgtttaaggaagaaaatatccaagtttagaagaccaagtgacctcttaaatgctttgtactggttataggtgagaatgaatcatcctagtgaaactgaagggacatcttcaaccaacatctgccatttgcttcttctagatgttaacacagttactttttttgcctcgatagtggctatgctagagaattatgatcattgatcctgatgttatacctcctcccaaacagaaaataacatttatgtccatgacctattgacatttcaacaaatcactacggtttcaaaggcaaagggagcatcactgtttacttgtgacctccaggtaagtttacccaagatgaaatttggctttatgctttaatcaatacagtctttcctacatcattcctaccattagatgggaagaatgacactgatgatccatacccaacagagactccaaagattatttatttatttatttttttcctgagatggagtcttgttctgtcgcccaggctagagtgtagtggcacgatctcggctcactgcaacccctgcctctcgggctcaagtgattctcttgcctcagcctcctgtgtagctgggactacaggtgtgcaccaccacgtccggctattttttgtatttttttaaattagagatggggtttcaccatgttggccaggctagtctcgaactcctgaccttaggtgaccttggcctcccaaagtgctgggattacaggcatgagccactgcacccggcccaaagagaatatttaattgtattagagaaatttctctgttggtgcatagtgtgaagttgaagcgtttgcattccctgtgcgtgggttaatgagaatctaatactattggcaagaggcagctaaccgaggacaaaaactctcgtcctggacaaaccattgttgggaaagcaagactgtaacaatatcatgaagataattataagacattaaatggagtcttgttctaaacagatcactgaggtctttgtcattagggacttttcattgttcagaaaagatatcgctctttatttttgccaatttatcattcttttattcttcagaatctgcctcacccctctctctactcaacttaccattttttagcatttatgttctacattgacactgcatcattttatgcttaggaatactcttttccttgctctttaaaggcttaaaagtgggcttgatgtcactggcacatggtcacccttaacccagcatgcattgacagccaggagcaagaaacatttaagagcaaaaaggagggaggagttatataggggaaggactgccccaggattttctcctctgaattgtgaatgtccatgtgatttgctggtgctgtggtctttggctggcaacccttcgggaggaagtgttcctcagtcacttgtttcttagcgcatcttagagaatggtgttctgctcagctttcctggcaggatgactgtgttacagggaattttcagagtagtagcaatttcaaggtagacaatctctaatttagttatcactcagttagagagagtcattgtattttcatttgctctgcatgtctcctcccagcacacagagaccggtgaggaggtgttacggatgtgtgtggcagtaaaaaagaagctgcagctctatttctggaaggacagggaatttcatgaattgcaggtaagtccactgttccttggtccatggttgggtgggagctgctgcagtggctcggttctagtgaagttcaggactccagtcttgtcattctacgcaaatgaatactctggtatgaagtgcatgagagcttgttgatgcctacttgtaatatgattctacagtgtttttatagattggtttatttcaaagtgggttttcaccttttccaaatgtactttgtccagttcatggacttgtatttttattaagggtagtttcctggccttgtgcctgtagaattgtgcccgatgagggtgagggttgttttgcagaatggaggttgcagaataacaggaaagtcatgattttttaaaaaaatatttatttcattcagatccttgctctcttttttcagggggactttagtgtgccagatgtgcccaagtccatggcgtggtgtgaaaattctatctgtgtgggtttcaagagagactactacctaataagggtaaaatcttattattttgcaaatatcattagtttatcttggggaagatgattatctgctccaaactccaggtcaagcgaccactttaagtagagcttttggcataacaggatttgttatttgtatgtgtagttatcattcatgctcagcatttttcacaaataggatatctttgtaacttaagtcagtccaagagtcaacgctcagttctttacgtaatgatgatccacagtgtgtattttactattgggacagataatgaaggctgtttgcctctgtccagtggatcatcatggactgctatcctaaggcttcagtgcttaggaattttaaactaattttagtataaacttaagtatttttaagactttgagtttcctctcctgccgtcaaatctttttgtatgtttgtactaaaagtgattctcactatttttttaaatttcaaaagccacgtgtttttacacgtgtttattacagaaaatatagataaggagataaaggaagtgcaaatcaaccatagtccccccactcagaaatagtcactgccaacttcttggtatatgaacttccatcctattggtaaaaatactatgctatacaattgttttatgacctgtgttttctcttaacgtaagttgtaaatatccatgacgttgtttttctccaatatgcatactatatgtagaaaagattgacacactgttcgtttcattgaataatctaaatctcttagcttcacaccccttgtaattcagacatggcaattctagaagcctctctctctaccttccactgggtgagctcttcattggttattttattttatttgagacagggtacccctctgtcacccaggcgggagtgcagtggcaggatcttggctcactgcagcctccgtctcctgggctcaagcagtcctcccacctcagcctcccaggtagcccagatgcctaccaccatgctcagctaatttttgtattttttttttttttgtatttttgtagagatggggtcacaatatgttgcataggctggtcttaaactcctgggctcaagcagccctcctgcctcagcctcccaaagtgctgagattacagccaccatgcctggccccattgttatcttgttaatatatttgttccatctttgtgtcatttgaatatcctgattttatcagcatcagagttgcagactcctggaggagtcactgctgtgccactgactcaatagcaagtaggcctacagatggtgagagagcgcacaaggaataagggaactgagcaaaagctggacttaaggctctcagttctctgactgccttggatgctgacatcaccttcagggtgggaaaccttgctttaggaccaggctattcagaaattacttatttacatacagtaaaatttattctttttggtgtacagttctgtgttttgacaaatgcttagatttatgtgactaatgccacaatcgagattcacaacactaccatcaccccccaaaattccctcatattgaagtcagcctctccttctgttcctagacctctggtaaccactcatctgttcttcatctcctatagctttgccttttccagaatgtcatataaattgaatgacacaatatgtaggcttttgagtctggcttctttcacttagcagaatgcactggagatttatccatgttgttgtgtgtgttaatagtttattctttctcatggctgaatagtagtctatggcaaggtgtttgtttatccattcatcagttgatggacaaagttgattttggccaggcgcggtggctcacacctttaatcccagcactttgggaggccgtggcgggtggatcacgaggtcaggagattgagaccatcctggctaacacggtgaaaccccatctctactaaaaatacaaaaaaaaaaattagcctggcgtggtggcacacgcctgtagttccagctactcaggaggctgaggcaggaggattgtttgaacccaggaggcggaggttgcagtgagctgagattgtgccactgcactccagcctgggcgacagagcaagactgtctccaaaaaaaaaaaaaaaaaaagttgttttcaatttttagcaattttgaataagcatctaagacatttgcatacaagcgtttgtgtaaacatacattggcattcctgggcaaatgcctgggaatgggattgctggggcatatggtaagtgtatctttaaggggcatatggcaagtgtatcttaaactttgtaagaaaccaacaaacaaaacagctgcaccattttgcattcccaccagcagtgaatgtgagttctagttgctctgcattcttgccagcacctggcattgtcagttgccaggctagatgctttcctttgcattagagaacgggttttacattgtgataacaacggttattataataaactctgtaacattttcttatgtcaaacaaggaatattattggcttctctaggtttcgggttctatctggatttttcctgtgttcttacctctggctggggaatgctaggtgactcactctgtttcttcctataggtggatggaaaggggtccatcaaagagctctttccaacaggaaaacagctggagcccttagttgcacctctggcagatggaaaagtggctgtgggccaggatgatctcaccgtggtactcaatgaggaagggatctgcacacagaaatgtgccctgaactggacggacataccagtggccatgggtgagaccaacagtagctgctgtttcccactttgggttgaggttgtgtgccattcctgcagaacggagtcccattcgtagctttagcagactggtttacgttgtgtcattcactttcagttccccttcttataagtagatgacattttagggtcattaaaaatgggatagtctagttcttgcaagaagctgagttttactccagagggggaaaacatataaacagaaatgtttattttaggaagtgattatctactgctatcttttacttcttagtttttttcttcctcctttttttaagagttttgattgtgtcctctgccaaatagactacatttggaaattagtggaaattccttgtgtattcctatagtatgagtaattccatattgaagggtttttgatatagtaattccatgttgaagggtttttctattgttgctttttttttttttttttttttgtagcttagaggcacagacaacatttaggtgattttggtgtcagcctctattctacgcattaggtgcttctgttcttatgcttgcttcaggttcccagctctccacaatggaattgcctggaagcatataaccactcttgccccattttattttcagtcggaagagtgagcattactaaaatagttactgctgtgaagtgggacgtactgacatgctttctgtctttaaagacccctgtctctggagacaagggttacagtcttggataaagagacaaaacaaggcactgcttaaggtgttaaattggatgagttaaaattcagtagttcagagaaagggaagtttgttgtttaattaggaagaagtttcattacataggtaagactgaactatggactaggtcaggcagggagtttggaacctggcttgaagaaaaatttccattcaatctaggcagaaagcccaataaatgagtagaagtccaaagaaagacatgccgatttgggagagggtattacagagcctgacttgatacaggtggtctgaattacagagcagtgaaatagggccagttggtagatgtccgtgagaaggtctgggaggccagtagattcctgaatggtagaatgtcttgataaaagcatcatgttctggccgggcacagtggctcacgcctgtaatcctagcactttgggaggctgaggcaggcagattgcctaagctcaggagttcacaatcagcctgggcaacatggtgaaaccccgtctcaaacacgaaaaaaaaaaaaaactagctgagtgtggcagtgtgtgcctgtggtcccagctacttgggaagttgaggcaggagaactgcttgaagggagggggaagttgcggtgagccgagattgtgccactgcactccagcgtgggtgacagagcaagactcccgcctcaaaaaaaaaaacaaaaaacacatcatgttctagggtgattgttctggttgtggttagagataagtagactagaaggaagagaaatcaaaaggtcagtattttaaaaggcccaggattatggatagtcacaagtttgaggggcttatggagctttatgagaggctttcccgatgttctaggcgaccttgttttcccttcagaagaggaactttggtagatgagtttaagaggcatgtaaaagtcaagcgtgtttctgatttcccaggatgagagttcctgtcttccaaccttcgttagtgcctggggccttcatcagtgcttctcaaaaccatgtctgtgtcttactgctgaagaaagttttgaggcacttgccctgtgaggtctcctttgacccacaggcaggattagtcacttcttggtgcttccctaaccctttcaggtatctctgtcacagcaacttgtcacacgtgagcgatctgtctcctctgttcctgtaggagctctgtgaggtctggatgcatgtcttgatccactttgagtccttactacatagtacagtgcctgaaacatcagagcgtgtaagaaaatgcttgctgaataattgcatcattatcctggtcagtcattatttatatgcctgctgtacaccagccagtctcccaacttttggagatataaagagatccagaccatctctattgtcaacaaaagatatgacaaccaaaggggtttctgttatagattacctttttaattaaatgagaacgtattcaagtgggacagattttaaaaggagaaagaaattttacatatgttatacaagttagcactaaagaaaattgtactaacttttcaaaatgaggccagcataaaaataaaataaaaaattcaatataaaacaatatgcttttaatttcatttttctggtaagatgaaaaatatcagtataatagcagtagcgttcaaaatgatagaaatataacttagttctcaagttactcatttctgagttccctcatagctttgaaattttattgtactattcattgatagtataaattgcaaatataataggaaaaactttttatcagaaaatggataattaaactagtgcagcgactcatgcctgtaatcccagcacattgggaggctgaggcaggaggactgcttgagcccaggagtttgagaccagcctgggcaacatagtgagaccctgtctctacaaaaaatacatttaagaaattagctgggcatcgtgctgtacgcatatattcccaggacttgggtggctgaggtgggaggattgcttgagcctgggagatggaggcggcagtaagccgtgatcacaccactcactgcattccagccgggcctatagagagagactctgtctcaaaaaaaaaaaaggataattagaaatattagcaaattagacacactaagaaattatttttatgaatatatattttgaagttaaatttctatgtggtaattatgcatctagtggtttgctttttactaatttttttacttttaaaaacatttttatttttaaatgtaaaaaacacataacatacaatttaccacctgaaccatttttaagtgtacagttaagtggtattacgtatgttaacattgtggtacaatagatcttcagaacttttttatgttgcaaaactgaaactctatacccattaacaactcctcagttcttctccctccagtccctgaagccaccattctcctttctgcttctatgaatttgacatcttctagatacctcatataagggaaatcatacagtatttgtctttctgtgactgccttgtttaatttagcataatgtcctcaaggttcatgccttcctttttaaggctgaaccttaaaaaggtaatatatattccacttaaaaaggtaataaaataattacttaaaaaagtaataatattccactgtgtgtatataccacattttgtttatccatccgttcgtggatacttgggttactttcaccattggctgctgtgaataatgctgctacgaacatgtgtgtgcaaatatctccttgaaatcctgattttcaactgttttgaatatgtacccagaaatgagattcctggaccatatggtgattctatttttaattttctgaggaaccaccatactgttttccatagcggccgcaccattttacagtcccaccaacagtgcgcaagggttccaatttttccatattcttgtcaacacttgttattttcatttttttaatagtagccatcctaaaggcgtatgaggtgatatctcactgtagttctttacggattcttgatatagcacagaatatagtcatagaaaatatttctattatctctaagttagtgaaattatgtttcatatagtatacaaacaataaatttatcttacagttcagtgtaaggtaaagcagatccttattcagtcttgttctgagatttgtgtttttaaagatatgttttgtgttgcttattttctaaattccctccatttatgttaaatctccttcaccatacaacttctcaaatattggaagacttgatttgcaatgattttatggttttgtcagtctgctttttgcatgctgacttctttagcactgtgtggaattgttctgcttcatccagcattttaagctttggactgtcacatgcttgtcaaaaagtacagaaaaatatagtggatatattaaaagttattttcaaaagagagaggaagagtgaagaaaaggagtataacccaataatttgtactggatcagaagggtaaatttggggtcatggatagatgaatgaaaggtttttttttagatataatagaggaaaacaattttaagactcgacagcaagtatcaaatagaaatgccttcactgagaagtccatccagccaccttctctgtgtaccattaagccatgtcttagttcatttgtgcagctataacagaataccacagactaggtaatttataaaaaccagaaatttgtttcctcacagttttggagacttggaagtcccagatcagggtgccggcatctggtgtctggtaagggccttcttgatgctccttcacatggtggaaggagaagggtaagagaaagatgagctctgcattctcacatggcagaagagagagaacccactccacaagccctttttatagtgcattaatctattgatgaggctggagcctcaccacctaaacacctcccattaggccccacctcccaacacttttgcactgaggattaagtgtccaatgcataagttggggagggaataaaaatagccaaaccatagcagccatcaggtggagcatcacaccttttctctgtgaaaatctctagcagaaacaacattggctagaaatgtggaactcttcccttagagtaattttagggaaaacagaatttgccttccccctacctttcttttttatttcttttttttttattttttattttatttatttatttatttatttatttatttatttatttatttatttattgagatggagtcttgctctgtcgcccaggctggagtgcagtggtgcatctcggctcactgcaagctccgtcttccaggttcacgccattctcctgcctcagcctcccgagtagctgggactacaggcgcctgccaccacgcccggctaatttttttgtattttttttttttagtagagacagggtttcaccatgttagccaggatggtctcgatctcctgacctcgtgatccacctgcctcagcctcccaaagtgctaggattacaggcgtgagccactgcacccggcctttccccctcccgccacttttctaagagaatgaaagaagaggttctgttacctggttctcccactgatgcattgttatgggcagctgcaactggcctttgtctggcctggctttgtgactgatgaaaaaggagcaagtgaaacttttatccagttctttggggaataaggcaggagtgggatcaggtgactgtcagcacagctgatgtgtcttttttgtgcaagagatttctctgatcataactcaagcaaagcaatttttttttatttttcttttttttagagtcaggatctcactctgtcacccatgctggagtgcagtggtgcagttatggctcattgcagcctcaaactcctgggcttaaatgatcttcccacctcagcctcctgagtagctgggactacaggtgtgcaccaccacacctgactaattttttaataaatgtttttgttgaggcagtgtctcactaagatgcctaggtcggtctcaaacttccggcctacgtgaccttcccacctcaacctctcaagttgctgggattacaggccaattttttttttctttctttctgaatcacagtgtaagatcctggcttgatatttgactaggggactttttggagatccatttaaatgtatcttagaatgggcagctgaaacactccataaacccaaagccttagaccggaacaactgctgtgtatgttctctttcacagagcaccagcctccctacatcattgcagtgttgcctcgatatgttgagatccgaacatttgaaccgaggcttctggtccaaagcattgaattgcaaaggccccgtttcattacctcaggagggtaaggaatttctttttttgctatggctgtatattatcccaaagttgtaaagtcacctgtgtcatcacaaagcctgtgatcttttgctaatattcttactcttgcttccagatcaaacattatctatgtggccagcaatcattttgtttggagactcatccctgtccccatggcaacccaaatccaacaacttctccaggacaagcagtttgaattggctctgcagctcgcagtaagtcttgttcctgactagtcttccttccttattgttcttgaaagtaggtgatttgggtttcaatgttcatatttattttgggttagtagaataagcacatagctgaaagtccagggccttgaatactaggtctgactccaccgtaaaatatctatgtaactctaagtgagtttactttttcactttatctgtcaaatgtagaatgaatatcaattctagtaatagtaccttgtagaattaaggtgagagtccgggagcagtggctcacgcctgtaatcccagcattttgggaggccaaggcgagcagatcacctgaggtcaggagttcgagaccagcttggccaacatgacaaaaccctgtctccactaaaaatacaaaaattagctgggcatggtggcaggaacctgtaatcccagccactcaggaagctgaggcaggagaattgcttgaacccaggaggtagaggttgcggtgagccaagatcatgccactgcactccagcttgggtgacatagcgagactctgtctcaaaaaacaaaaaaaaaaattaatgggagaataaaataatttaatatattgtatggtcatgaaaaattaaagataatggagacattaaagtttagtagcaatcataaatatactgttatagtaaagttgaatgcaacaactagaggacccctcaaaattcctttccacagtagactcctatgtttggataagtaggctttcttttgatattctgaaactacttcaagttgttgtattcagccaggcggcagtcttatatttatgatgcttactgtaatgtttgcaagggatcttgttcacagcaaaatagtgaccacctcttgttccaatgttgatgtcagagtctgtgtcttgttcttttaaacatcgtcagtgatgattattgtcatctgtagggggtggatttgcttttaggaaacaaccaaaagtcattctgagcctaacctagttgttaaaccagatattgctactttatgtatttgggggttttttgaggtttttttttttttttttttttttttttaaaacagggtctcactctgtcacccagactggagtgcagtgatgcagtcttggctcactgcagtcttgacctcctggtctcaagtgatcagcccacctcagcctcctgtgttgctgggaccacaagcatgtaccaccacacccagctaatttgtttattttttgtagagacagggtctcactttgttgcccaggctggtcttaaactcctgagctcaagtgatcctcctgtctcagcctcccaaagtgctgggattatagatgtgaactactatgcccagcctcagatagtgatactttaaagaagagatgtttatgaagataatagtaataaaactgaatttctagagtatcctgtaaactatttctaaaaggaaagcacttttttagaatgcagatactttaagttacctatggtggctactcgtgaagaacatttactttggacatatatgttctggatttaaaataaaaatctgatcttaatagtaagacatagttaatattccataaagatgattgctttcttagagcactgaatttcagcatcttactgtttttttttctactcatgcattgtcctatattattttattttcatttttaaaaataatacagtgaatacccatgaactcaccatcctacccaagaaccataacttttataactttttataatccttcccatcccatccctctgcctctcctccagatgtaatcattatcctaaattttgtatttatcatgaccttactcttttacatatatatttaaaatataaacatatttagtatacgtttaaaatatatatttaatgattaaacacatatgtttaatcttttacatatatttaacatatggaagtaatgtatttagtttttgataaaaaggttatgcagtatgaaactctttagtctatttttcttagcagaaaggtctcagagtcttttcagtgatcttcctagttcaggttgtttaatctcaggtaaagaaaatggaagtgggttcccatttttccttctcttttctaggctcatacttattttgtgctctgccctttttatgacaaaaaaaggttgattgacatcatgttagtccaggaagaacctatcttttatttaaatagatacacaaacataatggaactttcagagggaaattacaaactaaactttggcattgataagtcctggagccaagtgtcagagagggacagttcgctgtgggctggaaaaggcatcctacggctggacacttgagttgaccgtttaagaatatgttagattaggatcaagagcaggaaatggaacattccagatggagaggaagttaaagaagtgtaaagtgtggcctgtgtctatcgcatttggagcctgtcctgactggagaagaaggtatggcctaagtgtttgggactcagctagataaggaagctggcaccaggttttggaagcctttgaagcaccaagcaggagagcggagaccagggacagccacatgttgatgatggcttggactagtgtggcggtaataggaaaagaaaggaaagggggaaattgagagacattttgaaagaaaaaactaaatttgataaagattggctaaagaggtataaggggaaaataggttatgaggaagaagcaaagctcatagcagctgcatttgtttagcttttactgagaataggacctttcccgaccgtgccagctatgccagatggctttctgttttttttctttctttttttttttttttcccgagacagagtcttcctctatcgccaggctggagtgcagtggtgcaatctcagctcgctgcaacctccgcctcccgggttcaagcaattcccctgcctcggcctcctgagtagctgggactacaggcgtgcgccaccacgcccagctaattttttgtattttagtagagacggggtttcaccatgttggccaggatggtctttcctgacctcatgatccgcccgcttcagcctcccaaagttctgggattacaggcgtgagctaccgcgcccggcccatcggatgtttttcattccttgagtacactgtgctctctctgccattttaaagccttgcacatgtgctgtctcctttgctggggagtacatgctcctcttcccctccctgtcatctgctcagcctcatttagctaactcaaactcatccttttgtttgagatggagtctcgctctgtcacccaaactggagtacagtggcgtgatcttggctcactgcaacctccgcctcctgggttcaagcagttctcctgccttggcctcctgagtagctgggattacaggcacatgccaccatgtccagctaatttttgtatttttagtagagacgggtttcactatgttggccaggctgggtctcaaactcctgacctgaggtgatctgcccacctcggcctcccaaggtgctgggattacaggcatgagccaccgtgcctggcccaactcatccgttatgtctcagtttaggtccctcttggaatccatcctggaccccggactcagactggattggggacccctcccacatgcttatcatcactcttaccctattttgtgtttttaaactaaactctaggttttattcagatttggccagtttttctattagtgtccttttttctgttccagaatcaaatccagaaatcagattgcatttagttgtcatgtgtccttagtgtcctctggtctgtgacattttatctttccttgtttttcatgaccatgacaattttcaagattaccggttaggcatcttgtagaaaccctgttgtgttttaattgcgtagttacttagcagtcttacagttagactgtaagggcaggctgcaaggtggataccatgtggctgtcttgtacactttgttttattttttattttttttttgagatggagtctcactctgtcacccaggctggagtgcagtggcatgatcttggcccactgcaacctctacctcctgggttcaggtgattctcctgcctcagcctcccgagtagctgggactacaggcacgtgccaccacgcccagctaattttttgtatttttagtagagacggggtttcaccgtgttagccaggatggtctcaatctcctgaccttgtgatccgcccgcctcggcctcccaaagtgctgggattacaagcgtgaggcaccgcgcccggccttgtcttgtacactttggtgtctgtagctcctagcatcttctctaacatcaagaacatactgaacaatatttgttgagtgagtgaactcttacatattctgctccgttattaggaaatgaaagatgattctgacagtgaaaagcagcaacaaattcatcacatcaagaacttgtatgccttcaacctcttctgccagaagcgttttgatgagtccatgcaggtctttgctaaacttggcacaggtaacaagtggtgaggcctttatataagggactaatggaggaggggagcctgaaaagtatggggagaaatgataacagacttctgagaatggagaaggtttaggctcagctaaattgatcctcatacctagcaagatcctgtggggtgaccacagtggttacatatctatactcctaatcctatgaatctggtcttctcaataaatgtggactcccaattttccagtatgatatgcccttgccattagagaaaggtagcagaaagtcattcagttcaacaaatgggtatttgatcagctagtgtttattgaatgctgttctgaaccaaagtccttggattaaactgcagatcatttatgagagccaacacagggcagtgccatgaagctcttccttttcttaatgtcctgaaacctctagacatgagtgtagtggcgaggagcaggtaccctggggtctgcctgaggtctggtagagttactggacctctctgtgtttctgctttctcctctgcaaaaaagagatgatcatactactgcttgctttagagtgctgctataaggattatatgaagtgctttgaacagtgtgtggcacttaacaagtgctctgtaagtgtttgatgttattagtattgaatttcattactgtatattcaaaactgtatatcccagttttgcttaatttggatcaatctatctatatatacttggattgactctatatcatactagcatctcctcttttctcctcttcattgctttgccttttttccaccattcctcaaccttggccagtaatgaactgtggtaattccctgtatcagtcaagattcttggttgtgagcaatggagaccaactctggatcgtttaagtagaatctggataaattaagcagagtttattggaatattagggtaatgacagttgaaagaattcataaaattgatgggagattaggctggggaatagatggaaacgaagggagctctggaagccctcccagctggaaacaaaacaggaagccagacaatgatcagtttgtagccaggacaggctgggccatcctgcactagcatagccaccttcttagccgttgccactgccacttcccctgttgttgcatccttgataaaaattgccctctgctagtgtattagctgtctaatgctacgtaagaaatctccccaaaactgtatggcttaaagtaacagtaatcatccatctctgttagtacttgttggtccggagtttgggaaggggtcagctgcactgtccttgcttcagatctctcaggcagttgcagttttatgtcacctgggctaccatcatttgaaatcggggctagaagatccacttccaagctggctcactcatatggctgaaaaagtggtgctggctggagccaggggcctcagttcttgtccaagggggtctctcttcagagctgcttgagtgtcctcatgcataacagctggctctttccggaaggcgtgtttaagagacctaggcagaagcttcaatgtcttttgtgactctcactcttcctatattctgttggtttacaagggtcctgccaggttcaaggcaaggaagttcatcagacttcctctcttgatggaggagtgtcatgttacctaagaggagcacataggatgggatgtatgatatatgttggtgtgtaccacgctacttgtcatccttgcatcatttcctccagatcaagggatctgattagccaggattaggtcatggtctgacccccagactctactaggggtggagaaagaggtttggctcccctctgcttctgaaggcaaaggtaggtccctagagctatcctaccaccaagactccacatagcctggaagagagaacttgcccttatctgaagtacctagagtaggcagattcatggagactgtaagtaaaatagagaggttcccaggggttggaatggagggagaatagggagtaattgtttattattaaggtagtttcaatttgagatgatggaaaagtcctggagatggatggtgtgatggttgcacaacagtgtgaatgtatttaatgccactgaattgtatgcttacaaatggttaaaaggataaatattgtggcatgtatattttactacatatagacacacagattgttggatgagctgaatgagcagaagacagggttccactactggacattgatgtgggcacatccctgtgatccagaggtcagcaagttgctactgcttccacagcctaagccctgtagtatcctcagttcccacagagctggtgactgagtgcaggctgctgtatccaggcaggtgcctctatggaatggcagagctgataaccagacactggaaatgccgagtctggctgcacacactcatgagctggaagagggaggcttccatctcactttcagtttccaaatctcatatcctgtttctgggtggaaccagattttcacttagaaccctgactgctagggagtttgataaaagtagttttcagttttatagcccctgtggactataaaggagtagaaatggatgggaagtgccaattgaccatacaccatagtgttccacagcattgatgcactgtaaattatataaccagcccccagtcagtgaggggatatgttggctacttacagcattttgctgttacaatctgggagtggccaggtacagtggctcatgcctataatcccagcattttgggagaccaaagagaagaggattgcttgagcccaggagttcaagaccagcctaggcaacatagtgagaccttgtctttacaaaaaatttaaaaataattagctggcaggatagtacatgcctgtagtcccagctacttgggaaggtgaggcaggaggatcacttgagccaggaggtcaagactacaagaagccaagattgtgccactgagcaaaaccctgtctcaaaaaaaaaaaaaaaaaaaaaaaaaaaaatctgcgagcatctgtgagaacaccataaattctaaggcagaaggaaaatgtcacctctttgacattgttaacgtgcaccattttgattcttaatatagcagaacattttcccacatatttatattctcttgtcagttggtcttgtcttttggtcatttgtcaaatgaagtcttacattttattgccaatttatgtgaatttgtttaatcaacatattaccctcttttaaaaaatttttttgagacagggtctccactcttgcccatgctggagtacagtggcatgatcacagctcactgcagcctcgacctcctgggctcaagcgatcctcccacctcagcctcccaagtagctggatacaggcacatgccaccatgcctagcaaatttaaaatttttttgtagacatgtgttcttactatgctgcccagtcttgtaatcaacaaattagcctcttgccatatatactacaaatatattccctagcctgttgtctttttttttagtaatgtttctttttttgacttaaattttttattgttgagtctcttgatctcttctacttcaatatcagcatttttccttagaaattttttattctctactttcagaggcttgataaatattcaattctaattatgtgtgtgtatttgaatatagtcaggcatttttgtgatgttttagtgaattttaacatatgtataaaaagtgctcaaatcataagtctacagctcgttgaatgtttatgaactgagagtcttttttttttttttaaatcagtctggaacttattttgctatagtaatagtcctgttttattttatccctaaattgttgggctcctttccagaggaatcatgtttaccttccatatagatcccacccatgtgatgggcctgtaccctgacctgctgcccacagactacagaaagcagttgcagtatcccaacccattgcctgtgctctccggggctgaattggagaaggctcacttagctctgattgactacctgacacaggtaggtatagtacagagtgcgtgaaagagtttgcctgggagtttcagtacttgtttctttgtggcaaggaattgagggccttctctaatgccaaggcagtctgtaaattaatgctgtaggaagtctgcctggggtaaagtttctttctgctacttctaactttacagtaccattgaggtggggttttctgccaaatcttgataaaaataaacacacccaattcctagtaaattcacacaaagctgttatagaaactaaaaaaagtaaattttagttgatagaagcatacaagtttttttaaaacaaactttttgtaatatacatggttttggggaaaatgcctcctgtatgtggaaccacttggaaaacacacacaaaaaagtacaaagcagaaatacaaattacctataactctaccaccagaatgtaagaaactaacattttagtgttgtccttctagacttgtatatctatgaattagcttttgtttatttacttcttggtttatttattgcaaatggatatcaaattgtagattgttttatagcttaactttttaaaaatttagccatatactgagaaagtacttccttatcaataaatgtccttatataacatgttttttagggaggtatttagatttaaaattttttatgatttactgttatagacagatacattttttaagtcagcactaaagccagcatctccattaaagtctcttaaccctagatttctgtcacagaaggctattgtttatttcctgtgtacccattcagaatcagagaccttattgatattttttcctcttaagtgttttgcagatctttgtaagaggtctccagaatgctctagggtaggcactgagaagtattgctgttggccgggtgtggtgggtcatgcccgtaatcccagcactttgggaggctgagacagaagatcacctgaggtcaggagttcgaaaccagcctggccaacatggcaaaacccagtctctactaaaaatacaaaaattagctgggtgtggtggcccacgcctgtaatcccagctattcaggaggctgaggcaggagaattgcttgaactcaggaggcagaggtggaagtgagccgagattgcgccactacacttcagcctgggcaacagagtgagactctgtctcaaaaaaaaaaaaaaaaaagaagaagtattgctggaaaaattgtcatgccactttccactccctgcctctgggtcagtgagtccctgcaggtctgatcaggcatgggtggccttggcccttccttgacattgggctccaggggtaccctcctggggctggcagcctgcaaggagcacacaaacttgccactgcctacacactgcacacactgtgctaagtaaaaaagattcctgggcatactatctcccaaagccagtggcattgtggaaggccctccactgccaatgtcttagctgtaggaaggtgagcacacgtccttccctggccttcttcactgacaatgggaatgtgtgaagtaactgacactagtattgtgccagagagatggcagagcaagaccatgggctctgccagactcaagagaatacatactggatgaagttctaggataggcagaaactcatctccagggatcaaaagcagatcagtaggtgggattgtttgggaatagcacgaggaactttctggagtgatagaaatgttatcttccttcactgaggtggttacatgcatgtacacatctgtcaaaatgtatctgatggtacactttaaaagattagattttattgtaagttatacctcaataaggttgatttttaaaaaaataaaagaacatgggctttggagtcagcccccagtgtgaatcctgccctaccccttatgtagcagctgacacctgtgccttgggttcctcacctgtaaaataaggataatattatcggcacttgttttaggtttaagatggtatatataaagtgcttggcatggtgcctggtctgtagtaaatattcaataaataattgttgttgtctctgtggcaatttggcagtgctaaaaatcgaatgctaatgtgagatcaggccaataggcatgagctgattggaggtattcagaattacccagtagctcagatgacaaaggaagacttagtcctggccttaaccccacattttgacctttgcagaaacgaagtcaattggtaaagaagctgaatgactctgatcaccagtcaagcacctcaccgctcatggaaggcactcccaccatcaaatccaagaagaagctgctacaaatcatcgacaccaccctgctcaagtgctatctccatgtgagttacctgagcgctcgggtgccacaattcccagttaccctgacagtctgggaaagtaaaagggagtgctagaccctgagggacctgccattagtaagagtgaagtctttgattctggaaaccatatagacttctcctgatgtctgtgagtctcttggaattaagaggatagggcaagatatcaatgcacaattgtacagtggattcatcttctctggtcggattgcagttagtgctacaaagtcagctgggacagtatttccttcaagaaatgttctcccccacagaacattaaaacacattgtgcgaaggtccataaatgctctaaaagcctctacctgctgtcctgaaagagggctgtctgctttctcttgcttgtgctacattcctggcctttcagcctagagcaggcctgggccagggaagggtggggctccccaggaagcagtttccactgaactcctgctctttctgcagacaaatgtggccctggtggcccccttgctacgcctggagaacaatcactgccacatcgaggagagcgagcacgtgctaaagaaggctcacaagtacagtgagcttatcatcctgtatgagaagaaggggctccacgagaaaggtgtgggagtggttccttggatctgggaggggctcttgtacatggcaggggaaacccactgagatatggaaatctcccgtggggaaaaggctcatgaccttgttcttgggcttggtggccagctctgcaggtgctcgtggaccagtccaagaaagccaactcccctctgaaaggccacgagaggacagtgcagtatctgcagcatctgggtaagtccgccttttgaaaggggtgggaaagcgctcctgttcaaatgacctggtctccctctgtttctgtttctggttggttgctcccctccctcccgtgctcgtgttcactcaatttcattcctccaaatggcataaaagtccctcggtggttggcctgtgacagccccctggtatggagccagcccagtagggctaacaaccccaagtggctcatgcttgagctgtcttttcaggaaaatgaattctggggcaacctgcccacctgccttcccagtgccacaggcaagatgggcctcaactgctgacaagtcctgcttttccttctaggcacagaaaacctgcatttgattttctcctactcagtgtgggtgctgagagacttcccagaagatggcctgaaggtgagccacaggagtcccttggatttatctggtaaacacttggttctgattgcacttgagacagcagtggatggagaggagggtggattcatgcatctgtcttcattggtgcatgaagaaagggtggactgggaagcgcgagccagcactgtagttggtagagagagccttacacaggcatgaggaggcctgtgcctcgtctgacatgctgactgcctacagatgccttctcgtacccttgccctcctaaagtctgtttgatccctgcgctcacatgcgtgtgtgtttgctggaactgcagtcagatggttctgctgctggaactcgggttcattctaacagatatttactgaagatctcccggaagtggagtctctgccacgtgatcgagtcctcggcttcttaatagagaattttaagggtctggctattccttatctggtaaggtattttttggtctgcactaaaaagctttaaacccaggatccaggactgcgtggttctgttatcgggctgttcagatttgggatttatgtcacttggggattggaaggatgagggttatttcagcttcctctgaagaaaaagatcccagtagaccaagctggaaatgctacctaccaaatctaggtaaactacagagggataaaagaataatgttttagaaaaaaaaattccaaagccacatttggaaaaaaaattccaaagcgaaactcaaaagtgaccacaggacaatcaaataggcttaagtaccaggatgcagatatttaaccacaattacatgagtcgctatgagagtttggaggattatgggacaaaattagtaaaatggagtttagtaattgagaagatggctcctcacgttactgggtcgcattgtgaaacttcctggtggctttagacgagctgtctcttagtcatctttgcagcccgattaggggataatctggatgggacctgttgggccttaaaaatgtgagggaggctgggagaccaggtcacagcctggagaataccagtgacaaagacctacatcttgcctcaggaacacatcatccatgtttgggaggagacaggctctcggttccacaactgcctgatccagctatactgtgagaaggtgcaaggtctgatgaaggagtatctcctgtccttccctgcaggtaccagttcttttaggaagccggttggccccaggccttagaggagagcacagacccaggtgccacgtgtggtgggggtaagcaggccaccctattctctgcccaggtgcgcagaagttctgaagaggagccaggggagctaagtgacacaagcctggcacatgagactcaggagctcttgtctaggtcctggcatctctgagtgtctcagagtcatccctcggggagggtggaaggaacagacctgtctgcaagatgacagctatactgataagaaacaggtttgcccacagagtatttctctattcagcttatttttttaaccgtaagctgatgttttggggccacatggagactatgaactaaaagaagttagcatggaagccaccctggaggccctttctggtcatgtggtgacatccttgaaccccattcccttcatttttcttgatgaccctacattgccacctggcagtgtcctttcattttgagcttggtttcccttaaaggcaaaaccccagtcccagctggagaggaagagggtgagctgggagaataccggcaaaagctcctcatgttcttggagatttccagctactatgatccaggccggctcatctgtgattttccctttgatggtgagtgtctggcttagggccagaagccacttcagcgaaggtcatgcaaagactaatccacccctttaattgttccccaactctccacaaaagttgggcctggaaaaaccaggcatttcaggccagtgctcctgttttgtcctctctgaagactcacttttgtaccgtgactgagaaaagtctccttcctgggtatgaaccacatgctaattgatagccaggttgcaacctgttttttgcttcagaacatgttcttggccaagttcattgttcagcagtttttgtaatctggcataatttgtctttatgagagctgagagcaagcatttgctcatcttacctgaaccacctagcatgttgtaggtggttgttaagtacttggctgctgaatgaatattcttacccagtttatatgtgacctcaaaaaagatgggataaagtacttcctaaaatagctccctcccccttttttaaacttcagttattttctccttgaagaaaaacccaagcaataagaatcctattgtcttccctttatattgcctcgtgtccactcctctgacagcatagcccccaccttgtgcttgcgtgatggcggcagtggttcctcatattccttttcctcctaggcctcttagaagaacgagctctcctgttggggcgcatggggaaacatgaacaagctcttttcatttatgtccacatcttgaaggatacaaggatggctgaggagtaagtttgccccaacatcccacctcctaagcagtctaaaagcaggccctgcagagagatgagagttaagaaggccatctccccatactccactgcgggagcaagaatcgcctccgtcctggcccgcagttttggctgtggttaggctgctcgagcaggctgcacgcacagcctctcatttagatgtgcccccctcacaccacctgctctcaccactctctcccttgcaggtactgccacaaacactatgaccgaaacaaagatggcaacaaagatgtgagtagtgaccctgacccagggagcacgtgtgcatacctctccccgttggtttgaccagaggtggcaataatatgagtggcagaataagacagggcacgagtcagggctctgattgatcttgcatgtgtgtattgagggacagcaggggaccattcatcctggtgtgcttggggtagttctggcgtatatctttgttatccctgtgattaatagcactcctgtctctttactctcttgatttgtgtcataaattatgaggtctgcctgtcgagcgggaacccgtcatggttctgatgtactatatcttgaatacacattgacttttcaatgtctggagacatttttgattgttgtgactgaggacaggggtgcttccagaatccagggggtagaggccagagatgctgctaaacaatgcacaggacagcccccaaaccaggaatcatctggccccgaatgcgcactgaggttgcgaaagcctgtggtactggcaccagtaggcaatgcagcatctcaccttaggatatccccacctgcaaaaatgtgacggagtctcagcttttaaagccaaaggaaatgaggaatctttttgaattgttttacagtggtagcattttgtaaatggcataatggtaaacgaatacaaggcatttggttttttctctcagggaaaaagcaatccttaattaacatcttcagttgcctgtttgaccttaccaatttacaaggtgaaaatgaccagttttacatgctcagtgatagctgttactgtaggcgagcccctcgaatcgttaggcatgctcagtgctgggggttctgggagggttgctgccagcctgacgtagctcatgtctctctgagacaggtgtatctgtccctgcttcggatgtacctgtcgccccccagcattcactgcctggggccaatcaagctggaactactggagccaaaagccaacctccaggccgctctgcaggtcctcgagctacaccacagcaaactggacaccaccaaggtcaggagttgttcctagggagatggagggtgtttgcagggagcaccgaatgagaagaggaaatgtggaaagggactagggtccaagagctccacggctgcagacatttcttcattctcactcctgttcacctcacccagtccctatctctgttcctgtccctaggccctcaaccttctgccagcaaacactcagatcaatgacatacgcatcttcctggaaaaggtcttggaagaaaatgcacaaaagaaacggttcaatcaagtgctcaagaaccttctccatgcagaattcctgagggtaggtatgggccttccaaactctagggtgggcttttaacttttagtatgagacaatgtccacatgttcccttctgaccaaggcagagcctgtacagtgcagctcaagctgatccagtagccagcttgacattgaattgccaatgttctaagcagaagaatctgtgacgactgaaagaggacacagttgctggcctctgcctcctgtttctgggtgccacactgtagaacttcttcctcaatccccctgttcttccaggtccaggaagagcggattttacaccagcaggtgaagtgcatcatcacagaggagaaggtgtgcatggtgtgtaagaagaagattgggaacaggtgagcctccttcacacctgtgtggcatctgggctttgtggaggttcccaggggtggagaacgctcaggatggatttctgccctttaacagagaaggagaacatggctgctggctgtcctgacaacttttagttcttgagccttcagagagcagcctgttctatctgttgggagtgggcttcgagaatttaaagacctgcaatgtatggtatggagctgttggattcttgtccataaaactcttcccctcttgaagctagaacctgatatagtgggtgcccaagagatgtaggtctgcagaaagttcttataaggaagatccagtgaaggaagaaaaagatctttcaagctactgcattgtgactcaagtaggatcctgagccagactcatactgtgttaagacatatactctagttagtccccttttcttcaaaggagagtgatttgtctcttatgtagctggaaaaatatttttctttagaaagacaaactcgccgtccttttcagaattagcctgaaacctgttctgatgaacattgttggctctcaggaagccagggctgagctttgggctggtgcactgcccatctttaatatgccttgtgttttgcataataaaaaaataccccatgcactcttaactgtgtgcacctcatcctctgtttggttatttgacagagatgatggctacagaaatccagagcccctcaggcaggctgttctttgaggtttgggtgggctgcttttggaatggccccccagcaatgtgcctcttctgtaggaggtgccgctgccagagaagtggtcacttagaagcagtcctcactcccaagccattttcttccctgcagtgcatttgcaagataccccaatggagtggtcgtccattacttctgttccaaagaggtaaacccagctgacacttgagcccagcatcctggggatccagcggatggacagcttggctctcccagagaggtgaaggagcacctggccttaggaatcctggctgccaccaccacaaggctccccatttggacattactggctatcttgtgccctggaacaactctgaattaattagactcatggtctggcattgccagctttttaatgggaaaagagattagttataccttataccattatgttgtgggcaattccagagaattcagtacctgcttggtcaggaggatgtgcaccatcttgcctttgcacaccagtcacctgaacaaggaaacttgtcacaa

SEQ ID NO: 23612 - DNA, 4020 bp, Homo Sapiens
ctcctcctcttcgctgccggtgggcaccgccgctcgctcgcacttctgcgcccattggagcttcggagatccctgcggtcccgcgggacggcgcggcagcagctgacctcgcagacaggatcttgctctcttgcccagactggaatacagtggtgtgaacacggctcactgcagcctcaacctcctggactcagagatgtcggcttatttataggaattgcttgaagccagagtcatggtggatgtcggaaagtggcccatcttcactctactctcccctcaagagatcgcgtctattcggaaggtgtgtgtcttcggcacctcagccagtgaagcactgtacgttactgacaatgatgaggtctttgtatttggactgaactatagtaactgtctaggaactggagataaccagagtacacttgtacccaaaaagctagaaggcttatgtggaaagaagattaaaagcctcagttacgggagtggaccacatgttcttctcagcaccgaagatggagtggtttatgcctggggccacaatggatatagccagcttgggaatgggacgaccaaccaaggcattgctcccgtccaggtctgtaccaatctcttgatcaagcaagtggtggaagtagcttgtggctcacatcattcaatggctctggcagctgatggagaggtgtttgcttggggttataacaactgtggccaagtgggatcaggttctacagcaaatcaaccaactcctcgaaaagttacaaactgtttacatattaagagggtagttggcattgcctgtggtcagacttcatccatggctgttctggacaatggcgaggtatatggctggggttacaatggcaacggtcagctgggcttgggaaacaatggcaaccagctgacccctgtgagagtggcagctttgcacagcgtgtgtgtgaaccagattgtctgcggttacgcacatactctagcactaacagatgagggcttgctgtatgcctggggagctaacacatatgggcagctgggaactggcaataaaaataacctgctaagcccagcacacatcatggtggagaaagaaagggtggtagagattgcagcctgtcactctgcccacacgtctgcagccaagacgcagggtgggcacgtgtacatgtggggccagtgccggggtcagtccgtgatcctcccgcacctcacccacttctcctgcaccgacgacgtgtttgcctgctttgccactccggccgtctcgtggcgcctcctgtctgtggagcatgaagactttttaacagttgcagagtcactgaagaaagaatttgatagtccagaaactgctgatctgaagtttcgaattgatggaaaatatattcatgtccataaagctgttttgaaaatcaggtgtgagcattttcgatccatgttccagtcgtattggaatgaagacatgaaggaagtgatagaaatcgatcagttttcttacccagtgtatcgtgcctttctccagtacctctacacagacacagtcgacctgccgccagaagatgctataggtcttctggatttggcgacatcttactgtgaaaacagactgaaaaaactttgtcagcacattatcaagagaggaattactgtggagaatgccttttcgctattctctgctgcagtcagatatgatgcagaggatttagaagaattctgctttaagttttgcatcaatcatttgacagaagttacacagactgcagcattttggcaaatggatggccctctgctaaaggaattcattgctaaagccagtaaatgtggagcctttaagaactgaagcgcaaggctgctgggttctgtgtgagtgctctggggcactgttgaggatgtgtccagtttgtgctctacgggtgatgtgattctgcaggtaaaagaccatcaggttgtttttttccacatctgggacacagttgtttgtgtaggaacataacaagggtgtacggcttttcttgagcccattttaaacaacccttgtttccagataagtgtattttaaatgtgacctttcgtaaatttgggctggaacatgtaaaagggtgaaagttagtcgtttttggtcttcttttcatttttgattagaggaacttctgaacttggaaaggggaagttggcagcaactctcctgggccacgtatcaacaatcttctgacagcaggagcagtgatagttggggaattgtgagatgaatggagaggccccatcgtgaattaaagatgctgacctggggattgttaagtgctgccttagttgctagtttagtagccttactgtgaaggaataattaagattgtttcagacttttgtttgtgtgcttgcgttgatgacttttttaacttcaagataaatcaaagtaataagtttaacgtatattaaacctgttgaaatgataattatgtaaagataaatattctaggttagtcaagatttctcttaagatttaagtgcataaagaatagtaatttagaagtatccgtgaaaagttgataatgaaagaaatttgatgaaggtgaatattttataaattagaatctccactacttatccaatggtgttttatttcattaaggtagaacttgagaactcaagtttaaattgtcccccaccaccttcttctataaatgcaaacttaagaggaaaataatgacatgtatagtatactcttgccttcctaaattatgactgctgaatcatcatatctactatatatgactggaagaagtggttcttcaagtcaaccctcttacaagacttagtgggaatttgctttatctactttaggccaaatccatcacacattggcttatgtgaaactttatcatctttcacttttggttttcctctgtttttaaacatcttaggtataacagcacaatttcaccttgaaaaagcaccaaaattatggtgttcctgaaaagatcctattaaaagacagtagtttatttgaactggttatggaaggtgactttgggatgtaagagtgttcaactgtgagtttcatcatgtgtgtccgttgagcttgcttttaagagcaatgttttgctttgctctctggtccatgaactcatttccatttgagtgagttcccttagtgaattttgtctcctgcttggaaagtctctcttctgaacctggagcctgaatacattttcagagccaaattacaagtgggtgaagacatgctacaactactatttttagcaatgtttttaaatttgtgtctattggggtgggaaggggagtgaggccctaaagataggaattcactgatagctgaaatagatacaagcctaggagccccagcccccttttcttgaccatatcacaagtgattgaagcccagtgaattagtcggttagaattcgttctacaacatgatagaacttttcttactagcttcagaaatgcacattgatttgtgctatgatgggtggtgtttgtaacaatcactgttctataggcttatgatctgagcaaaatgtgaacttcagtatgtttactattgctcttacttgaaaactttttttcaaaaaaagcacaaattaaagtagtaaattcatatccatagatagttcattcattcaacaaatatttaccaagttcctaatataagtgaaggaccacttctcatattagattactaagtcatttgtatgaatatgtgtggcagtgaagagaacaggtctttcaaaaagcatttgattattttttttaaatacactctcttatttttctacttgtttttttgttaatcatagcaggatatgacaactcttatttgaattgattttttcatctaatgtaataatggaagccaaagtattcatatttcttaagatagccctaaatgtactcttgaacttcttactggaacaatgtttgatactctagtatgtaagctgtatttatgtaatatttagaacgacatgttaataaacaaagtaacattaaaatatttaaaaaaaaaaa

SEQ ID NO: 23613 - DNA, 3395 bp, Homo Sapiens
gcggcgaaagctaaaggccggcgcacgctgggcggtggtggtccctaagccgggccgcggccggtgcaatggactccactgcctgcttgaagtccttgctcctgactgtcagtcagtacaaagccgtgaagtcagaggcgaacgccactcagcttttgcggcacttggaggtaatttctggacagaaactcacacgactatttacatcaaatcagatattaacaagtgaatgcttgagttgccttgtagagctacttgaagaccccaacatcagtgcttcactgatcttaagtattatcggtttgctgtctcaactagcagtagacattgaaaccagagattgtcttcagaatacatataatctgaatagtgtgctggcgggagtggtttgtcggagcagccacactgattcggtgtttttgcagtgcattcaacttctacagaagttaacatataatgtcaaaattttctattctggtgccaatatagatgaattaattacgttcctgatagatcacattcaatcttctgaagatgagttaaaaatgccttgtctaggattattggcaaatctttgtcggcacaatctttctgttcaaacgcacataaagacattgagtaatgtgaaatctttttatcgaactcttatcaccttgttggcccatagtagtttaactgtggttgtgtttgcactttcaatattatccagtttgacattaaatgaagaggtgggggaaaagctattccatgctcgaaacattcatcagacttttcaactaatatttaatattctcataaacggtgatggcactctaactagaaagtattcagttgacctactgatggatctccttaagaatcctaaaattgctgattatctcaccagatatgagcacttttcttcatgtcttcaccaagtattaggtcttcttaatggaaaggatcctgattcctcttcaaaggttttagaattacttcttgccttctgttcagtgactcagctgcgccatatgctcactcagatgatgtttgaacagtctccacctggcagcgccactctgggaagccatactaaatgtttagaacctactgtggctctactgcgctggttaagccaacctttggacggatcagaaaactgttctgttttagcattggagttgttcaaggaaatatttgaggatgtcatagatgctgctaactgttcctcggctgatcgttttgtgacccttctgctgcctacaatccttgatcaacttcagttcacagaacaaaatctagatgaggctttaacaagaaaaaaatgtgaaaggattgccaagtccattgaagttttgttaactctctgtggagatgatacactaaaaatgcatattgcaaaaatcttgacaactgtcaagtgtaccactcttatagaacaacaatttacatatggcaagattgacctgggatttggaacaaaggttgcagattctgaattatgcaaacttgctgctgatgtaattttgaaaactcttgatttgattaacaaacttaaaccattggttcctggtatggaagtaagcttctacaaaatacttcaggacccacgtttgattactcctttggcttttgctttaacgtcagataatagagaacaagtacagtctggactgagaatattattggaggctgctccactgccagattttcctgctttagtacttggagaaagtatagcagcaaacaatgcctatagacaacaggaaacagaacatatacccagaaaaatgccctggcaatcatcaaatcacagttttccaacatcaataaagtgtttaactcctcatttgaaagatggtgttcctggattgaatattgaagaattaatagagaaacttcagtctggaatggtggtaaaggatcagatttgtgatgtgagaatatctgacataatggatgtatatgaaatgaaactatccacattagcttccaaagaaagcaggctacaagatcttttggaaacaaaagctctagcccttgcacaggctgatagactgattgctcagcatcgctgtcaaagaactcaagctgaaacagaggcacggacacttgctagtatgttgagagaagttgagagaaaaaatgaagagcttagtgtgttgctgaaggcgcagcaagttgaatcagaaagagcgcagagtgatattgagcatctctttcaacataataggaagttagagtctgtggctgaagaacatgaaatactgacaaaatcctacatggaacttcttcagagaaatgaaagtactgaaaagaagaataaagatttacagatcacatgtgattctctgaataaacaaattgagacagtgaaaaagttgaatgagtcactcaaggaacaaaatgaaaaaagtattgcccaattaatagagaaagaagaacagagaaaagaagtacagaatcagctagtagacagagaacataagctagcaaatttgcatcaaaaaacaaaagtacaagaagaaaagattaaaaccttacaaaaggaaagggaagataaggaagaaaccattgatatccttagaaaagaattaagcagaacagaacagataagaaaagagttgagcattaaggcttcctccctagaggttcaaaaggcacaattagaaggtcgtttggaagagaaagagtccttggtgaaacttcagcaagaggaattgaacaaacactcccacatgatagcaatgatccacagtttaagtggtggaaaaataaatccagaaactgtgaatctcagtatatagacattatggcattttggaatttgtaatctcatgatatttttgatgtatttatctattggagggggggtgggtaggggagttaatttgtgacttcgtaacaataagaagttattatctaatttagtaaagaccctgatctgttgcatgttttttatttgatagtttgaatagaaatttaattttctaagttttactttttgtttctggcttttatggcttaaggttttctttggttcttacattagaaaatcatttttaacctccattatcatttttctaaggttctttcctttttcttagttgctttctattctgttttgcctgtcttatttattctcatttgtgattatttagatcttaagaccaaactttcttggtataacagtcctaaagattacaaaataaaaatatagagagagtaaaagtaaaaagtaaagtaaaaagagagaaggtatgattttactgctagagaagtttgtctctgaagaagcacaaaagaaaatattagtgaatttaaaataatttttatactgctgtagcataatttctaaatttgaaaaaaatgcaatggtaataaaatgtataaaaattaaaaaaaaaaaaaaaaaa

SEQ ID NO: 23614 - DNA, 3109 bp, Homo Sapiens
gcggcggcggctgcggtggcggcagcgaggcgagcggggcgggggcgcgggcgcggcgctcggagtccgttcggggccggaggcggtcggggccgggcccgggaagcgcgaggagcgcgcgtagccgccggagcccgccgcccgggacatggccaaggcgggccgtgcaggtggtcctcccccgggcggcggtgccccctggcaccttcgaaatgtcctcagtgactctgtggagagctcagatgatgaattctttgatgccagagaggagatggctgaagggaagaatgccatcctcattgggatgagccagtggaactccaatgacctcgtggagcagatcgagaccatggggaaactggacgagcatcaaggagaagggaccgcgccgtgcacatccagcatcctccaggagaagcagcgagaactgtaccgggtttccttgagaagacagaggttcccagcccagggaagcatcgagatccacgaagacagcgaggaaggctgcccgcagcgctcctgcaagacacatgtcctcctgctggtcctgcatgggggaaacatcctggacacgggtgccggggacccgtcctgcaaggcagccgacatccacaccttcagctccgtgctggagaaggtcacacgagcccatttccctgctgccctgggccacatcctcatcaagttcgtcccctgtcctgccatctgctctgaggctttctcgcttgtctctcacctgaacccctacagccacgatgagggctgcctcagcagcagccaggaccacgtccctctggccgcccttcccctgttggccatctcctccccgcagtaccaggatgctgtcgccaccgtcatcgagcgagccaaccaggtctacagagagttcctgaagtcctctgatgggattggcttcagtgggcaggtgtgtctcatcggggactgtgtggggggcctcctggccttcgatgccatctgctacagtgcggggccctcaggggacagccctgccagcagcagccggaaggggagcatcagcagcacccaggacaccccagtcgcggtggaggaagattgcagcctggccagcagcaagcgtctcagcaaaagcaacattgacatctccagtgggttggaggatgaggagcccaagaggccgttgccgcggaaacagagcgactcctccacctatgactgcgaggccatcacccagcaccatgccttcctctcaagcatccactccagcgtgctaaaggatgagtctgagaccccggcggctggggggccgcagctccctgaggtcagcctgggccgctttgacttcgatgtgtccgacttcttcctcttcggctcgccactgggcctggtcctggccatgcggaggacggtgctgcctgggctggacggcttccaggtgcgtcctgcctgcagccaggtctacagcttcttccattgcgcagacccctctgcctcacggctcgagccactgctggagcccaagttccacctggtgccgcctgtcagcgtgcctcgctaccagaggttcccactgggcgatgggcagtccctcctcctcgctgatgccctacacacccacagccccctcttcctggagggcagctcccgggacagcccgccacttctggatgcccctgcctcgccccctcaggcctcgaggttccagcgcccaggacggaggatgagcgaggggagctcccacagcgagagctcggagtcctcggacagcatggcacccgtgggtgcctcccgcatcacagccaagtggtggggaagcaagaggatcgactatgccctgtactgccctgatgtcctcacggccttccccaccgtggccctgccccacctcttccacgccagttactgggagtccacagacgtggtggccttcatcctgagacaggtaatgcgctatgagagcgtgaacatcaaggaaagcgcccgcctggaccctgcagcactgagtcctgccaacccccgggagaagtggcttcgtaagcggactcaggtcaagctgaggaatgtcacggctaatcaccgggccaatgatgtgattgctgctgaagatggcccccaggtcctggtggggcggttcatgtacgggcccctcgacatggtggctctgactggagagaaggtggacatcctagtaatggcagagccatcctcaggccgctgggtacacctggacacagagatcaccaacagcagtggtcgcatcacatacaatgtgccgcggccccggcgcctgggggttggtgtctatcctgtgaagatggtcgtcaggggcgaccagacctgtgccatgagctacctcacggtgttgcccaggggcatggagtgtgtagtgttcagcattgatgggtccttcgcggccagcgtgtctatcatgggaagcgaccccaaggtccggccgggtgcagtggatgttgtccggcactggcaggacttgggctacatgatcctttacatcacgggacggccggacatgcagaagcagcgggtggtgtcgtggctgtcccagcacaacttcccacagggcatgatcttcttctccgacgggctggtgcatgacccgctgcggcagaaggccatcttcctgcgcaacctcatgcaggagtgcttcatcaaaatcagtgcggcctatggctccacgaaggacatctctgtctacagcgtgctgggcctgcctgcctcccagatcttcattgtgggccggcccaccaagaagtaccaaacccagtgccagttcctgagcgagggctacgccgcacacctggccgtgctggaggccagccaccgctcacgcccaaagaagaacaactcgcgcatgatcctgcgcaagggcagcttcgggctgcacgcgcagccagagttcctgcggaagcgcaaccacctgcgcagaaccatgtcagtgcagcagcccgacccgcccgccgccaaccccaagcccgagcgggcccagagccagcccgagtcggacaaagaccacgagcggccgctgccggcgctcagctgggcgcgtgggccccccaagttcgagtcggtgccctgaggggtgggctgtgctcagagcagggagcgggggccg

SEQ ID NO: 23615 - DNA, 138754 bp, Homo Sapiens
  misc_feature (28286)..(28290): n is a, c, g, or t
  misc_feature (28292)..(28294): n is a, c, g, or t
  misc_feature (122651)..(122700): n is a, c, g, or t
gcctaatccaggagaaaccggaaaacctcacaggaagattacacaggccttacaaaccacagggcaaggcttgaattaatacccacatacccgttataacaagccattcaggggggggagaccttcccaccataaccccttggtcctataagagacaagggccctctacacctccgggccatttaaaatgtgagtgttcccccaaggcgattttttttagaacaacacgccccacaccccccacccaatcccagtcccagatccccttttccttctcagctttagttttatcaggtttcttcacctcgcactgtccccatcctgcccgcaggccccttgggtccctccctccccctgccaccccgttctcagtcctcagtccttgccctaggttggtagcccactctttgcccgcccacggccttcctcccatctccccctcctctccccggcccccagcaccttctgcatcccagcctacctagcctactcctcctcttcctggccctcttccccaggctccaggctggggggtgctcgcgtctcccctgtaggccagagcagccccaagttctgggggcggtggggctgctgctttatccccatggcgctgccatcacttctgctgttggtggcagccctggcaggtggggtgcgtcctcccggggcgcggaacctgacgctggcggtggtgctgccagaacacaacctgagctatgcctgggcctggccacgggtgggacccgctgtggcactagctgtggaggctctgggccgggcactgcccgtggacctgcggtttgtcagctccgaactggaaggcgcctgctctgagtacctggcaccgctgagcgctgtggacctcaagctgtaccatgaccccgacctgctgttaggtcccggttgcgtgtaccctgctgcctctgtggcccgctttgcctcccactggcgccttcccctgctgactgcgggtgctgtggcctctggtttttcggctaagaatgaccattatcgtaccctggttcgcactggcccctctgctcccaagctgggtgagtttgtggtgacactacacgggcacttcaattggactgcccgtgctgccttgctgtacctggatgctcgcacagatgaccggcctcactacttcaccatcgagggcgtctttgaggccctgcagggcagcaacctcagtgtgcagcaccaggtgtatgcccgagagccagggggccccgagcaggccacccacttcatccgggccaacgggcgcagtgagtgtggcctgggctattttagggtcatgggaggagggtcgctgtgtccctaaagctcagcactggggaactgtagatggagataggcattgagcagctgtatgtggtggttgggatcaagaagcacacgtggacagagcacctgtgagagggccaaggcttcatcatgggagcttgtgaacaccctaggcagatgcaaacaaggaagaagagagcatgaggggtgaagccttgtatcaaggtggaatgtgaaaatgaggggatattaagtttcgggagcaatgtttgtgccctagagtagtgaatgtgattgatagccactctgaaatgtgccctgtctgtgatcagagctaccacccagactgggcgccaagaccccttggtggtgtaaaaataatgagggctccatgaacggactcagggctcagcagatttgggaaagacagataaagctcatactgagaaatctgtgctgtctgtgcctttgagcccagggaagggcagggaagagtcagggagcaggccggttgggtggggagcagcaagggaggctctgggaaagggaggggcttgagagtgacagctcccttcctctggggtctggacaggctctgacttctgccagatggtccatatggccccagggtacttatggtggactccaagaggggtgggctggggagcatctgctttggggttgataggttagggcactctctttcttgctgaagagggacatcccagtgattcagagagggggctgtgtgggggacctggataccttctcagggtgctcctctgtcatgtacctgctcccagttgtgtatatctgcggccctctggagatgctgcatgagatcctgcttcaggcccagagggagaatctgaccaatggggattatgtcttcttttacctggatgtctttggggagagtctccgtgcaggccccacacgtgctacaggccggccctggcaggacaatcgcacccgggaacaggcccaggccctcagagaggcctttcaggtatcatttgagccaaatctgaaggaggagggggaagaggtgcttcgctggaaattctctctcacaagaccctaaagaaaccctaggaaccaggcaggaattgtgagccacaggagtaaaatgaacagaggcattctgagtctagtgtcaccctttcttacttctctacttttgtgactcttagtgtgcttgctgccaagactgactttggctgcctccaaaatcctaaaacactgactttcctaagtgccagtagtaggctatattgtgggggagaaaagttcaggaagagatctgatcctagcccttgggtgggcttccaccctttatggagaggtgaggcatcgttctggtacagtcagacaaagtttgagaaaggatatgattatgtgtcctggaacagacactaagaactttagtggctcagaggaggaagagtcagtgtgggctgtgtttagggaaggcttttacacaggaagtgagaccgtattgtgactttaatgatagatgtcatattcatagtcagagtgggagaggagatccaagcatcctgagcaaagagaaaaagataggaatgggcgtgtttgagagaccaagaagatactgacccgacaagaatgaggggttcacttaaaggagatacaggaaataaagttgcaaaggtagaatcagattaaggagagctctaagtcttaaggcactaggacttgaatttggggtccttgactttttgtgtgtgtgtgtgtgtgtgtggagataattatacagtagtgacagaattcaggattagaagagggggagacctggggcagagagaccaactgtaacagattagaagggggtgaggtgatatagcttgaactagtgtgatgatagcaggaatggaaagaaacgcatttcagatttcagaaaatttgtggggaatgttggcatgactctgttcatttcactcctgctcaaaactttcagtgacttgtgttctagagaataaaatcctgactccttattgtgacatttaagaccttctgcagtctgttctcaaaccactttttcagtcttacctcctggtaccctcatgctgagaactgcagcctaccaggcctctgagttcccccaaccccagggccttcctgcccctgtgcctttatgttctttttccttttgtctggaatgctcttccttccctcatcccaaatatctgcctctcaaaatcatacccatgaatcttcccgattcccccgccacttttttactaaccgtgcatataagtgtttcccgtgtatttatccatatccctccttttttccaagaaggattggaggtggcttatgggataaccttaaagtcctttaaactctgggattatttggttcgaagtagctgtgtataagggctggacctgggtggccattcttctccagtaaggttttatgtggctgtgattatatatttggttgcgactgacgagtgtgtgtctgactgagaatgacatagctgtttgcatgcctgagaatgagtctgtgactgtcacacttgaatatgggcagtggcagggcaggttttgtttatgccataatgttttcctaaaacaatcttctcacctttgtctgggtaatgcttccatattctttaagactcataccagttattttcctttctaggaaatgatcccagaatccctaagtgggactgaatttcctactcttttgcttaactccatctaccatagaactaaccatattattcagtctgtgtttgatttatttgaaggctgactcatttcattagtatttactgagcacctatcatgtccagtcactgtgctaggtactggtatacaagggagagcataacagactttgttcctgcctttttggagtttacatttggtaggatgggcaggcaataaataagtaagcaaataaatacaaatgtaggaacatattgtgatgtgttactaaaacataaagaggaaaggaatagagtgttatgaaaagagaagaacaaggggattgtacttcagctggtgtggactgcagaagatctgtgaccctctcagatgggagcactccataaccttcctggttatatcctttttctttttgagacagctctgttgcccaagttggagagcagtggtgtgatcacagctgctcactgcagtcttgacctcccaggctgaagcaatcctcccacttcagcctcccgagttgctgggactacaggcatatgacaccatgcccagataattttttattttttatagagatggggtcttatcatgttgcccaggctggtctcgaactcctgggctcaaatgatcttcttgccttggcctctcaaagtgctgggattacaggcatgagccactgcgccttgctggctgtattctatttgtggaagaaaagcctcactttcttctgtgagcattattgcccagccaagagtccccagcattaagggtagctagaggagggatctagtcatccaataatcagttatatcaattaactctcagttctccccctcactgtgggcattattcagacagagaaataaagagggaatctttgctgcaacacaagagaagggaactaggcaccaggaatatgctgatgggaaggtcaaggctttgggtaggtggggctgaggggtgataaggtgccccgccccccaccttccaatggggaagcaggggagagtctgagggaagttgggcagttagctacagccaagcaaggatgaaagagcacagagcctttctcccagagacactggccctctgaggtcccagaccaggccagcctggaaaaggtggcaatagaggaaaggaggccttgacacagatgcccacagcttttccaggagggtatcatgctcaaggaaaggccttagctcatgccgtatcgatactggctactagggagagagctctgaaatcaagtatgttgatatgatttttctctcccatttagccactagctgctccagggcagggatcatgctcatcttcatattccatatgtctagcatgtagtaggtgtttaacacatatttgctgaattgaattaggggtgtgttggggagagggggataggatgaggaattcacctagacaggagtagagctggcaagtaatgtaaactaggtgatcaaccaggatagggaagaaaagattgagtggaactaaataagcaatgaccaggctctgaggatccagaagcccaggctggtcaatggaggactacagggttagaaacccaggcagaggtcacaacctacatgaccagcatgagattgggttacacacagggagcaccagcggcaagaatggaagaaagcactaaaccaagggcttggagatcacttgtctcattaggccactgttgaccactctccagttggccagggcaagtctcagtgggcgggtccacagatagaggcaggtgcctcctgagggtgcacatttcctaggtgtgctcctggcacccacccaccactgcacccatttgtggcggactttgcttgttttttccacctggggtccactgtgaaatgggacacaattatcctccttcactttctctcaaacccctgagcaagcacagaaactgtttgaggttgggtttttttttttggtttggtttttcatttttgttttttggtactacaactacaactagtaaccacagcaaaaacagttctagcatagcagtttagggggaccatggggtcaaaactatttaaaaataatacaaagatcttatctgctttgtcacgcttgttcttttgtgattgtgtagggaagttttccagaggttacatggcatgatgatgtcatcacttggacagctatggaaggtgtgcttgtgtgttcttgcgttttcaaaatttatcagttttaatttctaagatggtcaatattgatagatatagtccacataaacaaactttatttggggtccttaataatttttaagagtataaagcgattgtgagaccaaaagtttgataactgctagcctaacaaactagccaaacttagtgttgagaattagtgtttaaaatgtgttaaaaacctatcatcagcctttattgaaatataaattgtgttgaacctgatcttttctcgcccttttcctgactttttacattgcttgtcaacaatattctacctctttattttattcttggaacaggtgctactgaatgaactatttcaaccctttcctcaattcccttctctttttaaaaaaattttacctgagactgggagaatgttagaagtgtgtaatcaggcagctaaatgctctagtaagaataatgatatcttgaggcaagctgcagtctaatataatataatgaatgcatattagaaatcgactttattatttcctatctctaatgaattgatacataataggccatatgtgatgtgtctagtgcagcgtatctctatggtccacatgtactttctatgacaagaataaacaaaactgggagaaatgaccggattttaaattatcatttcacaaagtcatgtttcataaaatatattgaactgaagtctttccttgaagttgtgatgccagtttcctgttggagcagaagttggtctcagtgactatgtggcctgaggcagggcctgagactgggaggtccagcagctcaggaaggggaaatgtgtgagactaatgggagccaagcaggcactttggtgagagacagagatgctgactcatgcgccagtgagatgtgtgcatgtctgagatcacatgtgtcatttgcttacctgtgaaatgtgtgtgggcatgtgactgtgtgtttgtccctgtgacacatctattactcagtaagcaggacagtgctgtttgtggtaggtgttccacacattaaatggatgagcacacagcttttcacaggtggaatcactgtctcaaagtatttccctcagttgtcatagggcctgaaatctctgtaattcactgggcggagacactgtgttcaagtggccgaaatgacaatgttagtattttactgatgacattaacagtgattaacatctcagagaggagctgttagtgggtgttgtccttgatcataagcagatacccagaaagcatgggacagaggagccgtgtgagctgtggtggcctggcaggaacctggatgctggaagggagctctggaagatgttgggctgggctttggggatggggttgactattatttgccagtttccaccttcccagaaccagtcctatctacctttcaggaggagtgccactccctcttcccagatgtatgcaacacaacacacacacacacacacacacacacacgcacacacacacgcagagagagagaggttagtagccctttcaaagccttcagactcacctgtgtatattttatatcatgtatattttaccaagtttccctgtcctgcatcttctcttcccataatgcctatcttgaatcctgttcactcttccccatatgctgctggtacagactgtattggtgatcacgtaccgagaacccccaaatcctgagtatcaggaattccagaatcgtctgctgataagagcccgggaagactttggtgtggagctgggcccttccctggtaagtagatctctcccttcctgagagtcaggtcaagctttggggaagggcttctctcccaaactcagcatcaagtcttggctgtggagcaagcccaactttggggggtctccgcttctgtccaggatttttccttctgccctatggagtagttaggaagggatggcactttaggaataagagggaagaaagcaaaccagaagagagaataggtagaagggagaccccagagagaggggaaggggccttgcaggacatttggagagtactgctgaagttgccacccccagatgaacctcatcgctggctgcttctatgatgggatcctgctatatgctgaagtcctgaatgagacaatacaggaaggaggcacccgggaggatggacttcgaattgtggaaaagatgcagggacgaagatatcacggtaatgaagaggggtcaatgggggtctgagggctgatgtcaggaatagagtgggctgaagaagaaacagatgtcaggatcaccacagctttagtgggggttagtgaatatggcagagttgcccacacctcaagatcggggaagggtagactctgagggagccgtaggcatgagtgagtgggagaggagcccagggtagacctcaaagaaaggacactcttttctgtcttaggtgtaactgggctggttgtcatggacaagaacaatgaccgagagactgactttgtcctctgggccatgggagacctggattctggggactttcaggtgatggaggaggaggcagggaagagagtgtggccctgcaaaatccagctttcaagggttcagtcggggcagaaccaaaactactagatgagggatttgttttctctgctggcactgcatcctggctgggtggtaggctggggagaaaagcagcgaaacagctggggtctggggaggaggctggtgggagcaggcctgtgggcccagctttttgcttccttacagcctgcagcccactactcgggagctgagaagcagatttggtggacgggacggcctattccctgggtgaagggggctcctccctcggacaatcccccctgtgcctttgacttggacgacccatcctgtgataaaagtgggtgtgtgcagggactgggagcagctttcctccctttgctttccattcatggcctccaccctcactgaccctccactcttaactgtgcttctgcctttacgtctgcatccctccctcctcatttcttcctactcccaaggagtctgtctatgcacctatgcaccccgttctccattctgccaagtccgcacacagtcttcctcagggtctctatttccccttcagctccactttcaaccctggcaattgtggctctgggcacaggaatcaccttcatcatgtttggtgtttccagcttcctaattttccggtgagttctgggtttcttgctgacctactccctgcccccattgccacacaacctctggctgaagccaggtggtccctataatgtgggatagggtagtaggtttcttaatttgctggttgtctcttagatccaacagcgtcttcctctctagcctttctctttagttgtcgcttagcctaggtgtttgttccacttttggtcctagactggatatactaactagtgtttttcagtggggttaagatcaaaggtgaattttccattggtcttcttttaggaaagaactttcacccccagtctctgtgtttgttagtgagcatagggcatgtgccagatatgccgagaatgcagccttatcttccagccctgtctctcaggtgtaacagttgcagcttcaggagctgcagggaagcccctgcaaccctgctgttggcttgggggtggcaggattcggcttgccagtcaactgaggtgtgcagtccttacagaaagctgatgctggagaaggagctggctagcatgttgtggcgtattcgctgggaagaactgcagtttggcaactcagagcgttatcacaaaggtgcaggcagtcgcctcacactgtcgctggtgagcccttgtctcagctgttcctctgcctccctctgagttcctgtcccttcttaccctggatctctcccagcacattggcttgtaatgatagcccctgcactaccaccatcatctaatgttcctttcatccttccgcctccatgttgcccttggccccagcggggatccagttacggctcgctcatgacagcccatgggaaataccagatctttgccaacaccggtcacttcaaggtgaacagtcatttgcttgttctggtccccaccatttcatcctgtctcatccccatctgccacctctgcccctgaacctctgtccctcatacccgactctctgtgcccagctgagctcctgggtgcttccactgctctctagcatttccttgtacccagaacttctgatattcactttcctttcccctttcactcccaccatcagggaaatgttgtcgccatcaaacatgtgaataagaagcgcattgagctgacccggcaggttctgtttgaactcaaacatgtatgtaacagaggatggactctaacatgtatgtaatggaggagtggggaaaactatgaaatagtaaaattggctagatgggcaaggggttgatttataaatgattttaaaatcgtagatacaactaagagaaaggtcctcttatgtagtggtaagtttctgtatctaatttttaactctttcaattttcttatccttcccattgtttttttctgccagatgagagatgttcagttcaaccatctcactcgcttcattggcgcctgcatagaccctcccaacatttgcattgtcactgaatactgtcctcgtgggagtttacaggtgagggataggtgtaggagattatggcaggggtgggaaggatagacccaaagttatactgactctatgctgggtgatagctggtgggaccaggacagacagtctattccatgtcacttaccaggatattctagaaaatgacagcatcaacttggactggatgtttcgttattcactcattaatgaccttgttaaggtgagtcttccccactccttaaaagttcatccactttaaatcacttccactgttctttgattgtggtttttctccttctagtcctctgaagtcctgttctctcatctccccttattcccatggtctggtaataatgggtaaacaaggagtctggggcttataactgggacagtgagttttacctgccacaaggagtcctgtgcctgtagagagtttctatctttctgtcttaaatatctcaggtctctttccatcatctcttttacctctaagaactcataaaatgagtggagtctctgaacatatttttttttttttgagacggagtctcgctctgtcgcccaggctggagtgcagtggcgggatctcggctcactgcaagctccgcctcccgggttcacgccattctcctgcctcagcctcccaagtagctgggactacaggcgcccgccactacgcccggctaatttttttgtatttttagtagagacggggtttcaccgttttagccgggatggtctcgatctcttgacctcgtgatccgcccgcctcggcctcccaaagtgctgggattacaggcgtgagccaccgcgcccggcctgaacatatttatctcttgtttttcctctcattattttactctccgaacatatttatctcctgtttttcctctcattattttactctctgaccaatatttggcatgtctgcccttttgttcagaaaactgaaatttaaaaaaggaacatttactagtagaactaagagaaaccaaggaagattgtactaaaaacctttggtactcttctgttatactaggttttagctatgttcaaatgactcagaggcccatggatttgtggagcataaaatagaatcttgcatgagttggacaggttttctgaaataagtctcatagccaatgagcatcccagtggatcaccccacactgtatctgaaactagctttggttttctgctgaattctcatgaagttatttaaaaagtatttttttgtgtgtgaaaatttgctatcaaatgagagataaaaatattagtaaagccaatgtcatgctcaactagaggtgtgatgataaacataagacacgactcttgagagaacagtgatttggtggaaaagtgatttacaacaaagccagaagcctaatcctgtgattgttgaaggcatcctttgcacagtttccacacaagtaaattcacaacttcagagattcccaaaagttttgttgataccaaaataaataaaaaggaagaattcatagagattagagttatgaattaagtccagagctaaacatttagacagaaatgttttttgttagcatattaaaccttgtatcctctttctgtctcacctgaactgacttgggtggctcctagggtttcatttttggggagcatcattaagactttttttttttttttctgagacagggtcttattctgtcacccaggctagagtgtagtggctaggtcactgctcactgcagcttcgacctcctgggctcaagtgattctcccatcttagcctcctgagtagctgggaccacagcgtgtgctgcagtgcccggctcatttttatatttttggtagaggtggggtttcgccatgttgctgaggctggtcttgaactgctgggctcaagcaatctgccagccttggcctcccaaagtgctgggattacaggcatgagccactgagcccggcctttaagactgtctttcagctcctcggaggcaaaggtttttccctctctggacccacagagccagcagttttaggcttctgcactggcttagcagattttgtccattttccaggtttatgatgttctgcactttctctctgatccagcattccctctagtagatcttgttcctcctctaccccgacttgcccacctccctctagtagatcttattcctcctctaccccgacctgcccacctccctctagtagatcttgttcttcctctaccccgacctgcccacctccctctagtagatcttgttcctcctctaccccgacctgcccacctccctctagtagatcttgttcctcctctaccccgacctgcccacctccctctagtagatcttgttcctcctctaccccgacctgcccacctccctctagtagatcttgttcctcctctaccccgacctgcccacctccctctagtagatcttgttcctcctctaccccgacttgcccacctacgcctggttatgcattaaagtttacaactggtcttccttggtatatccagctactcttgatacctgggtctcaagtcatgtcttcctaattagtagccaggtatctgaggccaccatgggagttatatcattttggtcttcacccaagttctgttctcttcactaatcaagaagattgactgccctctccagggtagtcatttgtagctccacttatccctcctttttagcattttccctgttcctgggggcttgggtgcctgtgtcttgcttatgataccaggaacagatgactcttctgttcttcctgcttccttgggtggaaactgcaaaggatgccttccaaaatcagcttattatttttgtggacccaagatctgtagacagctagccagtgcccatctcatggagagagggtattctaagccagatatgatccaatcccatgacttgatctgtaccctgcagggcatggcctttctccacaacagcattatttcatcgcatgggagtctcaagtcctccaactgtgtggtggatagtcgttttgtgctcaaaatcacagactatggcctggccagcttccgatcaactgctgaacctgatgacagccatgccctctatgccagtgaggcccacccccacaacccactttttatattgctcctctttccacctagggatggtgggagagggaggtggagtgacagtaatatagggatgagcccaggtgggcttgggggtgccccatttcgggggacctggccagccggtttcctcttttcagagaagctgtggactgccccagaactgctcagtgggaaccccttgccaaccacaggcatgcagaaggctgacgtctatagctttgggatcatcctgcaggagatagcacttcgcagtggtcctttctacttggagggcctggacctcagccccaaaggtaagagtcaatccactacccacagcctcttcttcctgggggaactctgttcttcatccaaacctttgatcaccctcagagattgtccagaaggtacgaaatggtcagcggccatatttccggccaagcattgaccggacccaactgaatgaagagctagttttgctgatggagcgatgttgggctcaggacccagctgagcggccagactttggacagattaagggcttcattcggcgctttaacaagtgagagggcattatggggcaggggcttcccagggatagaagactcattagtcctagtgcatgaagtggggcaggtgggaccagagggtgggttggataggaagtcctgggaatcttcagaatcttagagcaagtgccttatcctggcctccctctagggagggtggcaccagcatattggacaacctcctgctgcgcatggaacagtatgccaataacttggagaagctggtggaggaacgcacacaggcctatctggaggaaaaacgcaaggctgaagctctgctctaccaaatcctaccccagtgagactttgtcccccttcctgtattttcttttgggattctgctctgttgggctctgcctcatcaggcacctgagaactcgcctccccaccctcagaaccctgctggccacagggagcacccctgcttatagattatttgctgtcattctgtctccacatcagctatgctgccttcttactggctgcccatcccttcttcttaagaccctgctctaccacacccttgcttcagcaagtgtatgtaaaacagtcccaacttgagacagctcccatgcacagggattcccctcaaaaccccccgccacttgtgtgccttaccttgcattagactgtaatgtcttcccagccactttcctccctcccacctgaaaagcctagctttcttgttacagctcatctctgctgcagccacatacactttccctctctcttccactcctgctctcttggagtttggctcatacggcacccttgcttcctagttcagtggcagagcagttaaaacggggagagactgtacaggctgaggcctttgacagtgttaccatctacttcagtgacattgttggcttcacagcattgtcagcagagagcacccccatgcaggtgagagccatgggtgagaggtggcgggtggggttgggtgggtagggacctggggaagcctcattgataataggaaagatgagtttgttctagagttcccacatcttttgatggcttgtgggttaagaattcttagaaaattgggcacaagtctcagggcctctgcttttctatcccttttaggtagtgacacttcttaatgacctgtatacctgctttgatgccataattgacaactttgatgtctacaaggtgagagctggggccgctgttcaatagaagaccctttaatagagacccgctttgaaactcagtctccctgaaccccacacaccttacccaccccatgatcagttttccctccagggtactcagcatcctggtgctggagtgtacttcgtagacagatgtagctccagcactataattgtacactccagtcgaatttcttgtgaatcctttgacttccctaatcagaaccatcatgagatttagctcctatcttcctggagtataaatacagcctatccaacatttctctccagtcctctccagacatggaagaatcatataggatgtgggtccagactgatttagtggggtgagggaaaatatattttaaaaagtaaaactttttgttgaagttattgagttggatttattgtccttgggagtaaaaatcatctggatttgaatattggcttgttgctaactgtgtggccttaggtaagtcacagaatctccctgagcctcagttgttttatctgtaagatgggaataatagattcgttgtatggaaagtacctaacattgtttggcatgtggcagactactatttagggataactactttatccctaaatacttagtgtgtatttcctaaaaacttcactgtgtatttccttaaaacaatggcatttattctcttacatagctttggcacaattaccaaaatcaaatgcctgctttcctcctctctgacagtttgggctgtcaggtccatttcactgggcctgctttacctcctcaccagcctctgtcctcttgagttaccgttttcttgcttcccatttcctgatggcagagcctatttgtccatgtcctgctgcagacagggtgttcattcattccgcaaatgtttactgagtattcaccaggtgctgggtggagaaagaagacttaaagattccctagacatctcctctcccctagactcaggaccatggcacttattttctagtcaatattctggtctccagcatgtcaggatgattaatgatggtgtcaagcttgtctccctctactttttcccatccccatggatataaatagaggtgaccttttaatccccctctcaatcaggtggagacgattggggatgcttacatggtggtatctggcctcccaggccgaaatggtcaacgccatgcaccagaaattgctcgtatggccctagcattactagatgcagtttcttcctttcgcatccgccaccgaccccatgaccagctgaggctacgcataggggtccatactggtaaggctgactctcactccagccctagtctccacctttcccagactctcccaacctgtttcttctcaaagggccagtctgtgctggggttgttggcctgaagatgccccgttattgtctttttggagacacagtgaacactgcttctcgaatggagtctaatggtcaaggtaagacattagccctcaaccccactgttggcctcaatttatcttgcccttttcttcttttcataatccctccaatttcttaatctgagagaccacagttccttagtgtcgcatcctcgggcatattttggttctaatagatatgcattgggaggttgggcatattttggtcctaatagatatgcattgggagcttcccagggatggttggtcgggcacggtgctatacagtatcaccaattatttgattgccttttctttgattcctcattccaccatcctccccattccacccaccccagcgctgaagatccatgtctcctctaccaccaaggatgccctagatgagctaggatgcttccagctagagcttcggggggatgtggaaatgaaggtgatggcaggccatggggaggggggcatggaaagggagggtgaaagtgattatgggaatcatagggaaagagagggagacaaagggactaacatcgaagcatctgaatcatgtccactctcccacttccagggaaaaggaaagatgcgaacatactggctcttaggagagcggaaaggacctcctggactcctgtaaacccccattctttccaagtcagatagtcttctgctgctggtacctgggtgggcaatggccaccatgtctgcacacaccagaaatggacattttcatatgcaatggaaaacagccacaaaaaaacctaccttatatggaagttgtagccctctgcagctcagccctgtacatatacctgtccctctctggcttggtccccttcctccctactttctgtaaatatctgtatctaaaccagaatattttggtcaaatataaaacaataataaaaaaagttctgatgtcatagtgtgggataggggcaatcccaaggaaaggttatggggtatgcacacagtgactcacagaatcactaaattagcagtcttgggatgagagagaaccctttatgtaaagcctcttcaagtacagtgagaattaacttcctcccgacctctctagtgcagacagaaatagattccatattccataccccacttccctcctcacccctcagaaaggagtcattctcccccctccaccacccagccttcctccgggacagggaagggaagatatttctcccaattggtaggggtaattctcaggttcatagggcaaaagtttccccagagacaagggtactggtgttgagaagctgcagttcttccggaatggtgtgtccaatgtcctgatgttactgacaccctggaggagtgccaggatgaggatggatcccactctccccaagccagaacaaaacaactctgccctacctttcctgccccgctctgcccccaacacctagtcaccctcacacaccggcagctgtggtgccctctgtatccagaaggtctcaggttgctcctggcggtagtcgtgaggctgtgagggagggtactgagtaactcctggccttcagccctctctctcaacctctgggcttggtacttggccacagcctgtcagagcccagctggtgcaagtggcgggggatggggggtgggttctcacctttgttggggcaggagtccctgcttgtgccagctccattcggtagtcatggtgtgtcacagactcaacctcgaagagcttccttgtgggttcctgttctgcctgcacctctttactatgtagcccgaggggtgtcaaggccattctcacccaatttttctcctccccatccctcttcccctttacccaatcccttaccagatctgatgctgcaggagcatctccagcatggcttcacgcttccctgtgagagagttggggggtgggcaaggtggggtctggttaagaaggaggcccagaagaaactaacttgagaaaaggaagaagaaccttggggttccgcccttatatccactggagaatccacagccccaccagaaattccttcctcttcttccctctgagtaatgggctcgttctggcctaccctctcacatttcacacctcgaagtggccaatagacgtttcctggtggctggtacgagtctttctgggtggtgctggagggcatgggtgactttagttgcatagtcagcagtccccggtgtccgtgtcggaagaaaaaactctcagagccatcctgcatgcttgggacttgatccaggtggttggtggctctctgtggatcccaagttgaatgactataatatcccttctggtacccaccctcatgtaaactactgcctcccctaagaaactgagggcagccttcaagaaaagggagcaggccaaaactttaatacctcttcctcccagttgtagaggaggcactggccccgcggcaaagtttcatagcaaaccataagcttccctttaatgtctgggggtttccatagtcctcgggcacccggttctaagacttgcaaaaattcccaaggtggttgtttctggggctcccaggggcagtgctgactccaggaggtatagttagggacccgatctgccaccaggtttctgaaccctggaggaatacaggggctgagctcagagtcagggccagtgtctggaccaggcccagaggcaggaccaggatgagagccagagccatgaccaggaccagagccaggaccagagccaggaccaggaccagagccagagccagggacagagccacagccaggaccagagccagagccagagccatggccagcacctgagctggaaccaagaacaggcccagagctagagcctggaacagggccaggattagaactatggtcagttgtagtgcaagtgtcctgagcaatacaggaaacatagacgggctcaaagccaagactcccatgggctatattgtgggtaaagccgggtcccgcacagggctccccaagaaggctggggtcagaggacggctccatgaactcagaacagggcgctggggtctttgtagataatgcagctgctttggcagtggtgaaggctgcagtagctgcagcagctgatgcagccgctgcagctgctgcggttgcagctgccagggccgacctgggactgtcatctgaagaaggaaacggttccgaagtgggccccagtccttcggagctgggctgtatgtctaaagatctgaaagaaagcaaacacgacatggctgtcaaaagcgcagcagaggaagtcagctgaccttcctcgtccccttatgcctgcagccagagctgcggctctcaccgcgaccgcgaccgcgatccctccgtagactcgttggtctccatcttcagactccagctactgggttgccatagagacagcaaacaactcctggagcctgcgcagaagtacagctgggcggacttgcaggtggcggtggaggcaagtcctctgcggggcggaagtcttcagcctagtgctgttagggaggtccgctttccggtcccggcggcattccgcctcagacggggttttagggttccgctggcttaagacctcgccctccacgtccaaacagtctttgcgtgcggttttctaagatgatgctttatggggatatgttggaaacaggcacagggttgtggcattagattacagcctacttggtgtttgctgagaggcaagtagcttccccttagtttgcttagttcattctcaaaagtgagtggggtctttaacaaatgttaaggatgaaaataaacaaactagcttgagcaaaatggtgagacgtagaatagtgaaaaggcagccgcttttgtttgggtgtgattactcctcctctaataaaagaccctcatattgaccaccctcctcctaagcgcccttagaacctggtttgacctctgaagaagggccaggattggctttcagtttcttcctactcatttaggctcattcctactgttacttttctagaagcttgacctagggtggaccacttgtcaagaagacttacatatctgcaggcaacatttaaccacaggttggacctcctcagtgtctttcactcagaccagtcaaggggcatcatagccctgaatcagttttctttcccctttgtggtataaaattttatattaaagacaggagagcataattaagggagaacagttttattagcatcacagggtccatttttccctttccatccaagcatccagagtctggtgtcctttaatcagttggcaggttcaacctggaggccactggagctgccggcccccaagtacatgaatgtgcagatgatacacagattgtgcacccagcttcccatcgttgatcactgaaattgagcttggggttagggagtcaggatcatggcagaggtcgaagaatgaagatcatattgagaagtaggaatgagaattcataggtgagggaccaagggccaaaagtcactcaccaagtcggtatccatctcccaggccctcagcctttgctgtctgcttggccacaaggagtaggtgtcctagaagctatagagagagcggagggacataggtggcttcattcatagggagcaagacctctagctgggtccaggggctcctcccagccaaaccctggccctgttcttcccacctgctggtcttcttcttcagcctggctaatccgaggaatgggcttcttaggaatgaccaggaagtgcacaggagcctgaggggccacatcacggaacacaagacactgggggaagtgacaggccagaggccacgttacttcaacaggttggatggtatctacaacattcctaaggggataggtcctaagagcaccccacctgctggtcctcatagagaatgtcagctgggaggctcttgtccaggatccgggagaagatggttggggctgctcccccaggagttgcctgctgggccttggccacttcattcccatcagtcacacctgcagctcctcggacctgaaggtggatcgaccatattcaaaggagggagctggcagaagctgggctctgatagttgttaatttcgtccttctaataacctattcatcgttcccacccaggaggaaagttcctgaatttcagagcaccagcagcaaagggtagggccagaaggtgctggacctggttagataacaggcggtattattatcaggattcagcagtgcaattgattcctgctcatgtgtccacgaaatatagcactgtttagggaaaggatctagaatgagagactggggattttggtctcagttcctaccttaccataccactgaattacctcagataaattccttctctcagcttctaatataaaataaagggatggtttccataatctcttgcgatggcttgaatctctttccactctcaccttgttagtacatttccacttatttccgttacttgttttctgatctttaagccttgtcgcctgttttatttaagttttaatgcaatcgccctgtttgacactagttgacccctcatctgggtgtcacatgtgactctgtgaattttaactcttgtcccttgaatgagtggaggtaagagttcagctaagtgacctctgctcccctagccccagggaacttcgggtaagggattcagagaaggctgatgtcattgcatcacgttgggggagaacgggacggaatgaattctctgacctccgagccgcttctggcaagtgcagaagagaggttaacactagtgctcattaggaggccagaagcctgaggagggcagagcactggctccaagaagagaaagctcatttcctgcagggggcatcgggccagctgggctgcaggcagtggaaagaaggcggcagccgctgcactgaccctgtcccgacctcggcgccccggcctgcgcagggcgggaatcagcaccagctcgttctccggagccaccagttcgacctcaccacacagccccggagcttgtgcctcggaggggcagaggccacaggcaggagctctgcgcggctctgcgcgccttcgggaccccctggccccggatggcttcggagcccgcaggaccccctactcgctcccgcgccacttctcacctgccccccgcgcacccccgtggccgccacggctctgcgcgccgcgcgcaacccagcagccagcaccacggctgccgccatcttccctgagccgcgggaacctctcacccgggtcagcactcggctccgcggccggccgtgggtggggactccgggcgcggggaagcggggtagtggcggccgggcgagccctgctaccccattggagcgcgcctctgagcacgattcaccccattgcctctgcagccactttggaggcgggctcttttcatctcattggctgcttctaccaacgcgaggacaattttccattccattggtttcgtcttctagtccgtgtgaacgttcttttcccattggatccccttactagtttctctgtgagagaaacttccactccattggaaggattaatggagcctggaggtgggattttctcctagttgaatctgatacacaattctggcttctaggttgcggctcccgagtgggtggttcttttcgttcttggttcgtcctcttcaggtctggttcctattggtgcgcggggagaagggggcggggctccgtcacctgctgcagaaagggctgttttagaccctctcaccgctttggccaggaggagggcggggctctgagggcatccggcgcttattggctccaagaaccacccggggtggggctaaaggtgaacggggatgaggtgtgtttttttgtttttgtttgtttgttttaactggcggggctgatgcgcagcattttctccacaagggcagtttcagtcccttgagcattttggagattttaatgtacttatctaagggaaattcttccttaattctatgttcttgttaacgcattcactccatagattaaaaagtctgtggtttttgcattttttttttttgagcaggaggagataagagtgtcctatatttgccgcacaagaattataataagcaaaggagtatgtattcattgttcttttctaatcggaaaaggtgtgtgatacagttagctcggtgcctggtgttttctttttttttctttttttcttttttctttttttttttttttgagacggagtctcgctctgtcgcccaggctggagtgcagtggcgcgatctcggctcactgcaagctccgcctcccgagttcacgccattctcctgcctcagcctcccgagtagctgggactacaggcacccgccaccacgcccggctaattttttgtatttttattagagacggggtttcaccgtgttagccaggatggtctcgatctcctgacctcgtgatcctcctgcctcggcctcccaaggtgctgggattacaggtatgaggcaccaataagtcaggtttgcactgctggaatatatatttttgacataagaaacgtggggtcacaaaatactaatattctcagacgctaggtaagttttagtctgatatcacataggacaagttaccactgtttctttggtttttctttttttcttttttttttttttaaacacatgacctgatacatataggtggtcagtaattgttgaatgaataacatttggtgtttcctgtctttttttcataatatgtaatatgtattgcatatgatactaacccatgtgtaatcaatttttcatatttttacagtctacgtaaatatagtttgtattggctgcttattatttccttcaatgagtttatcatagtaatcctaactctattgttgactattagttgaattagttttaggtgaatggttatcatggggcatataaccactgttggggaactttgcttctagagatataacaatctcttttgtatagctatattattgttagaaaatcctttctcctctaaagggcagacatttgattctgtgattttccccagggatcctagcagtccagattgcattccttcccttggaggaacagatggcccccctaattgtgaggaaatgtagaatggcctcttctctgggccccggaggctgcagttctctgtggtgcctctgggacactgggagaccctagagttgccctggagaagggcgagagataagtggatctgggatctaggaagaggaaggaagccagtctggaggataggtggatacaaagcactttgaaattagttatttctttggttctcatagaaagtaggcaacacagaggttattcctgttttacaggtccagaaactcagcctaaagagggacagtgacttgcctgggttcacagagcccattagtgctggaatctcctactcccataagaacctatggactcccttgtgacttcccacattcactgattttgatccttggcccacagttttctctacttcaagcacttatcaccttcacttgccctcatctgaaagatgttatgctctgcagcctctgaacactgtctcttgtactccaacccctgcccctacgtctgctactgtacctcattagagacttctcttcctttgactgctccctttttcaatctgtcatttgcctcctggcatcactttctttccctattggtgctgtatgctcccttcacatcctcatgccttcttttgcttagttttcctgatcttcctccctgacaccctcacatcatcaacccattaaatatttggattctctgcttctctaactaggttctcacttccaactgtgaccgaatcctgaactacccactgatgaggtttttctccagttccctacattagccttcccaaaccttcccctttctcttcttgtctcctgctccctactcttatccctcttcccctggaccccagccattggccttatctcctacttcacagggcatatagaagccatcagaggggaacttccacaggttcttgttccctgaaactctaggaaggctccatcctcttccttcgtcttggtcataggaagtggtgtttctcctgtccagagaaaatcccttcacctctgctttgacctcatccctttcctccatctctgggatcttgtctcaccaggcatctcttctctctcttctgggtccttcaaggtcctttagtctactggcctcttccccttttccttcctacaaaagtacttccttgactccacaactccctctggatattgtctgactttacttttgtacttttcatccaagcttctttaagagactccttgaaactcactgctgtttgactcctgcctccactgcaccagtgtgaaactgcactctccgatgttcccaaagatcttctaattgcaaaacccaatggacacttttcagtctttatcttattggtgccccaactgcatctaacatcacttcccactctatccttcttgaaacttcctcccttcttgacttccttgaagccactttccttcaacaggcagcttgaatgtgagtgtgatggaggcagatggccagatccaggctttctcctgtgtctaataggtgtcaactctaagttattaggcagtctctccctgggctgggatctacctgccccatatagagccaagtcaggttccaatgactcctcttttattgctgatctgggccagactcacaaaggcctgtgccagttgctgacagtgtctgtccctggaggaagaaagagcagaggtgaaagggtcaggtatgggggtcagaagggaggccaggctggagaccgtgtgaaccagggagccccgggggactagggtgggagctgggaaggccagagggcccctgtatctgcagggcctggaagtcagagttgctgaggatggcttctcggagcacagccatctctgcaaaaggtacatagtctgctcctgggggtgaaaaccagtgcagatgtgggatgcaggtaggtgggtggtggggaggtgggctgagggagcgcgctagtcctggaagggatggttgaggatgggagtgccttcctgcctggccttctgactacagaccctggaatggccccctgtcccaggtttctgcctcaccgcgaggccttcctcctcgttgccgggtcttctgggtgtcaaagaaagtctcgtgttcctcccagcgccggtcacaggccgcacagaggaaattagactcaaaacagccgcagcaacagcctggggcaaaagtgcagccaagaagagtttaggaaatggtggtatccccaggagctgaccacattctcatctcttcctcagtgactgcatgcccaaggctctcatacctgctctccatcattatccccagattgcatcctatccccacctaccctgctcccaatacacctcttgccctagaagttaccatgatgcctgcagggatggggcccagtggctgcatgttcttcgtggctgtgtttgcagcgacattgggccctccaggccttggggtcaaaggtggcccgtctcttgagccagaactcacccacctcctctgggcgtgatgggataaagcagaacatgaagcagcggcactggcttaccttgcagggcaccgatatgtctgtgggattggggatggatggtagggttaatctgataggaccttgccttctcatgccaaccccatcctccatccccaccaccccctatgcacgcagacatgctttttttttttttgagatggagttttgctctgtcgcccaggctggagtgcagtggcatgatctcagttcactgcaacttccgcctcctggcttcaagtgactctcctgcctcagcctcctgagtagctgggactacaggtgcgtgccaccatgcctggctaaattttttgtatttatttatttattttttagtagagacggtgtttcactgtgttagccaggatggtctcgatctcctgacctttgatccacccgcctccgcctcccaaagtgctgggattacaggggtgagccaccgtgcccagccacatgctctctctcatacttcccaagacatgacagagtacagttattcctccacactcgagaggggctggtcagttctcccctacctgagatgatccggtgctctctcaacaagtgtccacaaaagcatctggactcatccccaatccggaaacagtcccataggtaatgggggcagcgccagccaatgtagagacctaggtatgcaggattaaaagtgagaagtaaaaaaattctaagctcccccgaagtgttcttacctatcccttgatggaggtgagggggtnnnnngnnncttccttctccccacccccaggtatctttatctccacctggaagtcctcacctctaccccttagattttctttttcctcagggttttctcattaccccagaagtgtcttcagttctcttcctacccaggatctactccatctttgtcagcctgccagagatgactcaagagagtggtttctgagcaggaagattatagatgaaattttgtttgaggatgaacatgaatctcactgagttctctgtgaccacagggattctcatctcctctcctcatcccactaaagcccaactttgctttgttttcttgaagtgtctaaggtgagggaaagggaagatgattggccagatgtacagacaatgggattggctcctaaggagcatatttattgaaggtcctgaagaggagaaggaggttggatagctctggtgctggaaggtaggaggagggcttcctctcacgtctccacgttggtaccttaatacctccctctgtgttcctggtgctattgtaccaatgctctctgtgtacctaagaagggctgccaaaggttcttcaagggtcaggagaaaggggtaggtagcagtcatgagtggtgaagaccaaaaattatatattttgaggctaagcaaggaggcgtggaaaggaaagtgaggctaagaagtgtccctgagagtaggcaccagcaagaggtcacaaccctcgagagctggtgttcagcagtgaggtctgaatccctggcttcgtgactagtcttgaggtgagggtggtgctgtgcaactgagggaggataaccagatggcacctccaattcagattttctcattctccatgagaactgagagtaccccaacttctagccaagaatcctgtatgaggccccatgcagtgggactgccaggtgtaggattcttagtcccaattaaaggctcaactgaaatgtcacctccaccaaaaaggtgtccctgacttcccctgtctgtctgggcccctcctattgccatccatagctccttgtgctactcctgttgcagtacactgcattataatagatcattcccttgtattcctattagtccatgagttcttcaagggagctgtcttttcacccgtatctctcatcctagcacaaggcctggcacaaaatggttgctgagagaacgtagattgcctgattaaacaattgagctcattccttcaagaggaagagagagccagtattcaggcataaccctgaggttccataacatgaataaggagagtggcatcatctggtctttgactgtggtcagggccacaattcacaattccgtgcctcagattaagttttcttgtcttacccatagtctgtcaggatctaaagcctgtctagatgtggcttttggctttgcttcttctgtcttgatgctgattgcctgtagtgccagtgcccccttacaccagggaggctttgttgagagagcaaggtataggcagtcacaatgcaggtgggcgggagccaggattccactagaggagttccgaattctgtctggagtagcaggatacattaaaaaagcaggaggtgaggcccaaagatcaaggcctgctcggagggccggggggcagtcaagtccaagcactagtgtaggaatcagtgcccagcattcagatgaagaagactggagtttgaacagggagactggcaactatacttcagattctgttacaagtgttagtgctcttaaagtgggacaattggaaggtggctgtggattccagtgggaccctctactctctgtcctgattccaaactcccttcctgttgtgggtggacaaggcctggcgggggaggagacattatttgggatgccattttgattctgtctaacacagtccagttccacaatcacataatcacatttgcatgatgacatctctttatgcatagtatgtctccataaaacacatggctgtctttacaggaacaatgtctccagcctagccctctctcctgagcttcagacccatatagccagctgtctactagactcttgggccagcatgtttcataagcacttcaaatgtcttatgcccaattattccctccaaacctggctctcatcctttgtcctctgttcatccaacacatgcctaccaagcatctacccttttctaggcattcagttaatggcaccattatcctaccacttacttatgccaaaaactggtggcactccaggcatttccctctctcttatcctatacatccactgttccaatggtcagtttcactttgttagcttttcttttcttttccctacttttcttgtttcttttctttcttttttgacagagtctcgctctgttgcctaggctggagtgcagtggtgcaacctcggctcactgcaacctccacctcctgggttcaagcaattctcctgcctcagcctcccaagtagctgggattacaggtgtccgccaccacacccggctaattttttgtatttttaatagagacggggtttcaccatgttgtccaggctggtctcgagctcctagcctcaggtgatccaccccttggcctcccaaagtgctgggattacaggtggtagccgctgcgctcggcctgttagcatttcttgaacctgtccacttctctccacctaagcccatctacttctttcctggttatgaccagtgcctcacaatgtattcacttgcctttccatacctcctctcttagcctcacaactccagtcttgtctttctccagtctaccctattgccagagtgatcttgcagaaacagaaattcgttcatgttattgtcctacttaaaaccttctagtgactctcagttgccctcaggatataattctagcttttaacttggcacagaaattcctgcacaattctgcccttctagagcagagtgggctcttctccccaccactctatgcatcaggcatagtgcattgctatagattcctgctgtgccttgccctgtcatgtctcatcttacagcactctttacttggccacctcttcttactcatcttacagatatcagctgagaagtcattccttccaaggcttactattcctcaagcactccagataagatgccccttttttttctgctcatgcagcagtctaggataaccttgattatagcaattattagagtgaattataattgtccttgtacttattggtatctctcattagagtgccaagtattttgtctttgaacccccatcagcattaccacttccatagctagctcaatgcctggcacatagttggtgctcaataaatgtttgtcgaatgaataaaaacaaaggttacacttgatatttctgtacacatcacatatactgttatggactacccaggactcaacatccccactattaggaggggacctcaaatataattgttcggggttgaatgacatgaatttctttataaaacttcctgtttaaacaggaagatgaagaagttcaatttgaagaagaaaaagaaatacagtgggcttgaggagtagggagtagacaggaggttctgagtaggggaataagaggactgaacacatcctgcatttttttttttgagacattctgtcacccaggctggaatacactggcacaatcacggctcactgcagccttgacctcctgggctcaagtaatctgcccacctcagcctactaagtagctggggccacaggtgtgcaccactatgtctggattattttattttatttttgtagagatagggtctcactgtcttgtcctcactgtctaactcctgggcaattaagtgatcctcctgcctcagcctcccaaagttttgggattacagatgtgagccaccttgccagccagaatttgcaagaaaataagagtaaccgaatatgttaacataagcaaacaaagttggtggtggggcgggagggcaagggtggggaggtggagggtccctgcatgggaaaggggaaagtaaatttcatggaggagggataagcatttagaattacctgcttgtctttatgttttaggcctgtcatcgtagctctattcccatcataaagggaaaggaagtatgaaggaccaaaataaatgtcataacatctattgaattcagtctagaaagaccagaatccttatagcaggtcagggtggccctcttactgaaggtaatccctatagacatgaatttccataacacaggtaggcatgctcatgcataggatggcatgtttttgcaagttcatctgtacgcagcatgccactaacaggactgtcaagagtactaatcacaggctgaggcttggaaacagcagggccagaggacacaggtctcccctttggtaacagaactcaaagcttttgggtacccagcatgggcctggcatgcaggggtgacagccttttaatggagttccaccaaagggactaaggtctttgtcatgtcagaacagcaagtctcctggggactgtccagggtcctgggccatctctgctttagggtctgtaggctctctgggccctatatctggggtgggccatgacccttctgtttttttttgttttttgttttttggtttttttttttttttgagacggagtctcgctctgttgcccaggctggagtgcagtggcgcaatctcggctcactgcaagctccacctcccgggttcacgccattctcctgcctcagcctcccgagtagctgggactacaggcacctgccaccacgcccggctaattttttgtattttcagtagagacggggtttcatcgtgttacccaggacagtctcgatctcctgacctcgtgatccgcccatctcggcctcccaaagtgctgggattacaggcgtgagccaccgcgcccagccgacccttctgtgtttaataattttagttcagctacctgtctctacctgggctttatatgaatctccccactttttgtctgcatccacccttgtattccttggcccacttgcctgctccttttccaggcaggtggtatagccatttccaaaaggggaagctatctgctgaatgttcaggttcccagatcttttggattagaggatgcccatgggcctgtcacaggcctctgaaaggccacatgggctcacctgtctggatggcattcagggctgcatccttctcccactggaaaagattgttcacttgagcaccaaactcctctctatgcattgccttagccacttccaccagctctgtctgcctagcagggaacactgggcgggctgtgttacctaggatgggagaggatgagtaaccagggggaagtgagaaggtcctaaaactaagagaaggggccatgtccaagagtaacccagtctcctcctcctggggcaagtcaaggacagtgaatagtagtgagaacaggacaggggagaggacaggtacaattacagctaactcctttcttcttcttcttcttgcctagttggtgtccaggttgggctgtgtgagcagtgctgtcactggcatctactcccttttcaacctctcctgcttcttcctcctgcttttcggttgtgtccacttggacctgggatgaagggcctgaaagacagtgttctggaaggctctcagattcagagagatgggtagacctccttgtccatgggacctcattggaagaagactcagaggagaggtcttccttcagagtatcagaagaagacagacagacatagtctcgtgattggggaggaagagtaaggtgtttctctggcaccactgagatgggactatccaatgaagcctcataggtaggggtctctgaaggagtctcagagatggaaggctcctgatgggtttcaggggaatgggcctctaaggggatctgggaaggggatggcaccaaaggggattcagaggtatggggctctaacggggtctcagaggtggaaggcttcaagaagctttcagagatatggttctcctgtaagtcctcagcagaggggtcctttgaaggggggtgcttctctgcatccatggtgatatgaggctcttctatgatctcatgtgcttccatctagtggtagaacagggtacaggcttcattaggttggaaatagagggccggcaagtcagggcagagcccagggttcgcagtgcattatggaatttggataaggatatcagtgcagctgagatataagagggaaacaacatgaactctgggtcctagagtgtgatgccaaaaggttcacccatgtgtccagacctcatatggcatgctgctgtggcttgttagggagctggaacttaaagattgaaagactgaagtagttcgaatcccatcagtagatggtagcagagaaccatgtcccaggagggagtctgaacaacaccacttgggcagtccaagagcagggtccttggcatatcttaaaaccctggaggtcagaccatggagttctagagactggcaataccaagccaaagttggggttggctcctgagagtgcaggggaatgctgtcacataaggcaagacactgcacgcagcctggttttgtctaggcaccacacacatcctcctcccttaatgatgtcattcatgttcaaagctttaactacttccagttgtgtaccaatgactcctaaattcacatttctagctcagacctttttcaacctctgtacttcacactcatacccacctgcctgctggccttctcttctcttctctttttgtgatggagtctcgctctgttgcccagactggagtgcagtggcgcaatctcggttcactgcaacctccgcctcccgggttcaagtgattctcctgcctcagcctcccaagtagctggaattacaggcgtgtgccaccatgcccggctaagttttatatttttagtagagacggggtttcaccatgttggtcaggctggtcttgaactcctgacctcaggtgatctgccctgcttggcctcccaaagtgctgagattacaggagtgagccaccgtgcttggcccctgctggtcatttctaactgagtgtttccacagacagcaaaactgaactttgggaattatcctagtcttttccttttcccttagactccatcttcaaataggcaccaataactctatttcctatcttctaaatattccccaaatgcattctctcctctcccttccaattttattcaagttctcatcatcttcagcctttgtgtaataactttgcccctctacttccatccacagcattttaatccattcacccattctttcatggatttatgtaacttatacttttacaatgagcctaatctgatgcttttactgacccgctgtgctaagctctagattgagttgagtctaggagagagaccgattaaccaacaatggcaatacaaataaattgatgttgttctggggtgagtctaggatacggtggggagggggatatacctaatttatcctgcaaggatgtagtcctccttcctgacccaatcaggatctttctaaagtgcaagcccaacaactggcactttgtggcttaaaaacattccatgactcagtctaaaggattaagtccaaatttcttggccctggcattcaaggcctgtcatcattttcaacacagcctgaggattcctgccttaactttccgtgctccctactttacccccatgttccagagacgctagatatatcactccttaaatgcatcagagcctttttgaaggggatgtttgggaagggaattaggggcagaggtaggattacagggaggaagatgaccagagtcagctagagagaaaaggggcctaagagtggagaaccagaagatgggaggtgaggaaggggaaagagaaggggaggaggaaattgggtggaggaggagagtaaggatgaaaagtacagaatgtgggccaggcatggtggctcatgccagtaatcccagaatttgggaggccaaggcgggtggatcacttgaggtcaggagttcgagaccagcctggccaacatggtgaaacccagtctctactaaaaatacaaaaattagctgggcatggtggcaggcgcctgtagtcccagctactggggaggctgaagcaagcaaatcacttgaacctgggaggcggaggttgcagtgagcccagatcgcaccactgcactccagcctgggggacagagcgagactctgtctcaaacaacaacaacaacaacaacaacaacaacaacaacaacaacaactacaactactactactactactactactactactactactactacaacaatgtgaagggactgaggggtgggagaaagacagatgtctttgggggaagagggcaagggccgttggagaaaccacctaccctctgggctttggcttggttgttacaagtccttaggtcaagaccttgacttaggatggcagggggaggtgttgatcctcagggaggaaaggctcttggttgtggatgtgcctcagctgcaggtgctgagtgttgaaatgccttgcctgaaagtctgctatctgggaaggggacttggatatctgcagaacttcgcaaaggagctctggcatgacctggggaagtgggtagggacaaggggtctagggccaatgagggagggtcttgactgaagcctccggaacccgggccaggagagtaggcgccggtcaccagggcaaccggaacgcctagtagtctccgtggcaacggcggtctggtcacctccccggtgggtaaggtctcctgaggggcttgcattgggcctcgagggggcgagcccagagggtttacttctgaaaagtggggtgtgtgttgcgggatctctgtgagcgagtgtttgggtaggatctgcggagatctgtgcgtacgtccgggggagtctgggattgtgaggatagggttcctttgagacatctgtggggcggtcgttgggggctgtgaggatctgaggggacctcgggctctgtgcttggggtgagaaaggcagggtctcgggtagctgaggcgggggcggagtctgtgtgtcctcgaagcccagcaggactaagttggggaccaatagagtagggcgggggcgggctttactgacagggaccaatcgagccggccggggggcggggcgtcacgccgacgtcaagtcgaggccgccgccgcggggcctggttatcgccggttcagcgcagcccggagtcgcccaggcctgaactcctacccaggtccccggcccccgccccgggcccgcgaggacaccggaggccaccccccgggggtggggagcggagccgcgggtcagctctgcgagcgccccgcgctggcctgtccggccccgcccccgccccgggccatggcccagcccttgtcccggcccctcgtcctatcccaatccccgccttggcccccagccccgccctcgccccgcttcccacatcggccccagcccctgcctgggtccccatccaggacccccttccagtctctgcccctggcctggcccccatcccggcctcggccctcgttccaccccctgtcacaaatcccagcccaggccctgtcccagccccattcccagtgtttgcttaaggccctggctcaaccccgtcccttgctgcagtccccatcacagcccttccttccatcccactccctgcccttgttcaagccccagtgtccagcccagcccaacccattatctcagcctttgccctcatctctgtgtttacccaagtctctccctctagtcccccctatctctcatactctgcccctctcccagcctagactcaagtctgggtttcagctgccgccagccctattgctgctgttgctgttctctgtccttggcccaggggctggtgagtgcagaagcagggaagattgaggcaggaatggggttccggcagggaggggtgggctggagagattcaggagaggtgggacctggggaactagatcattggggagcaagtgggagaaatagagagtagagaggtcttacacaacagggattggcagggtcaaaagagtggtaattaattgggtttgaggctcagcaggtggcttacagtttctagcacagagactccaagattttttctggtgtctgtcctgaccccactttgactcttgcttttccagggaaatgttgtgggctttgctcctgctcacaaagtttgatgggggagagacagtcccacaccagaagcccctagtgtagtgtgggaatatatagcccaaacctttgagatattgggcatgcattcaaacggcatgaagaagagttttaaagataatatgtagcaaatagatgaatatggattagttgccattataatgagttttcttcttgtaatgattcttgttccaaagaagattgatttgcctaggaataattcctgatacttttagagcagggctgaaactcggaggctattttacagatggggaaactgaggctcagggagggagcaatttgtccaaagtcagagagcttgtgaatggcagtgtgctggggctagaaaaaaggtttcctaattcctatttcatactagtgtgttttttttttatccactgcaatgtatacttaatagaaaaatagacccaagtggggaaaggctcaaagcataacctcccttctccccggtctgcccacaagggtgctttatccacaaactgttccttatttgccaggcgtcagccaagggccaccctccggtggggaagtgacttggacagaagagagagaggtccaattttttaatggttggaatgtgggaggaggagggggtgtcctggtctaggggatgtgccatgaagatggctccatcatggagtgactgtagtcttcatggcccaagtctgtagccacctctggtgggtgtcactctagataggatggagatgtgcctgatggagtctttggaaataacagccaacagagcagctggggggtggagaatgggtatcagtgagctctgggggcctggttcagtgtacaaacttaaggagacgaatgcacgtgaaaggtcacaacccctgcagagatgtctggtcacttatgtgtatgtgtgtaactgagggattgtggggaggctggcagcatgtgtacatgcttgtgtgttgttaagtgtagacacgtgcatgtgtgtggggtgcatgtgagccagtgtatcttctgagcgcctgtgttatggtatgaaggggaggggacatgttgtggcccatgtacattcctcttcagctctgcctcctcctcatatggacagatcactgaagctgtgaatggggctggagaccctttctcagcagttccaagggtgagggcagtgttgcatgcctcccataacgaatataagttatccatccatccccagccagtgcctttgaaggaaggagctgtggaggcactctgtgttgattactgctgctggcaaattggacactgggcagaggcagtagccagtcaggttttcagttttggtaaggggaagtttatgctgttgggccaagttcctagcttccatcctctgccatcatggcttcttcatgtgcccattgagcaagcattgggctggtgaggggagcagggtgaccgacagccacagagcatatacagctgaaagttgtggataaaaacactgttgcccagaagcaggttcaggtgctttggggagaattgtaatgaagttggaaaagagtaccaatacacccaaatggaggcagggctgcctttagtgctgttaataatgaatgccttggcaattttggaccaaagtacagggtgctctgtgacctaatggtggtgatgggttttgtctgaggagaggctggcagtgtcataggaccatcatggcacagggctgcacagtgcttattggttgcttcggtttcatttcaggaatggaagttatctcttgggtctagtggtcccactcctgatccttggatcttttccttgggcttagttgaggactcacacgtgccttgctattcaaaaaaaaatgggcttttattctacctagtgctattactagcagggccagcctcagcctatgtgtgtaggtgtaggggtgtgtgtgtgtgtgtgtgtgtgtgtgtgtgtgtatgtgtatgtgtgtatggggtgggtgatggtcggaattaccctagcttcatcatagaaatattggggaacctggaataagttcatctgaactcggtaagggccttactcatgcttcttctggacacagctctggtaggccctgttcaaaccgcaaaccaaagtttggagtgaatggggctgtggaccctttctcaagcatctgccctcagaacttcttccaagttcctcctagcattcccagctgctgctcactcctttatctcactggcctattctgtgacctctgtagcccctggccactgtggggatggcttagctagttccccagttccccaggccatactgtgatcctttgaattacaaggatctttgtgcttgtctgtccatgtttcccaaaggtcattaaactgcttttcaccactagccctcatctgagggtctgcaccgagggactgaccaacatttctcctaacggtagcaatggttgatcagatgacccatccctggtaccagctttgaggaggatcagcccttccctaaccccagcagaaggtgcgctagagttctgatttcttctaacaatagtatccaggctgttcacctcttagccttctgcctcctacttagcacagctagggttcctaggaaacccgtctcttccatcagtcggtcccatttccctttatccctctcggctgcatctctatcactctctgaatgctgcactggtagcctctctgggttcctaggcagtgctcagcttgcaaggtgacaggttttccttcctgacagttgagactgatcatgtggtctgaactggacagactagtccttgagtgtaaccgtggcctccaatggcccccacctatgtagggcagctctctggggtgactcctggggttgctctggttcagtgttcgtccttcagcagcctccccttccctttctttgttatttcaaaaacacctcatttttggagttaatctctcccatctccagagagggagatgattggactaggttagccctgagggtatttcctgcttggctgaaaatgcccctccagagtagtccttattccagccccgggtctgtcctgaagctgctgagttccccaccttctcacctgtcctggaggtgtcatcttgggcttcttttctggctggtccgaagtctccagagcagtcagattccctagaggtttactttgagagaccttgcctgccatttgggaccctcttcccctgtccgctactggttgcctccactgtgacagctattctagtcccttgcctggctagctgctgacacaacttctgctcaccttggctctgctcctgacaatcatgatcaggtatcttggcattttaatgagggatgaccacttcctccccacctcccaactcggcctgctctgaatattcccaaggggcttgaaatccactgggtcactaactcactgcctcactgggcttccctttgggggaacattcccccggcccccacctactagctgtgcattctgacctgggaggcctgatgactctcctttcctggggactctcatggtggcctgccagctcctgtccttgcttttgccacccaagcaggcccctggcagccgtaccacactttcccctcccctctcctgccctgagccagtatacaggcagcgcttgtgaggctgctgagggtttttactgctcctaaccacaggggaacagaaaggggaagaaaatcaacaaggaagttacacagttccatgctgactcccaagccccacaggtggagtttcagcctgctcagtggcttaagacgccatgccaaaatacacacacacacacacacacacacacacacacacacacacacaccttccacacatctgttttttttaggtttggtaagtggagaaaatggctcctaagtgaggaggcagctgtgaagtcaaagggtcttagttttggatttagagagagctaggtttgcatcctcagtttggtctaggtttgagcctcagtttccttatctgtaaaaggagggtttttttgtttttgtttttgtttttttttaaataagattaacgtaaggattaaaccagatgatggctaggtttcagatctgcagcctgaaacccagttcctggctcagaggagagcatttgtggagttgatgctattggtgaggaagactggcatgcctgttgcttaatggaaatgccctctgtcctgccctgctcctttctctctctcctgcttcccaggaggccttttcctgactgattactccacctgctcaccccgcaagctgagtcctttccgctcctttgccagcaccgagctcttccacttccatgttcctgaggacacattcctggctgtttggaacctcatcatcttcaaggagcaagggggaacttttggggaccactgcccagaccaaagtgtgactgtgtgagtgtctgagttaatttcccaaccccacttccaatccctgaccactttccagactaaagtgtgactttaactgacctcccgaccctgaccccaacccgcgtccagattgaagtgtgactgagtgagggccatgacctctgtcacatgaccacttccggactactgtatgactgtgcaagtgcttgagctgatctctcacctgtggcccctgacctggaaccactttgttgaatgtgtcagtatagggaatctatttgttttatcggtgaagagtgacagttcttttctttcgttctttcatttcctgcctcccaccccattgtctgctttcctcctctcctaattctggtcccccaggtatttccggtccggggcaccccctgtcatcaatcccctgcatacacacttcccaggggacacagctgtgcctggggttttctcactgaccctcagctggacactgcccaaccgcacctcaggcatctttaacgtcagcagccccttacctggggactggttcttggctgcccaccttccccaggcccacggccacatctctgtcaaggtgggttgatgttgcccaggctcgggggtccagaactgcccttccatctctgctgaattccccccacaggctctctggcacaccagccttgtgtcagggtgggcagcagcacaagggtggctggggcggggcatggctaaaggccagcaggtcacccagtgggtcagaggccatgatctggaggaggcaacttggcagccccaggaggacatgctgggtccaggtaagctgaagggaaagttgagaatctggagtcagaggctctggcacaggggagtagtgccgcctcctagtggaaggcacaaatgttaatcaaggtgaacagaagccagctatgggctggtccaatctgctgcacacacccaggactggttttattttacatcttgattgacaatagccctgaagactctcttaggccacggcccagtatttagtccatctgggagaatgtattcctcttgcatcataatttcagacagcttcctacacctttcagaagaccacaagagaagctctttcctgctaaaaggaggctttgggcagctagtgtccatcctggcctttgcctcacttttctccaaatatcagccaccccaagcacttatttcacagaggttgttaaagactgaagggcaggttcaaaggtcagatgtctctctggtttggagtggaaggaaatgctgcaatgttttcctgccactctcatggattaggccagacaggtctcctattcctgttcactggaggagaagcagggggtgtgctgagctggctgttgtcagagtgggatggccacgtgcatggggcctgtggtgagggtgaagaaacgagcaagaacagagtgaggatttaaagaagaggactcttagcactcagaaatggggtgaatagtgcctttgaatgagctgagactcacataaggacaagggtgctggcactgctattgtcagagatgggaagtagggctgaggtagtgtctctaggcctcagtgacagggccgtttttcctgagagtgatgtggatgtgcaagagaactccccatcaaggcctgtgagcctgctgaaggacagcatgttgggagctagcttggaaagggccctaggttctaggtaggccttgactctcatcagaactgagggttcttctgttagaaggaatgccttcgtaggtctttggcaaaatcccaacagggatgttctttatcccaactctgatccttgacccactttgtaagaactgacagggaaaatcctcctgaagcctggctctagttatccaaaaacctttctaggtgagcaggaacctagggcctaggcctgggctgggattgtgggagctgaggcccagttagaagtggtcaggattgcttatggctaccagattgggacaatggggaatagagatagtagtgcagagaaaagctgctcagaccctaaagggtgattcaagtgcccagaccaagggggagctgggcagtgaggaaataactaggtctgacatgtgcatttgcatctagacatgggaagcggggcctggggaacttggtaccaaactggaaccctggtcagagcttccccaggtgtgtggtgaggctagacagaagaggaccatcccaccgtgcccacgagtggcagtgggtctggacgccgtgagagatgtagtgcttccatcagccctgtttgagaggttgatggggcaaggatcttgggtctggtccttctaagaattagattaacttctgtagtcttatatggtcctcaaagggttcttcagctctccagatcctggttaatttccaggattccagcctgtgggttaattgtctagagcattcctccatcttctcaacttgtttccttcccctactatggcatgcttcctgtaaggcttgaacacaggaatttatgtgggtttagggttatcctttggtgggaactgaagagtcccagcgataagaaggcagtgtgtttctagggtccttctcagctttggggatgagctcagatctccctttagccttagtcctttagtacctgctttgtgccaggccttgggttgtgtgcttgggacacagagaaaaataagatgcatgtcggatataggaaatgttttaggaggataaaggggagatggctaactcagcttgctagcgtggtggaggtggtattggaaactgttaagcggtgaggtctgaggttgagaaggcagggaagggcattccaggtggtgggagtagcatggcccaaagtttagaaggaactgaagtggctcagtgtgggctggtgttggggtggtaaggaaggtagagggttgagcagaggccagatcacgaagggccttgacatttgaactgtatcctgagcgtgatagggagccctgaaaggttgtaaaaaagaagtgacttacctggtccgggccaccctcgtgaactctagtcccacacttctgccagaccctgtgtctgtgttatttactacgtattcctagcctccagtgcagagtctggcacatgatgccttttcacgtcctttccttgtccctttcttcctatcagccactctgtcttgtccccggcctccatctccttgcctttcctgttttggatcgtgtgttcattctaaggtgcccagttgccagtccgctctggggggctggcctttgggttgtggataccatttggcacccaaatggctcatgaggggaaagtactcccaaatgtctagagtgcaggttctcatccttcctcttcctgtgtctaagatttgaaaaagtaggtaaaataatgaaagcaactacgaggaaagtgaagaggtcgactgtacaggagaaaggattctgttgaatccaccgactaggaccacacgtgactcaatatctcagctgaggtggttagaatctgctaatagtgcagctgcttttcctcctcctacattagtttatttattttttgaataggcaatccatgcacctggtacaacattcaaaaggtacaaaagatatacagtggaaagtaagttttcctcttccattcttccagtctccaattccccgccccagagttaactagtaactagctgttaactagtcccctatattactcttttctttttgaaacaccttcccttcttggcctctgtgactttacagaactgtcctggttttcccactgcccactcctctgtctcctttcctggcctctcctctgcttgatctccaggttgtagtggcccaatgcttggtcctcgaacaattcctttttcacttttctattctcttgcttggtgttccagcacaataatttaaaataccatctatatgttaatgcttccacgagtattcagccagtcctaatttctttgaatctcagactatatcccactgcttacttgacatctccaactggatgtctaagaaatgtctcatacagtatttagtaaaatcaaatcaaagtgaagctaaaagtataaaactctttaatttccatttcactgctcccagtccatgcttctttctctagtcattgtgatcttcctcaggaaattgtactgtcatccacccattgctcaagccccaaattaaatgccccaaatccttgatttttcttgtctccttattcctcacaaccaatcgtaaagaaaaagtcttgttgacgctacttctgaggcatgccctgaaggcttctccagctcttcatttccacttctagcacagcttctctgctttctccagggctaccacagtagcctcataagtggtcttcctgctttcacccttgccccctgaaatctgtccagcactcgtttgcttctacactgattggtgctttctgcctctgggcatgggctcagctgtgcacttgctattcccgcagagaaggctaagtgtctttgggcatcttcagtctgcaagccccacccagagcctggcactggccagcccactcaggcctttctgaagaaacccagcccatacatacgaggacattgtaggaatctatctaccatgccttagactccaggatctttcagcctgtagcccatccacatctcacttttgcctctcctagtttcttgagcttccttgcctgtgccctgggcctccccgactgctgatgttcttctggcctcttggctcagctgggactctctcacctggtgtctgccctggcagctcttgaggacctgacttccggtgctctttctctggtcccatcactgggtgacggttccctgcatcttccctggtctccactgactaaacactccctctgcatgaagaggggggactggctgtgcacgttacacagttgaaggaaggagcatgtcttaaccaaacaggtcatgtccactgatctttcattgaatcaaacgcaagtaaaactccaaaacgtggagcaaagtgttccttccctggactgtctagcaaggaaatgggccaccactggagcatgagcccccacccttgggactcattcactacaagattattgtggtggtgattcttgccataggaggtggggtcagtgcagtgacttatgagagtcttttggttcttcgggtttgacaccaaacctgagcatctaggttggttcaggagctctctgaagggaccccctttttgacacccattctttaacagctattttagcacctagtgtgtgccaggtggtgtgctagacactggggatgcaaaaggcacagaccttccagccttttggagctttgctggaagtcagtgccttggctggcttgttctgagccatggaactcagtgggatgtcagggcctggaacttttgtcccagaacagagtttgaaggtatgtcctaattaggagcccccacctccccttaactgtgaggtctgtagggctcatatagctgcacgtgctgcagaagaggaactgcgacaaatgggactgagcttactggagagtgatgaggctctgcgagccatggggtgtcaacagagaaggagctggggattttctccagaagagaagctgggggagacgtggttgatctcctttagcagcagaagaaacacagtctgaggctgagggaccagacggatcagtgggtcccttgaaggcagagttggggcaggggcatcaaagatgacaggatttggctttagcaaggtcagcgcttcccccaggtgggatgatccatttactgattgattaattcagcaaacattcatctgtgaggtatgcactctatgtgaggccctgtgtctggaggaacaaacatcaaataggacagggttcctgttctcaagctgcttatagtctggaggttgcctgggaagtaatgagtggccctgcactcattacctgtgtagggcccgctcattacctgggtgtaatgagtgtgaaagcagaggctggacaagcacgtgggagcggggcagggtgaggactaaaggaaattaaaggttgagattggtggcggggagagtgagggggctggattggaggccttgaaagagctttccactccaccccactttgcctaaaagagccagtgttctaagttcctgagcctgctcagggaatgggctggttggagatcacagtgctgctgggctggcccagaatgctcagggggaggggttagattgggagaaggggcaagccaggcctgattgtcaggagggcctgggtttgaatcccaaaacctcagccagtgctgaggatcccagcagaccttgcagactgaggtgggacagagatgaccagaaatgactgctcaggcaggaaggacctggaatttagagagacctgggttagaggcctgggagtggtggccggggcgggggtttctccccagcccgcccagcaggttctgtttgccttggtttagtcacacccctgctgtctctccctctcctgccacccctgcttttgtcccagggtctccaggatgagtgtcagtacctccttcagccgcagctgattgtccggcgtttgctggacgtcgctgtgctggttcctggccggccctcagagcaaaccctctccccacacaatcgctcagccctgtacaagtaagtcaaagactccccacacctggtcctttccctcttctgtggcctcatacaggctgcagggttctctcttggcttctccacctacctgcctggtccctgggtgggatccctgcctccctccctcccagcacagagcgggagacctgaacaggcctccttcccaccctatgccccctccttcctagtgcttcccttgccctgtgttcctctcgcctctgtttgtgccttcttacccccaacctctcctctgcccagggtctttgtgcccagcttcacttacagggtttcagcacagctggtgtgtgtggggggccgtggggtatctgcctgccccctgtcactgcgtctgcgtcccaaagccccacccctgcacaactcaagctctgtggcctgtggaggtgcctcaggatgccagctggagctggcactgcccccctgggggcactgggtctacgtgcgtgtggaaacatcatcccggggccctggtaggaccatccgcttccagctgtgtgtgcagttgcaaggtcagaacccctgcatttgccccagtctgtgtagacatctgtggttgggaagtgacttgggtggctgtgttcagtggccctctgccatatccctacaacctcccctccccatcccaagctccttcatgctccctgaagccatcacacttggagctccaagttattggaaggcctttagataattttttttttgcatctgacttgagacaactaaaggacctcattactttctttgatttaatctctcagtttcctggggtaggcagggacatccaggacctctgggacactgtccttgccaaagcccttgcaagtcagtgagacagcctctcatacttagtatctgtttcaatagtgtcttcaatgcctttagggagggatagatgacctcagttccctccagtgtggtattgcattagctgtcaccattaggaaacccctataaacctggatgccccacactcccaagggacatcgcattctagttctcatccttccccactctttgcgaaatcctgtctagctcagatgtgtttatgagtaagttcaggactgtaaaggctgcaggcccaagctctggtttcctctgccccacagagtgcccacagcccggcctgctccgagccctggtccctggagctgccatgaacatgccccagtccctgggcaaccagccactgcccccagaaccgccatcccttggaacccctgcggaggggcctgggaccacgtccccacccgagcactgctggccagtgcgcccgactctgcgcaacgagctggacaccttctctgtccacttctacatcttctttggcccaagtgtggcccttccccctgagcgcccagccgtgttcgccatgaggctgttgccagtgctggacagtggaggcgtcctcagcctggagctccagctcaatgcggtactctttatggagagtggggaggttgctctgccagggagcttgaaggggaaggtgtcaggggtgttggggtgtttacctcctccaggaagcctgtccaggttgctcccacccatcctgacaattagggaccatggcttagcccaattctggtcaacaaacatgtcctgagtattcactctgctacagatgggcgggtcaaccaggtcaactcagtgtctggggtttcccagttttgtaggctcacttcctgctcattactggcctttcactacggtagttgttaaccttttcttgcaaatctcctttgatggggagtttaccacctcttgaggccacacagttcatgtttggatagcgctgattgccaaaggcattcctgacatcccatcaaaatctgtctccatgaattttttacccactcatctttgattcagtgggtaaaagccatatccagaagccatttccagtaaatctatctctgtcctgttcttttttaaagcaacagacttaattttttttagagcagttttaggttgagcagaaagcacaaagttctcatatacccactctctcacgttttcccctattattaatatcttacattagtatgatatatttattacatcccagtcctatttttacagcccttcagatgttacctgcaaccacccaaaagctgaagaacctcagtgtcttaggggtcttggtatttggatctctccccttccttcactatctcacctggtcatacttctagtggtcactgtgtctctgaaataagtgatctgaggtggtcggaccggggtaccaggtaacaagacttgcatttgtgctgcctgagattgagttgcctttttcagcagctgcattacactgtgggatcacctagggcttgtggtgaactgagatccctgggtcttttccctttacttcctttgtattttcttcaaaccagttgtatacatttacttttttattataagagtaataggatcacataaaaactttggaaaataggggaaaatatctccctaatgcaactgtttaaccctttttttttgagacggagtctcactctgttgcccaggctggagtgtaggggtgtgatctcggctcactgcaacctccacttcgcaggttcaagtgattcttgtgcctcagcctccagagtagctgggattacaggagtgcaccaccacacccagctaattttttgtatttttagtagagactgggtttcaccatgttgcccaggctggtctcaaactcctggactcaactgatccgcctgcctcggccgcccaacatgttgggtttacaagtgtgagccactgtgcctggcccacagctgtttttggtttatgtcctcccatgtcttttccacattaattactttgtttatctagttgtaatcaaggggcatatacattttggtgccaattcgcatcttgcatttttgcagtgaatttttgaacctgaatggaagaatttatgtccctccttgaggtattgcctaatactggtttggaactcgggccttctccactttgtgtaattcacacacttgcaaagccaactttttgtacttcttagtcattactgtcagcgttaagactgagatgagggcggagccctatgttggcccattagagaatatcttcagcttagctgttccctgagccagggatccttttaactctactatcctccagccctgagagcagggaccgctttcccatcagccaacctgaggcctggtctgtggcttcatgtggtcttttatgggacacggcttagaactttctagtcgtcctgttagagccatttattcaacctgaagatatttcttatttacataatcaaattctctctttgttctagctaagactgtatgtattttgtgtttgcttattgccatgcctctgggcaatgacagtgagatcttgattcgaccttgaaaccgtagaccctgaattagaggacagccttacgcatacttgttctttcttcctcagtaccctgagaatagaagcctagccctcctgcagcccctcaccctttccctctctgcattcccatccattcactttaatgagcatctgtttacattccatccatctgcattctatgacgcgtgctaagcacctcagcctgttctgtttattctgaaaggtatttcctccaaatattttgatttttttttctccccttggatcaagaactggacatttggatcagagaactgcatatacttttttctttggctccctcctagaaagactttcactgagtaatactttggcatattgccccgggcttgcattgaaggaagttatataaggaagttgtatgaaactcactcttgtggctgaggacaggatgcatgacaacacacagtgccgctttgatgagaatttatctcagaacttcccctttggatgctgtgattctccagagactctgattagcttttatattatgtagttgcaaatctggtaactcatgatacttcctttgctttggttgcttggaaggcagtatcaaatatatggcctaccttagggacagactttattttcctgtcctgatttttaagtttccctcaggcatttattatattctattttatgtaagctgcctcaaatccttcttgaatgaggtgagcttatggcatcctgttgcctttattcttgtagacaacaccttacatttactcttgcagatatctggtttcttttaatcccagccaggttgctacatttaatctcttgggcattctgttaccactgttcagtacctaggatcatttcacctgagttggagtgagtgtcttcatgctccacctgtcttggggtccaggtgaagatgatgggaaaccttacaattgcctttgtccacaattagtttctataactggcaacagccctccttctccttaatgagctagataggactgaaaaagagggtgttctctcttgcttggacagaattgaaacacttctgcccaaagaacagattcaaaattgggccttgccgtctcatcagtccttgaaagatttctgctgtggaggatctgttgtttttcagtttttctgttctgagaatggaggtgagagagcagctttggcgtggagagcgccgggaggaatgggctgtccttggaaggtgtgggttaacaggggtgggagtctgagggtggcggtgggtggagctggaggatgtggcggcctcacttccatacctgccctccccagagctccgtgcgccaggaaaacgtgacggtgtttggatgcttgactcacgaggtgcccttgagcctgggggatgcagcagtgacctgttccaaaggtgaggtgaggaatgggggaggagaggaagctgcagtgtgggggtggtggtggcgggcagaggtgaaggtggggagggatggaatggaggaatgataggctagggttccgggaagtgggagcaggtgggtgagggttcttgggttctgacccctcctccctctcactgactccttccttctcccttcagagtccctggccggcttcctcctctctgtcagtgccaccaccagggttgccaggctgcgaatcccattcccgcagacggggacctggttcctggccctccgctccctgtgcggggtggggcctcggtgagcggtgcggggcggggccagggctgggaccgggacttggcgggggtggcccggggccccaggtgactgcgagtttgtgcgcaggttcgtgcggtgccgcaacgcgacggccgaggtgcggatgcgcaccttcctgtccccatgcgtggacgactgcgggccctacggccagtgcaagctgctgcgcacacacaattatctgtacgcagcctgcgagtgcaaggccggtgagcaggctggcgagggagcgggctgcggtggactggaggtggacctgctgggcctgtgggcaggcggcgggagtaggggagtgcgcagcctgaattggggacgggtttggcagagccggggtgagaccaccctccacaagctgtggcgtaggcccatagctgccgtctgttctcttccattctgtgccttccccacccgcagggtggagaggctggggctgcaccgacagtgcagatgcgctcacctatggattccagctgctgtccacactcctgctctgcctgagcaacctcatgtttctgccacctgtggtcctggccattcggagtcgatatgtgctggaagctgcagtctacaccttcaccatgttcttctccacggtatgcggtggtgtctgcatcttatcactgggtgcttgtgcatggtggtgggtcacagtctgtatttccaccacgttctccgagggtttgggaatgtctgtgccttcactgtgtcttctacagacagagacagcagtgcttcccaaactgtcatgcatagataatggtcatttttgtaagacacattggagtaaatgaacaaaactgtttgcaacttaataaagtaagtttgggcctccagctgttccacactctgtccaccctgagggctgaggggacctttactcaaatcatgggccaagaaactggcctaaagtatggatttgtgtctgcacagtcaccatgttctctgtatgggggcaggaaatctatgctttcccccacacctctgcacacagtgtcttcatcttcaccacattcttccatgatatgagagctagctagctactctgagctccccttctccgtcgcactggggacctgcacatcgttagcacgttcgttcctgtggtctgaaatggcgttcccattcagtcaccatgccaccttgatttctcatgagaactttggaaagatagaggggatctctctattgggggattataggacaatctgactctcagagtcctgagaagctttacagactcaactatgtcctgaggcattgtcggaagtggcagtgtcatatcacatcccagctcaaaggagtgcattttgatgaagattaatatagtttaaaacccctccattcccattgcagaatcgccacaatctctttcctgtgttttcctcactcctccataatcagaaaagttcattataagcaagcgtccagaaactataaggaaaggtagagaagtgagcctgctaatgttacttaacccccaagtagactttttacccctgaagtgtcacatctgggaatcttttcaactcatctctaggctcttggcaccatgtgacatgcatgtgagcactgcaaaaactcttagatggtttcagactgctcaggccttgtcagcaaggatatcacagaaagcaagacaggccttcctggcatcctgcattactaggtcagacatatgtctaaattagaaaaatcatagttctcatctgggagaaagcaggggcaaatgtgctgaaactgaggggcctgggtcctcctggagattcatccagagatgaggaagaagaggctgcaaccatgctgcagagagagatcttggccctttaagctgggtgagaagcatataccccagttttgcttgattggcccctttttaggcctgcccccacagtgcctcattctatttttatgttagacactgtttctctttcgtattgccagatgccctttctactgtggctcaccaaatcctccagcaacagctgttctaccagcccactctcggctacatgcagatcgaatgtgattcataattagtaagaatacctaagtgtgtcaggagcctgaagcatgtagggagagcatattcactctctggacttgacacaagtatcctgattggctccagagtgttcagtgctagatgactcttccttatctggatacagtggctgtcagcctgaaaagaccttccctgtagcaggagtactaggagagcctcaagtgcctggcaccacataaaaagctcccggtttctttctttgttttttttctttttttttttttttttgagacagagtcttgctgtgttgcccaggctggagtgcagtggcgcgatcttagctcactgcaacctccgcctcccaggttcaagcgattctcctgcctcagcctcctgagtagctgggactacaggcgcatgccaccacacctagctaatttttgtatttttagtagagacaggatttcaccatgttggccaagttggtctcgatctcctgacctcgtgaaccacccaccttggcctcccaaagtgctgggattactggtgtgagccactgcgccgggccaaaatctcacattttcttaaataaggcaataaggaaaagctactggctttgagttgttgcctaaagtcctgctctcactcctgttcttttccacatgggccagaacataaaactatgttttctgttttccctgcaggttctctgtggtccctccttgccattcgtagacttatttcattctgcagcagtgtccatttaaggacccattggtcaaattgcagttgtcagtactaggacaggagataacagtcctcttccttgtcttcaaataatccaggacagtctacacttgggagtagtaatccattcttatctggaacataggagcagacagtaggtttataattcaggagtttacagatgtaaaatatgttttgaaaaaacaaaaacaggccacaaacttagcatttgatttttgtatataggcaaacaattcagataatgattacaacaaaatgacatacactgaatatgtgctgtttcagacactgctaatttaatcctcacaatagtactgttatagttgatacatgcttttattcttgtcatcctttttttgtagataagggaaagttaaatattttgcctgaggtagaaggtgagtatctaccttagaatctgggtgagcctgactccagatccctcacatgtaacagatgatattgctccctttgcaccagggcagtgagcatgcattgatatgcttttaacccaacttcagtttctcttaagtcctggagtatgtagaaaaaggcatggccccagtttagtagttctcaccaaattcttaaaagataagagccgatcaagagatctgaaaatacaactaagccaaatataagaaaccatcaggacaaagatatcaaacattttaattgtgcaacttgaacccgtactgttcaaactgtgtatccatcacagtgctccttgaatccttgtaattagatctcagaagacccagacagagctggcattctggggctgtgcaggtgtccttgctgattgctggcatcctggctacaagcccaccttctcattacgccttatatccctcagaccatcccaggtcattctcactgtctcttggcaaaatcccataactgtttccaagagaaaatgaaagcagaaaacaggaaataagggagtaacagcaagttccattatattccaatctgggcatggattaactacgtttgcgtttatagtccacattctgcagtgcctggatagcccattttggagcattagatgcactgttacaaaaatgtaaaattccacagaaaaaaaaccttgcaggataatttccctacattgcttcataaataatggccaaagctgagaaagttatcaacttagattagaattatattaatagaagtcagtttgtagtctaatttttttttcttaaattccctgatttttctatgtcacttctacttctttttattgctgttgacaaaaggaatgccaatctaaaaattagtccacggtttttagtggactaattccctcacactacaattttaatttaactctacccctgtggatttttcacaaccttaaacaatctctttgaccttttagtatacctggaaaataattagtcgtaaaatattagtgaaatgatttcttcaaatcctctccactctagagataatatctccatttttctttattcttcttttagtgcaaattcctaggagaaagtcagccctcaattattcccctagatgtgtcttcaatgtttagtgattcagctttgccttttttctgctgatatatatcttcctttgtctgaaatatagtacaaatctctctcccagaaacttctgggtatttctttctatatacttgaaagtgaagcatatggagccagtgcttggttaaggctggatgtaaaattagttctttaaaataaaatccaagtcataaaacagtattgggtaatttagtggcctatagtacttatgtctggtcttggaggcaaagaataatcaatttcctatagctaaaatagaaaaagaccaatatattgatttgtttaggaactaaattaactcccaatgaatcagcacatataaatagttgaaaaataaaccagtctcttaggtgtattcaaacattaattacttaaccatttttatttatttatttatttttgagggtctcgttctgtcacccagggcagagtgcagtggcatgatcacagctcagtgcagtcttgacctgggctcaagcaatcctcccacctcagccccttctgccccccacccccgccaattccctgttccccaccaagtagctgggactataggcacacgctaccgtgcccagctaatttttgtgtgttttgtagagatgggggtttcaccatgtcgcccaggctggtctttaactcctgggctcaagtgatctgcccacctcatcctcccaaagtgctgggattaacaggcgtgagccactgcacccaacctaaaaaaattcattctaatgttgatatggacctacatgaaaagtctgaaaatttcccattgagaactcactttttcaatttaacagtatattaagagggaaccatgtccccaaaataacaagccctttcgaaagcctggaacacccacttaaaacatgttcatccttaggcagtctctttttgcaggagcaaaattctttacctccaaagtgaaggaaaagaaagaagatagatacgcaagcttgagtcttgcagcttaaaatttaaaggaatcaaacccaaagtttcctgatgccaatttatatcccaggttttcgtcttcattttgttttctttttctaagatcctagcttcttcctttccaaatttgtctgttgaagttgtaatttttgcagtttaaatgattggatgacatcttcagtagggtcaaaggaaacattagcgatttctttttcatcttttgtctctagagactgactttggaatatgttttccagattttttggtggcatctctgccactaaagagttatgcctagaaaacttttttcacaaataagggaacacaggatgctggaagccatggcattgtccagagagacaatctggacatgggttggaactacagacaagggagctaatggcagactttgcttggttccttaattaggatgtccagttgagtctgatccgattccacttctgctccctgcatcccctttgaacctcctcaatagtccactcttcactatgttctccagagtgtaggatgggtggacactgtcccctctccatgttcttccccatggtgtgaagtgccatgcctctctccatggccttagggactgccttttttcttacctgccacacactccccgcatttgttgggaagggatgaagagggtcagttggtggaagccctgagagtgaagcccagttcagagtctgagctagcaggggaaactgggacatagtggggagatttggtttctgggtagcttagagcttgggccagggatggggattataggtgggatccatggtgagcatgaggagacagggacaggattggcctcagcttgagggtatcagaaccccctggcagggcactctccacagcaccttccagaagcaggaagattaggaagctcagggtcagggtcagggctgccagatacatattagttatgtagcagactggacctccttaccacattcttctcaggatttggggagtcaggcatttcccagatcttctcatctgtgacctttcacctctgctgcactgacagcagcacaccacccctgggcccacccctccggttttgtagatctggacctctgcctcaagttctctcaatgcctgtcatttcttccttcagttctatcatgcctgtgaccagccaggcatcgtggttttctgcatcatggactacgatgtgctgcagttctgtgatttcctgggctccttaatgtccgtgtgggtcactgtcattgccatggctcgtttacagcccgtggtcaagcaggtcagtccagagtgggccctggggaacaaccatggccaagtctccttgaaatccactcctgacctctccctgggggcatttccaagtgcctctcatgattctgacccaggccctggagtgctgtctgtcacctggccctagcccagcccttgagtctctttctctaggtgctgtatttgctgggagctatgctgctgtccatggctctgcagcttgaccgacatggactctggaacctgcttggacccagtctcttcgccctggggatcttggccacagcctgggtaagggtggggagggatgtgggggaagggtcccagcaggacttgggtgctgggccccaggtatctggtccccagtttaaggtgggcttggctctgtcgtcatcacctgctgctggcagtgtccgctccagtcttggcaggtgtctttaggtcacaaccaggatacagaggaaacctgagagtgaccagctctggcttgggttccagggcttggcattcctgagccccacttctctgtctcccccagacagtacgcagcgtccgccgccggcactgctacccacccacgtggcgccgctggcttttctacttgtgccctggcagccttattgcaggcagtgccgtcctgctttatgcttttgtggagacccgggacaactacttctacattcacagcatttggcatatgctcattgcgggcagtgtgggcttcctgctgccccctcgtgccaagactgaccacggggtcccatctggagcccgggcccggggctgtggttaccagctatgcatcaacgagcaggaggagctgggcctcgtgggcccaggaggggccactgtcagcagcatctgtgccagctgagaggggctttgggcctggccctgaggggatatgaatgcttcctagagttctttctgggggtgtggagccctcttagaaggagacaggctgtatttcttgaggacatggagtctttctcaaggacacaaaactcttccagggacctggagcccttcccaggacatggagaacttcctgagggcctggagtccccctgcatcatggagtccttcttaaggactggagcctatgcaggcacagagtccctcaggaccaaggagtccctcctgcaggtgtggagcctttcctgggatgcagagccttcccaagacatggattccttcccagggagacaaagccctgtcaggagcacagcatctttccagaggaggtggagtctatcttggggaaaccaaatttccagattttcccagaggctcagcaactctggcctcaggcttccttcccagaggcagcgtctgggctgtgctgtgctgtggaggagggattgcaggatggatggagctgggactggggctgtctgggtggctggtatcctcgtttgatacaggtggagtctgtgtgtctccagtgattgattggttcagaatggttctgtgatgccttttttccccctggggtcaggggtgtggggaagtggggaaagagggcccctcagggaatcagcagggctgatgggagctactgccggaggcttttgtcacaccctgtacacagtctgatcccgctcatctgggccctgcattcatttctaaacagtttctaatgcctattccccaattcctattgagcccgatttgcagtatctgaggggtgtgtgtgtgtgtgtgtgtgtttatgtatgtatacgtatgctgagatgatttaaatcagtgagacagactttccttatgatgcccacacccaacacagaaggaagccgaggtcccaggaaattggaatagcaggtacacgtctcaggtgtgcaagaaatatcacaagaatgtaacttctgttttgagcccccatttttcctgagtgccagaaaagatcatttgtccatttgggattccttctctttccatgagggtcatagctgagttctgagggtcttacataatgccaagaagttgggagagcattctcactgatcaccagtgtccatacttcatccatccccgggatttccatcattccatctggtccccagtcagaggtccagacagttcatctgggatgcagagagatttcttgttcccatttgcattactctctcagtcctaaggttctctctgccacttctgggccatatgtggagacccgtaaagttgtctaaggccttggctatgcagacacaccttgaagctgtttctgctctgggttttgacagacaaggcatgagttgctgcatctgttaaaactgcaaatctatcttggcctggggtgtggagctcagggactcttccttttgggaccctctgtgtcagtattctcactacatcctctcctcctctctcttctttccccctttcgttaatattggaggtgaggaagccttacttaatgttttctcctgaatctttttttttttgagacggagttttgctcttgttgcccaggctggaatgcaatggtgcgatctcagctcactgcaacctctgcctcccgggttcaagtgattctcctgtctcagcctcccgagtagctgggattagaggtgtgcaccaccaagcccagctaatttttgtatttttagtagagatggggtttctccatgttggtcaggctgctctcaaactcccggcctcaggtgatccacccgcctcggcctcccaaagtgctgggattacagttgtgagccaccgcgcctggcctctcctgaatcttttatctatgccttaagccttttctgttcccttcaggacctaggcttttgaaacccaaaagccaggaaaacatgcctttgttatctgctttctgcaatcacgtctcttccatggggcactgagcagagaatggtgtggccaagtgagtagtgagaagcagtgaggaggtgtgagctaggtgtctgttcccattttagaaaatactgttcctacatcagaaataccacattaagacgtatagagccaggtcactgggatgcttgaacccaaatagctgggattctggacagagtcagcagagtacagaaggctctgaagtgggagacggagctggggtgcatccctcccagtgaggaggggtcatgaggggcgtctgggaagagggacatttgaactaggattagctgagttgccatgatgctaagataatgggagagtgttctttgtggtcaccagtgtccacatggcatcccttccctgagattttcatcactccctgtggtcttcagtcagtaaagctcttagaacacttgtatagtgcctagtctggtatgtgatgtggtccaatatatgttagcttaaggtcaccacgtgtttggacatggagagggaacagcaagggggaatgcagaggcaggaaagactgatatttactccgggcactgaatagttcagtgtgcctgggccagtgcatgtgcgcatgcttttgtgtgtggagtggggtggtggagataagcagccaatgatatgattagatagataagtggaggttgggtctttattctatgggaaatgaggagccattggagagattaagcaggagaggaacatcagattggggttttgatggctggggcagaggatggactttgggagaccttggaggacaaagtgcagtgaccacagctattggaacatttgaaagagaaatggtgaagccttcttaaagcaatatcggtggaaaggaggggaccaatttaagagctgttaggagtgaactctttaggacttggtgactgattgggtgtgtggggtggtgaggtatgagagagcctaggatgatggtgatattctgatttggggatggtggtgccattccctgagatggtgacaccactttgggtggggggaagatgagctccactttggacagtttgaggtgcatgtgggattcccggagggaagggggccagcaatatgacagtgctggacgtagccgctgaaccaggcctgtctccaggctcccaaaatgggaatccttggttgtctcctgacttgtctcagtgggggagatcccaagattcaaacagcccttccttgccttgaatacagggctgtggctggcagatattgctgtacccttgcatgtatctgtacatacgactggactgagacccctgagcacttgcagctgcctggggcatgttcagcagcacagggctcaatccccacagggtgatgttctgaaagcttctgagtgacaattcagtcccgcaaaccttccatagggaacatgctgtgggagctacagagatgagccagacccgactgaatcctgccctgaaggagctcacacggtggtgaagtgtcatgaatgcaagttagatgggacaagtgtgaagtggaagatcctgacaaagtgctgtaggatgtaaagagagcgatctcaaagtgcaatgggaaaggatgcatgagagagatggtgtctaacctagctttgaaaactagtcccagctattatcagagaacagcacaatacatacaagggtgcgaagacatgggggtgcggcagtacagataatgtagcgaggggacagccatgtgaagggcatagtggaaaatcaggctgaagaagcaggtgggggcagattctggagggccttgaggattcaactgaagaatttggacttaatggtaatggcagctgtcaaaagtccttgatcagaagagtgatgaatcaatccaggtttgaccaaagtaacagaaccactatgagtgataaaaagattagacctttacagtcatgggagcagttggagaaatctgtgcaaaactgttacttctgcatttggtgttgggcctgaagctgttacagctcagctgggccagcagttaggaaagaaggctgagtgtgaagtgaggggcagtaagggcacactagaatccagaaggacaaactggaacctgtgcctggctcttatgccttcaatctcagtgactggtgacctgcaggagaagctgtcacctttgccatggagcttgcacttggcccagcactcagcacagtggaaggaggtgacctggtggggactggacaggctgtgctaatggggagccagcagatgagcaacatgggggtgccctcactgtgtctggtgctgttccattttttttttttctttctttttttttttttttgagacggagtctcactctgttgcccaggctggagtgcagtggcgccatctcagctcactgcagcctccacctcccaagttcaagcgatcctccctagtagctgggattacaggtgcaccaccacacctggctaattttttgtgtttttagtagaggcagggtttcatcacatttcccgggctggtctcgaactcctggcctcaggtgatcctcccacctcggtctcccaaagtgctgggattacaggtatgagccaccacacctggcccacttttgccttccaaatcacatgcaaacttctctgtggccaaccctaacccacaccctctaacctagtttggttgactcagtataaagctaccacacgtgagctaaccagagctttcttgggacgattaacttggcagcagcccgtgaaggatagatggtcaggataaagaaagccaaacctcccatagctcttgggttgacactgtcagctggtgtggtagtcattaggccattcacaaatctctctgtccctctcgtttgccatccagacacacgatagtgtgcttttcccccttaacaataggtgtggtcctgtgccttcctgttgccattgtgttggccactgaaatgtaggtggaggcaacacagccacttctgagtagaagctttaagagtcagtgtaggctttgttactttcccttttctttttgtcatggtgaccagcagtgttcccaatggtagctgttttgtcatcctgagtcccagaggggtgaagaccatgatgcggagcagaagccccaccagcctctggtggacctgcatcaggagcaagaaacaaaccttaatggctttaagcctctcaaggtttgaggtcatgaccacagcacaacctagcctatgccagctgacaggggcagagggcagcagtagcagtgggatgctttcctggagagcaaacctcctctcagcagagttaggacggcagctttcacctctgcattcctcaggctgtaaatgatggggttcagcgagggcgtcacaaccccgtagaacaatgcgacagtcttatccacgttgggatccttggccttgggtttgaagtacatgaaggagattgtcccataaaaaaccaccaccactgtgcggtgggctgagcaggtggagaaggctttgcaccggcctgcagcagagggtaccctaaggatggcagacaggatgaaaaggtaagacaggcagatgagcaagaggggggccagtgtcaggacggctgtggccaccattaatgccagcgcattgagggagatgtccccacaggccagttttagcactgccaagatctcatagaagtagttgatgacgtggccacagaaggggaggtgccagacaaggatggactgtagcagtgagttggcaaagcctgtcccccagctcagcgctgccatctgcatgcaggtctgcccactcatgagctctgggtacctaagcggctggcagatagccacataacggtcatatgccatcacagccagcagcaggcactccgttgatcccagcgccagggtcaggtacatctgcagggcacagccagggaaggaaatggtcctctgggtttccaggaaattgtctagcatgagaggcacaaaggaggaggtgccgcagatgtccatgagggagaggttgctgagaagtacatggggttgtgcaggcgagggtgcagcacgttcagccctatgaggagggcgttccccaacacattcacggagtagatgcccaggcagaacacaaacaggaccacctccaggttacagtgctcgtgtagccccatcaggacgtattccgtcacagctgtctggtttgcccacttcatctcattctctctccttttccatctggaccacccagctttttggaaaaagctccaactggcctgggagcccagtgacctgatgtctgagctgcagcaggtcagcctccctctctggaatttagtttcaccatctgtataatgagggagttggacttcagatctgcaatctggccttctcagcgctgcagttctgtggacgtcactgaggggaggatggggcacattctagtcccctaggctcctctctgctctccccaggatggggtcagaggagacagcagagaaagattcatgtttaaaatgatcgtttggaatccaaagtgtttttggtcattaacaggaagcatcttttctacattacggcttcatgtgaccaaattatggccatagtatttcagatttattcatccactaagtatttattaagtacctattctgtgctaggtatcaggtgctggggctatagcagtaaggaaagtaagtggacaaaaggattccacacctgccacaggcgctgccccactccctgagtcaggtgagatgagctccggaaggcaggtgggtaatggatgatgctcacctagtgttccttgggccatgaagatcaaatatttcagccccataggatgtgtaagcttgatttctggtcatctctccttaaggaatcatggaccattattttgtttaaaaggacacataagaacgtacatgtctcaatagagttactggtcacaggactgaactgtggtcatgaaagccaagcaacttactttctggcctccatattgctttgtaggagaaatgatactgacaatgatgtcacacgaggagggaagccaggcacgaatctggtggaggtgcggtcagttgtgacgagctttgcaaagggagcggtgggcgaggctgtggtctctcccaggtgacctccatcgccatgcagagctgctctcacttctcctcaggaaaggccagcgtcaggtattcctaggaggaagcccaggtgtgtccagagaacagtagtcttgttagaactggaaaaatgtcttatggccaggtggcccctggtctgaaggaaaaataggagctgagtgtgaacttttatcactcagaagatataatccacctctcccctcctgcccttcgctcctgggttggttgtgaggacagtgctttgtgacagcagtggagccctgtctgtccttccgggctagatttcttctttctcttattcctcctgtttcgttgtatccacgatttgtcgagttgcagggctcaccctttcctgaagaaaccatctcttttcccagctccgcacctttgtccgagatggaggcgtgtcctcccgcccatccccagtggggggtgttctgcccattctccagagcccagcactgctccatctcttttcctccctctccttccccttgctgttacctgctgccttcttgtgctcccactgcccttggccatccctctgtgtcattgtgcgctgtggtgcacctgtcttctctactacaccttaagagcaggactctgcctccttcctaccagcacctcatgcagcaagtgctgccaatagcaggcacccagcagatagcgaatgcacgactccaaaacccagctttgcctcctggctgtagttcagactagctgtgtgacactgaccaagacacttgacctctctcagactcagcttcctccttgaagactgggatgctatgtagctcagaggaaacatacacctgaaggtgctgccccggggggtgcaatgacctgttactgaggctggatggaggatggcatccatcatcagctacaggtgcctcctctatctacaggttcctgctccatctatactagccacctcctggacaagggctccagtgtcctccatgacaccagctttctccagagcctgtgcaggatttccttcctctaccctgaatcagggtgattcttaaaggacagtttcaggaacatataggggcacttgggtaatcttggtcagtaactgacctttaactatcatccatgtgaacatctacagttagggattttcttggtgatgtttggcaaaaagtaaagaattccccaagtgtgaagcctcattcattcacttattcaacaaatagttattgagcacctactatgtgttaggccctgggccaggtgctgggaatacagcagagacagacctggctcctgccctcatggagtttgcagtcattcattcactcactcggtgactttggacacctccccctcctctctccaggctttagatctctgagattctctctgagtctgggatgtaaagacaaagtaaaacctgaaatctggaaagcagaactataagagctttgtttctgatgggggtgttgctgcagacagaactatgtccatctcaaattctgacactggacacaggcgtgggggtttcaagcaggccaagggtgggaaaccacctgactgcatttttctttatcactcacacctctaacagtaagaccaagtgggcctggcggaggcatttgagggcttttgtgtgtgcaggctctggcccgtcctcctgccttgcctccaccgcatccctcatgcacacctgctgcagcctcatcagaccactccctgtcttttggacaaagcctgtgtgctccagtcccatccctcttcttgggcagtttcttcaggctggagtgcctttcttttctactcatccttcaaggctcagttcacacaccactgtctcgtgcagccttctctcagatggcttcataaaactgaccacccggacaacaagatggtcacacagctattagtggaggttaagttcattctgccttcattatagttcatttttcttgtatatctctctctgactagactatgagctattgcagtgaaagggctgtgtccttcatcactgtcaccctccagtgacccgcagccaggaggtgtcagtgattgccatttgagttgaactatttattgacatccagtgttgttctgccaaaaatcctgatcctaggcatggtggtttgcacctgtggtcacagctactcagaaggctgaggtgggaggagtacttgagcccaggagttcgaggttacagtgaactatgattgtgccactgcactccagcctgggcaacagagtgaggccctttctctaaaaaagcaaacgaagaacgctgaacccaaggtcttgcctcaaaatcaattcccccttccccctccaacacatacaccgcaacagaatgatacagctattgtgattgctaggagaagggctttgggcagtgccagtctcctgtttgcagtaacacctgctctttctgaagagctacatcagtaacatggtgggttttcctcacaacttaaaagtctgatcgtaacacattcatggaaactagaaccagcacacgaaaccattggcttgtggccctaaagaaataactctgtgtccagaaaatgccatgttaccaggttgcctacagctttgcctgtaacatgggcacaggctgggacatcagatagaagctggttcccatggtggctgggttgggatgggctaagttatgttgcagtaacgtacaacctcatcattttagtggctagcatgacgaagttttatttctcatgctacatgtctactgtggctttcccggtggctcagggttctcagagcccctggcagatggaggctccaccctgtgggacgtcaccagttgttatggctggggaaggacacactggaggctcttgctgctctgagccacaggagacatttgtcatatctgcacacagcccactggccctgcggcatcctaccacctgcccagaaggaggagaaccagaattactgctgagcagctcctctgcatgtgggtgcaatggcgtcttatgactctcagaaagctactctagtggccatctaccagtgtcacacagtgtcacgctcggtcatggcctggaagatcagagtcacagagggataggacctggagtgtctctgaaaatagctgcctggtttcactccccggttttacgcctcttgagaagcagagtgatgcctagaatgagccctggactgggagggcacgtcccaggtttgaatcggggcctttgttccttttctgctgtatgactttggtcagatttctccttctgagaagtggagccaattaagcgatctccgatatgctgtaatctctgaaacatttcctcatatgtttctagcaacttccaacctgaggtctgatagacccagggttactttgcaagctaactgacatatcagtctcattgtctggtaaatctaattttaaccacttaatacttattttaggcttcacaaattattttaaaagaaaagataggggcataacaagaagaaagcttcggttacaatttccccgaaatgcctggatctgggattcctgcttcctggctgtgtggcagagaagatgaggatggccctggagtcagacgggactagggtccaagccccagctcttccacttgttaacaatgttctcagcctcagcttccttacctataccatggagacggcagtatttccttgtgggcttgttttaaggatccagtgacaggaagcatgcgaagctcttagaacagagcctggcactggtaaatagtcagtgagcagtagatgatattattaccatcctgtccctatccctgtcccccagcaaatattttggcttttaaatgttttaaatgatttcttgagaataagcaatgggtcagatgaaatctccttacctctcacctactggccatggcctaaatgtctgtagggagctggagccaggtgaggggagctgtggtttgggaagtgccgagttcattatgagcaagtgcacggtgctgggatgggctaggttccccgcacctcgccctgccactgcctcccaggacctgcctcttgctcccctgccacatagacagtctgcttgccccctgctttcagggacctcatggtccctgcccaatttaaagttcaaactctgcaactgcacaaagttgcaggcttggcagctgtgggacctgggcttcagagactccaggttcctcggcctgccccaggagggccctgctgaggtgaagtgggcataggagagagagtggacagagaatctgaatactgggtcacgttgcagttctgcgccttggatgccataggctccaggcccataagcccggcttcactaggcctgggtgtctgggttgtgaaatggggtgtctccttccaggattgccgtaaggacctggattcatccaagcttaaagtaaattgctttgtaaggtgggagacaccgagtacaggcgagggactttattaggtcagggatttaatcaggcatctgtttttacagatttctttattcctgttccctcccctccccttcctgtcctttcacaataaagaataacaacttgacacagcttagagactaaaaatcatccttcaataaagcagcagaagttgcaaagtttcctatgatgctataatttgtcttctggaatttttttatcaagaacataggtcgaagtaaaaaatggaaaagttgctactgttgattttctatctgctcatagcatattgtcctcttgctgccccacggataccctgaactcagcaggtcgaagacaaactcaccatctccccacttcccccatctactgtgctcatcctccccatgcagtgtctcagtctacctcaaataaaccagaaactcaggacctgcccacggtcctcaacctctccctcctccacctctataatcccaaaatctcttccaaatattattttacatatatatacagttgacccttgaataacatggatttgaactacatgagttcacttatacttgtatttttcaaaaaatatattgggaatttttttttgagatttgctacaatttgaaaaaacttgcagatgaaccgccacccctgagacagcaagactagtccctcctcttcctcctcctcctactcaacatgatgttgacagtgatgaagacttttatgatgatccgtttaatagataggaaatctatgtctcttccttatgactttcttaataacattctcttttctttagctttattgtaagaatacagtatataaaacatataacatacaaattatgtgttaatcgactttatgttattgataaggcttccagtcaacagttatacatggatttttttttttacagtgaggagagttggcacccctcacccccgtgttgttcaggggttaactgtaatcccaaatattatatctctagctcccaaatgttattttgcatctatatctatctccccaatatttcttggggccaccctctcctttactgcccagccagctcaggcctcactgagggcctgggtgactacagcagcttcctcccttccctgccctcaggaggaagcctttctcatctgtcgtctactgcgggcaaggtggtcttccacataccattattttttaagttcaaagtcatggtcatcatagaaatattggataatattgaaaataataatttaaaaaacagtacttatctgtaaccctgtcacccaaaggaaacaactgttagttaatatttggtcatcgttttccagtatttcctagatactgacttattcatagatctgtaagaaaaatacttaaaaagttaaaattgagatcatactaaaatacaatgttatgtgttctgctttttttttttctagttactttacgagtattgcccattatcatatacccttcaaaaaataagattcctggccaggcatggtggctcatgcctgtaatcccagcactttgggagaccgagttgggaggatcggttgagcccaggagttcaagaccagcctgggcaacatagcgagacctcgtctctattaaaaataaattagctggacgtggtggcacatgcatgtagtcccagctcctcagacggctgaggtgggagaattgcttgggcccaggaagttgaggctgcggtgagccaagattgtaccactacattccagcctgggtaacagagtgagaccctgtcttgaaaaaaaaaaaaaaaaaaacagattcttaacggctgcatcacatactatcattggactccaccgggatttgtttaaatattcttctatggttgaacattaagattattacagtttttttgttactacaaataatgctgttattaatatccttatgtccaaatctttgtgccctttattatttacttagactggattcctagaagtagaggtgttgggtcaaggggtctggaagttttgaaggcccttgattcatatttccaacttactttctaggaagttcatattaaattatccccatttccaccagcagtgtatgacactgcctacttcaccacatggtacctaacagtggacattgtgttaaacaagagagagaatggtatctaatcagtgaccttgctaaaagtcaatctgattgtaaacccccagagcccacagaataaaacccaaactcctgtgatgtatccatggcccagcagaatggcatggccactggcatggctactggcagccttctctcaggcgtggtcagagaggcttgggtatctctcactcctctagccatgcttctctgtgcctctgttctggccagcagaggaagcagggagaaagccctgggaggggaattcaggcctcatgcaggggctgtgcttacctgtagccgggggcaggaaaggtggactgctgcttgcagggcaagcccagtgctcccatcgtacagatggtaccatggaggccagggcaaggcagggaatggaaaatgcttccggaatctaggtcagtgtccactgccctgtgcactgagttatcagaaaagaaaagctggaagaggctgagcaccagcaggggcaaactatggcagggtccaggccatgaggtgaggatgggtaaacaagcttcctccagccaggtgagccctggatccagggaaaggaagcactgaaagctgctgctgctgctgttgctgctgggcggggtgaggtgggaggaatgggaaggcttcaggctttgggctggatgattggtgtcccagggcctgacaggtctgggaatcttggactttgggccttgtgatggttaatactgagtgtcaacttctttggatcgtgggatacaaagtatgaatcctgggtgtgttctgtgtgggtgttgccaaaagagattcacatttgagtcagtgggctggggaaggcagatccaccctaatctggtgggcatgatctaatcagtttccagtgaatataaagcaggcagaaaaacgttgaaaaggagagacgggcctagcctccgagcctacatctttctcccatgctggatgtttccgtcccttgaacaatggactccaagttcttcagtctggggactcggactggttctccttgctcctcagcttgcagacggcctattgtggaaccttgtgatcgtgtaagttaatacttaataaactcctctatcctattagttctgtccctctaagagaaccctgactaatacaggcctcattgctgcctctactgtcacctaccagggaagctgggccattctcgtcatctgtggactccgtctcagctctgctcagttttgggaagaactctaggctctgccattgtcacccctacattgacatgttaatatctctatttaagaaacttgtgcagggcctagagttgggcaaggctggaccttgggagagagtagaatctgacactccctgctcttggagtaatgctgaaaacacagaggggcacagcaagaggagcaaggtggggtggcttcctggtggaggtggcatttgagctgggcctgaagggtcaggcagtcagtccttttacatatggagaagtgtgctggggataggggagggggtgctgcctcgtggggagaaacaaggagagcacagagctgggtggtgcagggcatgtgggggccacaactggctggtgtgtgtggctgtgaggagggagatggggtgggaggggaggaaggctggggagccagtcaggcagggcccagcttgtgagggcctcaaatgccccactgaaaagcttccactttgttctgagaacagtggggagccacctagggatttcagtgagaagagtgatgcaatcacatgtgcatttcaaaaagatgccccatgaaggagagattggagggaggaacaggactgaagtcttgggaccagccaagaggctggtgtgaaggccagggtgatgctgagagcagagggtgatttgggggctgttctgtggcaggatcagcgggacttggtgctgccttgctgggatgaagataccagacctgtagccccagccctgccatgtcttcactggcattggcatacgatggcctcagctactaacctgagacctgcgtctgtacagagccccgccctccctcacctggaggcccgactcctgccccacaccttcctggcggcctccttcacctccttgttcctcaggctgtagatggtggggttcagcatggtcgtgaccatggcatagaggactgtgaagacctcatcagagatgtgggcttccttactcttgggcttcaagtacatgaagatgatggtgccgtagaaaagcagcactacagccaggtgtgccaagcaggtggagaaggctttgcagcacctggcggccgagggcaccctcaggatggtggccaggatgagcaagtaggacaggcagatgaatgccaggggtacaggcagcagcaggatggagcccgccagcaggaagtcttcgctgaccgacgtgttgccgcatgccagcttcagcactgccaggatcttgcaggtgaagtgactgaccacgtggtggccacagaagggcagcctcatggagatgaccatctcagtcaccgacttgaggaggcagaggacccaggcagctcccatcagcagcacgcagagccggtggctcatgagcacgtggtacctgagtggctggcagatggccaggtagcggtcataggccgtgatggccagtagcaggcactccgtggagcccgtggacaggctcagacacatctggatggcacagacagcaaaggagatggtcttccgggatgacaggaggtggaccagcatcagaggcacaaaggtgggcgtgtagcagatgtccagggtagagaggttgcccaggaagaagtacacgggcgtgtgcaggtggatatctagcacgctcaccgccatgatggctgtgttccccaggagggtcaccaggtacatggctgagcacagagggaagagcagatgctccagggctgggtagccagaaaatcctttcagaaagaactcggacacctctgttctgttgagcggctccatgctgcagagttctgaagagatggtccacagctgggatggaaggagagagggtacagggtgcggggaagctcacagagccctttctgggacgaggtggactgtcaggatcttttccagcactgccacactcactgtctgtgacgtcgggcaatccctttatcctctctaggcctcagtttatccatgtgaaaaatgagcattgatttagatcagcattccctgagagaatgttaatgagaacattagtaagcaatctgaaaaatcaatttgagacaacattggattaataaaaaataaagctctttactgcaggacttctcagagcgtttactacgctaatgtgatctatgactcctgcaaagcaatgtagaacatctgtaccccaaacttatttgatcatggatccccttttacagaaaacccattaacctactgcagataagtgttctatgagcatagtctgggaaacagtaggctagatcaacagttctcaaactttaacatgcaccagaatcacctggaaagtttgttaaaacagattgttgggccccaaacccagtttctgactcggtgcgtctgggcgatgcttctgctgctgatgtaggtaccacactttgaggaactagtgggctaggtggtctctgagcaggtggagattctcctggctttaaggaagcctctgagccatcgcatttgctattccttctgtctggaatgtcctcggcctgcagtggtctgacctgtctcttcaggcctactctagtatccatgaacaaagcatacaccgtgctgtgtgttggagggctgctgaccttgaagcctatcgctgggcatgttcccctgtcccctgcccagggcctgtttcattagctaccctgtgtggattggaccttcacaatctgccttcctgtgggtttcccagctaaaatctgatggagcttttggcccagctccaaacccctatgttctgtgggccagagcgagggctgctttgacttcatgaactcctagggtattagcatggaacatgaccagaggccaacttgttggatctcccattgtatagatggggatgctgaggtcacacaacaggtctctggtgaggtgaagctagaatccagccctcccaacagtgtgacccctataccatgctcagagcaggtgtatgcttctattaggtttcaaacaatgcttgttcttttaccattctagatggatatcagtgccccaggtgctgccacaatcctctcaccagcaaaagagcatgagtcacctctccttagtgttccagggtatctggcacggtgtcattaatcccatgggacacgatgccaaatcctgggcctgggtggagcacagttcctctcagtgccttccttgcaggagaccatttccgtcttttattccaccctcacttactcatcccagaacctagaagtaactgaggacctgctacatgtcaggtggtgccagatgtgagggagcactgatgacaggtgtgctcccaggctgctgagtgcaaacccttcctaggcagagaggacccccaagtcttccatacccagcctcaccgtccccccactcttccgtacccagcctcacccacccctcccactctcccatacccatccttgtcctcccccaccctcccatacccagcctccccctcccctgactcttccatacccagcctcacccacccttcccactctcccatacccagactcaccctccccccactctcccatacccagcctcacccacccttcccactctcccatacccagcctcacccttccctcactcttccatacccagcctcacccacccttcccactctcccacttttccaaaagtaactattgttattagttttgtgtatatctatccagatacttttctggccatttgcatatgtatatctatacatggaaataggtcttgtgactttttagtatgcttttttgttgcagctttattgaaggatggttgatgtacaactatatttaaatcatataatttgattagttttaatgtatacagtcatgaaaccatgaccacaatcaagataatgaacttatctaatatacccacaatttttctcatgccccttggtaatccattcctttcttccccaaccaggcagccactgatttgctctctgtaactgtagattactttcattttctagcattttacataaagggaattatgcagaatgtactctttttaaaatctggcttctttcactcagcgtgattattttgagagtcatccatgttgtgtgaatcaatggttagttctttttaaaaatagcatctttattgagctataattcaaacaccatgcagccgcccatttaaattcacccatttaaaatgtacaattcaaatacaaaactattgcattgtacactttaaatgggtgagtttaaagtgtacaacgggtgaatttaaagtgtacaatgcaatagttttgagtatcaccacagttgattttagaacatgtttatcacttccaaaggaagcccataccctttagccatcactccccttttcccctcaacctcctccagtcttaggaaaccattaatctactttttgtctcttttgagctgcctattctggacattttacataaatgaaattataaaatatgtttccctttgtgactggtttctcttacttagcttaatgttttcaaggttcatctatattgtagcatgtatcaggacttactttctttttattgctaattaatattcagttgtatggatataccacattttatgtgcccattcatcagttgatagacatttgggttgattccactttttgactgttacgaatagtgctgctatgaacatttgcatacaagtttttgtgtggatgtatattttcatttttcttggatattttcttaggagtggagtttctaggtcatatagaaactctatgtgtatatttttggggaactgccagtttccaaaatggaaagtatcattttactttcccattttacatttccccaatatgtgagggtttcaatttctccacatcctcaccaacaattgttattatctgctttttaaattatagccatcttggttgggtgtggtggctcacgcctgtaatcccagcactttgggaggccgaggtgggcagatcacttgagaccaggagttcgagaccagcccgggcaacatggtgaaacctcgtctctacaaaaaatacaaaaattagccgggcatggtggcatgtgcctgtagtctccgctacttgggagattgaggcaggagaatagcttgagcccagaaggttgagggctgctgtgagccatgttcataccaccctactccagcctgggtgacagagtgagaccctgtctcaaaaaaaaaatttatatttatatataaccatcatagtaagagtgaagtggtatctaattgtgattttgatttgcatttctctaatggctaatgacattgaacatattttcaagtgctcattgggtatttgtatatcttctttggagaaaaaaataggctctttagcctattttaattttaattttttttctttgagatggggtttcgctctgatacccaggctggggtgcagtagtgtgacctgggctcactgcaacttctgccttttgggctcaagtgatcctcccacctcagcctcccgagtagctgggatcacaagcacacaccatcatacccaggtaatttttgtgtatttttggtagagatggggtttcaccatgttggctaggctggtctcaaacttctgatctcaaatgatccaactgcctcggcctcccaaagtgctaggattacaggtgtgagccactgcacctggcctaattatgtatttacattttactttacatacgtaagatcacagccaaggaggttaactataatttcaaattttattaccagccacttgtgctattttatcacatttgaaaatattcactcttactatatttactttaaacagtgatctataaatttgtttagacaataataattaaggaccttttcttcttcagaatgataaaaaaattaatgatgtattgaagatactactaaagaaactttacttttggagtatggcctctgcattgaagatctgtaggattttttaaaattaattttcaagtctttccatgacctctctgttctaagaaatatcatctttgtaataatttgtgtgaatactttacaaatcaaaaattgattcacaatactgtactaccataatcactaattttaagtctcttaaacattttctatattacttttcttgattataaaatgtcaataatatgggcatgctcttaatataacagaatatttaattatattatttttcccatcaacccaccagtcatttattaattacattggccatttccattgattggcaggaggctcttccatgaacatctcctatcatttccactgtatcatttttcttgccagacttagttcattttcagcctgaagaatcacctcttttatttgaacaccttgaagttggtcttctaattttttaacatctggttctgctttaaccatagccaatttctcatctgcaatctgttctgtatactttctatgtgctgctttttaaggggtttgcttaagaacatcaaggatctttgtgtacaatattcttagcctcttacattttagcagactgattttagttgcttgtcttgtgtggactcttgcatacagccaatcccatgaggccagtggtcttcttcagcacacctgccatgacagcgccaatgagccagtcggatcttctttaatttctttcaacaatattttgtaatttttagagtatacattttttccaagaatataattatatacatattgttttatatgatttctttgaaaaataggagaagaaataagaaatatgcacttaaaactgccttttataattatataattacctttatcagtgctctttgttctatcatgtggatttgaatttccgtctgtatttgcttgctttcagcctagaggatttcttttagtatttcttgtaaagtgggtctgctagcaatgaattctcttagtttttgtttatgtaggtatgtctttattttgccttggtttttgaaagacagtttttctgtttttaatatttttggttggcaggcttttctttcagtattttgaatatgtcagcctgctgccttttggcttccactgtttccgataggaaatcagctgctaatcttattatcattcccttgtatgtgatgagttatttgtctctcactgctgtcaatgttttctctttgtctttcaagcacttttactattatatgtctggggtggatttctttgagtttgttgagcttcttggatgtgtaatgtttttcaacaaatttgggaagttttctatcattatgtcttctaatactttttctgttcatttctttctctcctctcctggtaatcctatctcactcatatgttagtacacttaagggtgtttcacatttccctgaggctatgttcatttttctttatccctttttctttctgttcttcagattctataatctctatcgatctttcttcaagtctgatgattcttttgccagttcaaatctactgttgaacacctctaagtgaatttttcattttggttattgtatatttaattttggaatttccattcaaaatagtttctcttcattaatatctctatttgatgagaaattgtcatcatagcttcctttactcccccacccctcaccagaggtagaattgctgaatcatatggttattttatttttaacttttttgagaaactaccatactgttttccattttatatttccaccaacagtgcacaagggttccaattgcttcatagtctcaccaacacttgttattttctgtttttttttttaaatagcagccattctaatgggtgagatggactatcttattgtagttttgattgtattaccttaatgatttagtggtaaacatttgttcatgtgcctattgtccatttgtatagatttttggagaaatgtctctttaagttatttgcccttttattaatagcactgtggtttttttgttttgggttttaggagttctctctatattatggatgttaatccctcatcagatacataatttataaatattttctcccattctgtgggttgccttcttactctgttgacatagtcttgtgatgcacaaaattttaatattttcatgaagtctaatttgttgattgttttcttttttttgcctctgcctttggagtcatatccaagaaattattgccaaattcaaattcatgaagcttttgccctgtgatttcttctaaaagtttgatagtttttggtaggtctttggtccattttgaatttttgttttggtatttggcactacgtaagagtctcttttgcatgtggacatctaattttcccagcacaatttattgaaaaaaactgtcccttcctaaatagatagtctcattgctcttgacaaaaatcacttgatatgagggtttatttctgggcttttcattctgttccattggtctgtgtgtctgtctttatgccagtaccatactgttttgattactgtagctttgtagtaagttttgaaatcaggaagtgtgagtccttcagctttgttattattcaaagttgttttgactactcaaggtcccttgagattccatatgaatcttaggatgatgtttctatttctgcaaaaacatcattgggattttgatagggattgcaccaaatatgtagatcctttaattctttaagcatgaattcctttaattctttgaatatagttacagtggatgcttgaaatcttcattggctaaatatgacttgaggccttttgcaggcagtttctcttgcctgtgttcccccttcatgtatgcatactttcttgttcctttgcatgattcataattttttgttgaaactgtatatttttggtaatatatggtagccactctagataccgatcttccacccgtctttgtagcttgcttttgttattttttacttctttattcctgacttggctagactatttaatttagtctattatcccacagcacgaagcctctgtctttcctcagaggctgtatgtagccttggatatgtgcacattcacaccctgggataacagtggttttagcagagccatttgactgttgcttttcctgatctatttgtaaaagtatctacttctgctggtatcacagccagtgttaggctccacaaattgtcatctgattgctttattgtttttgatcatgtgatggggaatacattgtgccacagtctgatccaattaaatttgggcaggagtatttttgaggccagtctttgaggtttgttttgaccccaggaggattttccttagctgtctttttccacggtattctgctgttattgggtgaagggttttataaatatcaattaagttggatgaaagtattgtccaagtctcctatattcttactaattttctgtctacttatttttcaactactgagacagggatgttgaaatctttggctgcaattacagatttgtctattcctcctttcagttctatcaggtcttgctttatgtattttgaggctctgtcattagatatataagcttttaggactgttatgttatcttgatgaactgacatctttgtcattttcaaatgaccctctttatccctgttaatgtttttgctctaatatctactttgtctgctattaatatagaattggagctttaattttttttttttttttttttgagatggagccttgctatgtcgccaggctggagtgcagtggtgtgatctcggctcactgcaagctctgcctcctgggttcacaccattctcccgcctcagcctcctttgagtagctgggattacaggcacgtgccaccaggcccagctaatttttgtatttttggtaaagacggggtttcaccatgttggccaggatggtctcaatctcctgacctcgtgatctgcctgcctcggcctcccaaagtgctgggattacaggcgtgagccactgtgcccggccggatctttaaaaatttaatcagacaatctctgccctttaatttagatgcttagaccaattgcattaaaaatgaccagggacatagttggatttaaatatttcatctggctgtttgttttctattgttccatctgttatttgttcctcttttaatctacctttaattaatgtaataccacctcacctatagtatataaatgtcgcaacaatgccctttcacttcccctcatctgggttttgagctattgttgttatatattgtaattccacatctgttaaaattctataataccttattacttttgcttccaatagtcaactatgccatatattccttcctttaaaaaaattattagcttcctattggccacatccaagctatgttttaaaaggtttaaaaattagagtaaaaatattttatatttattcacatattcaccatttctagggctctttattgcctggtatagataggtattttcttctgataacatttttcttccacctgaaggacttcttttaacattcttatagatctggactgttggtaataaaatctttcaaattttgtatgtctgaaaatatttttatttaacttcagtattgagaggtattttgcttagtatagaattctgacagtttaattttccttttaccattttgaagatattgcgctactgtcttctggcttgcattgtttctgacaatgactgctgtcattcttgtttgttcctctgtatataacgtgtctttttctatgattgcttttaagatgttctctttaccgctgattaaagcaatagtattataatatgccttggtgtagctgtcttcatgttcttctgcttgggctttgttgagattcttggatctatgattttgtagctgtcttcttgttcttctgcttgggctttgttgaggtttttggatctatgattttgtaggtttttttaagtgtagaaaaattttgatcattttttttctgtccattgcttcttttcctgagattctagttgtacctatattaggctacttgaagtcccaaagctcactgatattttatttatttatatttttgtgtattttattttggttaatgtatattgctatggtatcaagtttactaatattttctgctgtaggttctagtctgctattaattccatctaatatatttgaaatttgttttaaattttgaaataatcttagattggcagaagagttctaaagataggatgtagatttcctgaataactttcaaccaacttctcctaatgtgaacatcttatatagccatgaaatgttcatcaaaactcagaaattagcagtgacacaactaaacataattggcactattaactaaacataattggcactattaattaaactacaggctttattcaaattttcccagttttcccacaaatatcctttttctgttcctggatccaatccaggatatcatgttgcattcatccatttgatttttttttaatctcaaaaatggtatttttttatttttaaaagttttattggggtctttaaaaatcttctgtgtctttctttaatatgtgaggcttgctttttaacaatataccatgtcttgtgtatatatatgtaaatgtgtatgtacacatatatacatatgtgtatacatatatacacatatgtatatgcacatatataatatatgtatacatatatatacacacatatatacatatatatacacacacacacacacacacacatacacatatatatatatacatagagagagagagagagagagagattgagagagagagaatggagtttcactcttggtgcccaggctggagtgcagtggcgtgatctcgactcactgcaacctccggctcccaggttcaagcgattctcctcagcctcccaagtaactggaaccacaggcatgcaccaccacaccgagctaatttttgtatttttagtagagacggggtttcaccatgctggtcaggctggtctcaaactcctgacctcaggtgatccacctgcctcggcctcccaaagtgctgggattacaggtgtgggtcaccgcgcccgaccgtagatatttttatataattgtttctttgtaagttatatgtaatattctattgtgtgaatatattatagcttatttgagtatttcctgttgttagacatttaggttgtatctcatgttttctttggccatgcaaacaatgctgcaaatcatatcattttacatgactctttggcacatgtacagatacttctctaggatagatattttgacaggaagttattggattgaaggtatgtttatttaaattgttgaaagatgccctaaattgccctcagaaatgttgtcttaatttaaatctccaccaagaatataacagtacccatttctccatatcctgactgatactgggtgttatcagtcttttattttttatttttaagttaaaattaaattaaattaaacttttaaagagatggaattttgctttgttgcccaggctgtagcgcagtggtgcaatcatagctcactgtaaccttgaactcttgggcgtgagtgatccgcatgtctcagcttcccgagtaagcaggactacaggagcatgccagcgcaccctgatgattattttaatttttttttagagatggagtcttgttatttgcctaggctggtcttgaatgcctgatctcaagtgatcctcccccttcagcctcccaaagttcagggattacaggcttgagccacctcacctggcctcagtcttttaaattttgtattacaatgggtgaaaaaggatatcttgctgttttattttacatttccctgatcactaaaaatgttaataataattctatttgtcattttttgccattaaaatttttttctgttgattatctcttcatattttatgctcatttttctaattttgaaaataatgatttctagaaattctttatatagtctctatagtatttctttgtgtattatatatgtggcaaacattttatgtcagttaccttttttatttgtgtatgatatcttttgttacatagaagtttaattatttggggtagcaaatttctttttcgttgtctcttgtgtaatatccccaaggttttaagtacattcgcctttctgtattttcttctaatgatttaaaagttttacttttcaatttaacttttattttatctggaatttacttattgagtgagtgaggtaggataagtaaacttatttacttgccacaataaaatttattatggaggtcattcttttctcattgatttaaaaaatgccacctttctcatatacgaatttctcacaaatttattagtctctttctggacctagtgttatgttctaaagaaattttattgtctttctgtcctcatgtcacactgttttaattactatggctttatagtgatttgtagctttatgttgatatctgctaggcgaaatcctctcttaccagcctttttcaatcattttttggctattcttgcacattttcttttccagataaattttgcaatcagcttgtcacatttcacaaaaattctcctgggattttgcttgtaatttattggctaatttgggatggaattgacatccctacaaaatcaagttttctcatccaagaacattgttttttgtctttccatcaattcgggtctttactttgtcataaccatatggctcctctccttttaatatgttaataaagtgatttatattaatgtgttttttttcctaatgttgaattatctttgtatttctgggataaaccgttcttcttccttatgttttttattcttgtcatgcatggatgctggattgatttcaggtgagctgatctgcttcagctcctgggctccccctggtggccatcaggcccttctctgtgacctttggggatggggtttgaaatagctgtgaaatcctggactccagggctcaggcagcaggatcacagatctaggaatctggtagacataaaatctgcgtgcccgagttatgtaaccatctgttttgcctccttgggttctgttagtttctctttgctaggagaccctgaggaaagagatcatatctgtgttaaaagaatctaccctctcagaatccaacagtccattcactgacctgtccctttctctaagctttataattacctttatgtcattttcaatgaagggaaaccctcaaatatagtttcacttttacgaatctggatggcttttcatatcagtaaacttataaatcagaaattatgtcccaaatttggtccagaaagtaaaatcttgcatctctggtattttgacagggattgcatttaatatgtaagtcgctttggtagtatggtcattttcacaatattctttccatccacgagcatgagttttttttctattttttgtgtgtcctcttcaatttatttcttcaatagtttaatagttttccttgcagagatctttcatcttcttggctaaatttattcctaggtattttagaaaataaattcttaacagtactgaaaagcaagaaaaagtgctatcagccaacaagaaatgttcaggaattcctgaaaaatggtaagcagatgaggttgaattgttggaagaaaccacagccaaacaaagtaaggaagggattactgcaataaggggagtggttctggaggcgttcttagttcagaggcaacagttacaaggaaaagaaggaggcaaccatctcgatgactggttaggggctctaactggcagcaagtgggcaggttgaagcagtgagcatcagagatattggcccttaagcggagtcagtcattgccaatgcttgaacttgaaactcagagaaatctctgaaggaatgaggagcacagacaatatcctcccattataatttctggagatagtcaatgaaaaccacatccacagacaggccaatatggaatcttaaataaaaagataagcctgacaataagaataagcacacgctgaaggaaaactaacatcataaaagtgagaaaccaaacccaacaaagagaaactaacattgaagaaaaccatgaataaagtaaatgagactttgaaagaagtgtgatttataccattggaaggacaagaaaggatttttcatccatggaacaataacaagtttatatgaaaacaaaaaccaattagagattctgttgattgttgaaataaagacaaaaacaaacaaacaaaaaacctcagtgaattagttcctctaatgataatatgcccctcaaatgtgttcatttatatatatatacacatatatatatacatatatatatatatgtatatatgacaaatgtgtttatttgaggagcagattatcaagccagaaggtcaagttgaagaatactcccaaatgtgatataaaagggcaaatatatggaaagaaatattagataatgtgaaagatatattcatcatttcaatccagataatagaaatttcaggtggatagaatggaaagaatagagcctggctcttgagttctttattgtgggagatttgtctatcactgcagcaatactgtactgtcttgattacaagagctttagaataattcttgttatctggtaaagcaagtatgcccactttggtattctctttacatgaacgctttgatgatttcatacaaattttaaaattagcttgacaaattctaaaaaaacttttcagaaatttgattggaatttctttgaatctataaagcaattttgagataacttatatctttattatattgagtcttccagtctataaacatggtatattgctccatttactttcattttctttaaatgtatatcattaaattaaaaaaattttctcattaaaggttctacacatttgttatttttggaactgctgttttatatattttaatgttattgtaaatgggatcagttttagaaataacattttcagtgtttattgttgttacattggaatgcaattaatttttgttattttcgtttactgattttaaggcctggaatattgctccactgtcacattaattgtagtaatttatctatagtttattttggatattcttgtagacaaacatcatctgcaaataatgacagttttgtttcttctttttcaatccttattcctttttacatattttattatgcctctgtgctggctaagatctttgagaataatgttgaaaagaagtagtaaaagcagccatctttgtcttgcttttttttttttttgtgacggagtctctgtcacccaggctggagtgcaatggtgtgatctcggctcaatgcaacctctgcctcccgtgttcaagtgattcttctgccccagcctcctgagtagctgggactgcaggcacgtgccatcatacatggctaatttttgtatttttagtagagccgggtttcaccatgttggccagggtggtctcaaactcttgacctcaggtgatccacctgcctcagcctcccaaagtgctgggattacaggtttgtcttgctcttgatctttaatgctttcaagtatcttttatttatttatttatttatttatttatttatttatttatttgacacagggtcttgctctttcacccaggctggagtacagtggcatgatcatggttcattgtagctttgatttcccgggctcaagtgatcctcctgtctcagcttcctgagtagcagcagggactacagacacacactatcaagccccaataattaaaaaaaaaatgtttttggtagagacagggtctcatcatgttgttcaggctggtcttgaactcctgggctcaagggattcttccatcttagcctcccaaagtgctgggattacaggcatgagccagcatgcccagctgcaaatatcaatattaagaatgatgtttgattttagatattctttattggattaagaaagtttctttctattcctaatttgctaagcattttttacaaatgtaatttaattgttaagttaaaatttatttttaatagtctgttcatttttgcggcacaatattcaaaaggcagaaaaggatatgtagacaaactctcccttccactcatgtcacctcataacctagttctctgctctggacactgtaacgagggtcatctcacacacacacacacacacacacacacacacacacattccccctttatttttcacccaaatgaagacataatatattactgttcttcatttggttttttttctctaagagttttaaaatcaaaaatgaatgttaaattttgtccaatagtcttcacatctattgggatgataatatagtctttcttctttattgttttaatatgatgaattatgtcaattgattttctaatggtaaatcacccttgtattaccagaagaaatctggctttgtcatgatttagaaggttttccatacacgcctggatttaatttgttaatatgttttcaggatttacatatatattcataaaggatgttgtgtcataattttccttttctatagggtctggtcaggttttggtttcaaggttatgctagcttataatatttttctatactgggatagtttgtgcaagttggacctatttgcaactagtcttcaccttgtgggaggattttaactactgacaattttttaaatggttataagttttctatcatatcacaaatcagtttaggcaaattacgtatttttaggactttttctacttcatctaggttttcaagttaatttgttatattttcttttttgttttttttgggaacagctttattagatataccatacaattcagccattttaagtgtacaattcagggctggtcgcagtgggtcacacctgtaatcccagcactttggaaggctgaggtgggcagatcacctgagatcaggagttcgagaccagcctggccaacatggtgaaaccctgtctctatgaaaaacacaaaaattagccaggcatggtggtctgtaatcccagctcaggaggctgaggggggaaaaatcacatgaatcgggcaggcggaggttgcagtgagccaagactgcgccattgcactccaacctgggcaacagagtgagaccctgtctcaaaaacaaacaaacaaacaaacaaataaataaagagtgtaattcataggcttttagcatatacacagagtcgaactgccatcaccacaagcaattttagaacattttcatcacctcaaaaagaaatctggtaccctgtagctatcctcctgtgcccccatcctccaatccctaagcaaccactaacctactttctgatcctacaaatttgcctattcttcacgtttcatataaatgtaatcatataatatatgattttttgtaactgattttctacttagcatgctgtttttaaggttcatctatgttctagcatgtatcaatacttcattccttttatggctgaataatgtttcattgtccggctatactacattttatttatctatttatcagttgatagatatctgggttgtctccaccttttagcaattacaaatagtgctgctataaatatttgtgtacaagtctttgtgtgaacatagattttcatttttcatttctcttggtgtatatctaggagtggaattgttgggccatgtggtaactctatgtttaaccttttgaggaactgccaggctgttttccaaagcagctgcacaattttacattcccaccaggagagtatgaggtttctgacttgtccacatccttgtgaatacttactactacctgactttttgattttagtcatcctaatgggtgtgaagtggtatctcattgtggctttgatttgcaaccagatgcttaatgacgttgaacatcttatcatgtgcttattggtcatttttatatcttctttgaagaaatgtctattcaagttctttgcctatttttaagttgggttgtttgtcttcttattaatgagttgtaagagttatatattctacatataagccccttatcagatatattatttgcaaatattttcttccattctttgaattctcttctcacttttttttttttttttttttttgagacagagtctcactctgttgcccaggctggagtgcagtggcacaatcttggctgactgcaatctccacctgccgggttcaagcgattcttgtgcctcagcctcccaagtagctgggattacaggcacatgccacctcgcctggctaatttttgtatttttagtagagatgggatttcaccatgttgcccaggctggtcttgaattcctgaccttcagcctcccagaatatcccttcctgggattacagacgtgagccaccatgcccggcctcttctcacttcttaatggtgtatttggagcacaaaactttattttatttttatttttatttatttatttattttttgagacagagtctcgctctttcgcccaggccggagtgcagtggcactatctcggctcactgcaagctccgcctcccgggttcatgccattcctctgcctcagcctcccgagtagctgggactacaggcccacgccaccgcgcccggctaattttttgtatttttagtagagacggggtttcaccgtgttagccaggatggtctcgacctcctgacctcgtgatctgcctgcctcggcctccgaaagtgctgggattacaggcgtgagccacagcgcccggccaaaactttatttttaatgaagtccaatttatctagtttttcttttattgcttgtgtatttgctatcatatttaagattccattgccaaagtcaagagcataaagatgtatgcttatgttttattcccagaattttatagttttagctattacatttagatcttcgatctatttttgtatttggcgtatggtaagtgtccaactttattctttgcatttggatatccaggtgtccaagcaccatttgttgaaaacactattctttttccattaaatgttcttggtatctgcttctaattttttgcagagtttgtgaaacattcatattaatgctttaaatgtttggtaaaattcaccagtgaagctatgtgggcctgtgcttttctttgtagggtagtttttaaaattactaatctaatctctttataggtctatttagatttttaatttattcttgagtcagttttggtaatttctgccttcctagaaagttgtccatttcatctaagttatctatttttttggcacacatttgttatagtgttttttataattttttttttatatgtgtaagattggtagtgatgtctctcatttctggttctagtaatttgagtcttttctcttttttttcttggttaatctagctaaagatttgaaatttagttgactttttaaaatatccaacttggcggggcacggtgactcacgcctgtaaccccagcactttgggaggctgaggtcaggagtttgagaccagcctggccaatatggcaaaaccccgtctctactaataatacaaaaattagctgggcatggtcgtgtaggcctatagtcccagctcctcaggaggctgaggtgggaggattacttgagcctgggaggtggaggttacagtaaaccgagattgtgccactgtgctccagcctgggtgacagagtgagaccctgtctcaaaaaaaaaaaaaaaaaaagaaagaaaagaaaaaaaatccaacttgtggttttgttaattttctctagtttttctattctctatttcattagtttctactccaatgtttgttatttccttacttcctcttgctgtatcttttcatttgttttaaaatatatgaagtatctgtgatatcctttttaaaaatttttatttgtgctttcactgtttttgtttctttcctttccttttttattttattttatttattttcttccttttgagacagggtcttgctctctcacccaggctgtagtgcagtggcatgatcacagttcactgcaaactcaaactcctgggcttaaatgatcctcctgcccctgcctccctagtagttgagacagcaggcaggtgccaccatgcctggctaattaaaaaaaatttttttttaaattttttgtgaagatggggtttcactatgttgcctaggctggtcttgaactattgggctcaggtgattctcccacctctatctcccaagatgctggtattatcagtgtgagccactgtgcctggtttctttttgtttcttaataaatatttcccaaactttcttaattctattaggcttttcaaagaatcaatttttggttctgttaactacccttattttaattatttcctttcttttattttcctgtatttattctgttggtcttttttcaatttttaaactcattaaatcctagactttcttttttcctaatataaatggtcatttcatttaattttaattttatgagctttgacatatagtattttgtttctgtcaggttccaagtaatttctaatttccattattacttcttttaattatttcagaagtatttttcttaatttctcaatgaataatatttttgtgtaaaccttttaatttttaaaattgattttagctgaatttctaatgtaatttccttgtggtcagagaatgtggtttgtatgatatccatccttaaaaagttttttctttttgttattggttacagcagcaacaggaaaaaacatttttattcttgctttacgacttgctctctggtcatttttcataaacatattctgtgtgcttgaaaatcgatcgtgtgtcttgtttgttgagagtaatgttcctgtatatgttcattttatcaaactttataattaatttgtttaaatctaaatatctgctgactttttggctctgaattacttaaagatatgtgctagaatttttttattcattgtgaatttgtcaaattctcctgatagttctagaagtgtttgctttacatattttgagactatgttttaggtgcatatgagactagaattggtatatcttcctggtggaaattatcttttatatttacatacagactctctttatctcatttggccttaaaatttacttggtttattattaatataattatactagttttcttttcattagtatttgccttatatttcttttttctttttctttctttcttttcttttcttttttcttccttttgagacagagtcttgctctgtcatccagactggagtacagtggcaggaagatggctcactgcagccttgaccgcctgggttcaagcaaccttcccacctcagcctcctgagtagctgggactctgaatggcatatgccattatgcctggctaattaaaaaaaattttttttgtagagacagggtcttggcatgttgcccagtctggtctcaaactgctggtctcaaactcctggcctcaagtgatcttcctgtctcagattcccaaagtgctaggattacaggcacgagccactgcactcagcctacattatatatcttttgtatccttttgctttccacttttctttaactagtcttgtgtttcagacttttctagtacatagcacataggcttaaaattttttttttggccaggtgcagtggctcacgcctgtaatcccagcactttgggaggttgaggcaggcagatcgcttgagcccaggagttcgagaccagcctggacaacatggtgaaaccctatctacacacacacacacacacacacacacacacacacacacacacacacatccaggcacggtggcacacacctgcagtcccagctatttgggggactgaggtgggaggattgcttgagcctgggaggtcaaggctgcagtgagctgtgattgtgcccctgcacttagcctgggtgacacagcaagaccctgtctcaagaaaaaaaaatttttttaatatgggtataaagagagagagaagtgaggcccaaggagggtcatgtcaagcttctagaaaccgggagactcatgacattgggtactgagacaaaacatcaacctcaaaacatcctactccacctctccctgactctaattcctctctcttctctggggacctcattctgtgagtcctgaccctctcctctggtgactctactgagaatataaagctcaatcttcttgcacctttaaagtaaaaatcttctttggcataattctctccttcagctgctgcctcatctctctcttcgcctgcactggcaagttcctcaaaaagttactcctgcctgttttaccacacggttgcccaatccagatacataggaattatgcttggctcctgcttcccctcagttctcctcatcaaatgactcagaaagtctttttaattccctctcaaaaatagatatggatttgaaatctgttccacctgctgctgtctctgccactgctgtgacatgggtacccatcatctcttgcccggacctctgaacctcctcctgggaatggatttctgatcttttcacaagctgacagtgatcctcttctcctcttggagtcctcccacccttacctgttccccaaccaaagctttctgggatttgctgaggtttgggaactccaagtccttcaatttgagttacacgggacacccacacactctccaactcccatagctccagctcctgagattaggccagagaagtgactcattttcactgggtactgtccccagaaatgctctgccaccatggcactttagggtctgatgctggaggctggcatgctgagctctggggacagcctcccagcagcccaattagtctgggttaactgaaacttgctattggcagtctccataatcagacaggtttcctgctgggaggcaatcccttgggtgtccctgactgtcccaggtgtttttcctacccttaaggaggcatggaattggattatgtgactcagtatcccaagaagttccttgttcttgactccatagaaataatgatattgctggccatgtgggtggctcatgcctttaatactagcactttgggaggccaaggtgggtgattcacctgagtcaggagaccgagaccagccgggccaaccatagtgaaaccccatctctactaaaaatacaaaaaaagtcagccaggtgtggtggcaggtgcctgtaatcccagctacttgggaggctgaggcacgaaaatcacttgaacccgggaggcagaggttgcagtgagccaagatcgcgccactgcactccagcctggaggacagagtgagactccatctaaaaaaaaaaaaaaagaaataataatattgccctaatgtgggatggagaacagacctcagagtcctcaaccagaggaaagaaaggggagtgttacttttcctctacttttgggtttctcagcagatgcactactgatgttttgggcaggacaagtcttcctccgatgggaccatcacactcattgaaggatatttgtcatgcttggatcctgcacactaaatacttacacagtcatcctgataacgccaaatacccccacatatttccaagtattctctaggaaggtagttatgccccaagcctaatccaaatgcacctagtggacatgcacaagcaagaaagtcactgagattacagtgtgctgaaatcatctgatgatttttaggcttgttttgtccacaggacctagaccttctactctctgagatcagtgactacgtttgattcatctaggtgtgaggtgtgccactattcagtagaaatacaacgcaagcaacagaacttaaaattttctagtagccacactagaaaagtaaaacaaaacagttgaaatgaatttcaataacattttatttcactcactatataaaaaatacgattattttaacatgtagacaagatttaaaagttactgatgacatattttacattcttttgtgtactaagtctttgaaacctggagtgtatattatacttacagaaatctgaactcagactagccacatttcaagtgcccagtggctagtaggtaccatattgcacagcactagaaagctctattcacttactttctcccacagctattgcctacttttttctcccaacattttttgtgtgttttcttctatttcaaacatatagaaacgttgaaacatagagaaaagttcaaacatatttcaaacacacagaaaggttgaaataattgtacagttgaatatacctaacactagtctctataattaactacttgctacagttatcagatatcaatttgtctatccaaccatctctccataacattttttgattattgtctactttttagaagtgtttctttttatatgtgtgtaggacaggttgaaaacccactcaggaaattattatctctttgaacattgttctacaaaagcttaatcaggagctttttcaaatttcagggcaaaagaacttgaaagcttctctccttttcctctttattatcctcttatgcctgtgtcctgattttcctctcctgtggattctcggagacatgacttctctttcccatcagagagcaagctttctgagtgaagcatcatactcggttacatctctcagcctagcacaatattgttctgggttagaggtaggctttggggtcagacaggtctgcacttgattctggctctgtcatttactactgcgtgacccagaatgggtgctttatttatttatttgttattttgggggacagagtctcactgtatcctccaggctggagtgcagtgtcacgatctcggctcactgcaacctctgctcccaggttcaagcgattctcctgcctcagcctcctgagtagttgggattacacacccagctatttttttgtatttttagtagatatggggtttcaccatgttggtcaggctggtctcgaattcctgatcttaggtgatccacccaccttggcctcccaaagtgctgggattacaggggtgagccaccatgccgggcaacagtgagagctttaactctctaagcctcctatgtaatgtgaggacaataggtttgttgtgagatctaaagatacatttgtaaagtgtaattattctagcaattattaaaatagttggggaggaaaaggaaaggagattattgcttatgaatgactccttttgtgctttccttgtgaatatttaggtcccagaatttacccagtgtgttgtaataatttatatttctgtctcctgtcctaggtaaaaagctcttggaaggcatggattgtcttttttctacccagcctcagcaccaggcacagagtctagttcaacagatgttagttatatcaatgaatataattctaagtgtcacaattatctttagataatgatttcagaaaattacagagacttgaaaatccagagagcaataaatcttagactgcacagattcaatctgtctccagttcttccctcgttgtgcatgagggcaaacttaggctcaagaaagttcactatgtttactgcatatacatgtctcaaagcccatggacatgctgcccagggaaggcaggagaagcagtccccttggattaatcagctcccacacatccccaaggacagtgaatctaggagacctcttccacctgttggcatcttttttttttttttttgagacagagtctcgctctgtcacccaggctggagcacagtggcgcgatctcggctcactgcaacctctgcctcccgggttcaagcgattctcctgccttggcctcctgagtagctgagactacaggcgcacgccgccacacctggctaatttttttgtattttagtagagatggggtttcattgtgtcgcccaggctggttgcgaactcctgagctcaggcaatccgccgcccttggcctgcgaaagtgctaggattgcaggcatgagccaccgcgcctggctggcatctttaaaatgacaccaatgaagcttatgattctggggtctagctgctctcttcgttggtgaataggtggatcactttgcagacctgttctacttggtgggcatgcttctgaatatttttctaaaggtgctgtaacttttgttgctttcattattatacaagtaaaatgtttattgttgcaagttttagaaatgtagaaatgccaaataaaaagcagtcacctgcaaactcactgctcagaggaagccctataaagattgcatcttgtagctcttcagacttctgtctgtgcgtgtttataggtgtaacacaaacattgccagcactaaccaccctgcatgtacaaatgaggtcacattttcatgaattcctagattttgcagaccacactccccatccaaataacatcagtgcctcagtgtattcacctctagccctgtcttcctgtagccttccccatttgtttttgaagctccctagcagctgctgcacacattttgcacttcatgcctttcttctctctccttcccatcatcctttggggccagaaggaaccaggcttctcccaggcctggatatcatggcctccatctaccttagagcttcaaacttcggctacatggctgtcgcatgtggaatggaggagctttctacgttataggagatctgcatgggctgggtcctcgtttggtccttgattcagtgtgttgaaagggagagaaaaaagaatttggaaaatcctcttaggaaactggcttgacttacagggcaaagtccaattttgaaggtcaaagactgcatgcatattaaagtccttctccttgcattctttttgtaataattcaactctctctccagacaaatgctctggaacaactaggaagaaacttacatatttggaaaagtaactttaaagagcaggttatcagtctaggcaacatagcgagaccacgtctctacaaagaataaaaaagttagccagacgtggtggcacacacctggagtcccagctacttgggaggctgaggcgggaggattgtttgggaggaggtagaggctgcagtgagctctgatcatgccactgcactctagcctgggcaacagagcaagatcctatctcaaaaaaagtatattactacttttcaaaaatattacctctatagcatataagaatttatttaacagatgcttgtggcaggttgtttgcaagtctcacaggatccatatcccctgaagtgcagcctggactataatgcgggctcctccctttcagacacatggtgtggtgcttcggttagtcaggtcttctttcacagctgtcagtgaagacttgctttttcttttgttcattggtcttccacatctcttgttaagtttattcttgtttgttcttagaagttttataatttttgttttaagtttcaataatgccttcattctgtctttgaattagtaattactgttatgtaggaaaatcaccgattttgtatttttatttttaaattttagaatctaaatttattattattattattattattattattattatttagagatgggatttcaccatgttggccagggtggtcttgaactcctggagtcaaatgatctgcctgccttagcctcccaaagtgctgggattatgggcatgagccactgctcctggtcaaaaatttaaattaagttttatttaaaaatttgaatttttaaattaactcttattagtgttaatagttctccagtatattctttcaagttttccagatatgtagtcacatcatctctaatatttctaccttttattatacattgttattgtattaagctaactaaaaatggtggaagtaagcattctagcttgttcctggtttcaacaggaatctcaaagtgctgggattacaggcctattttttttcaccattaatcatgatgttgactactggtttgagatatttttccttttaataatgttaaaagagtatcctcctaatagtacactttttttgttttactcatttgcaacacaggagtaccttggaggtactgcaggttcagttccaaatcactgcaataaagtgagtcataccaattttttggtttctcagtgcataaaaaattatgcttacactatcctatagtctattatgtgtgcattagcattatgtctaaaaagtacatatcttaatttaaaaatacattattggctgggtgcagtggctcatgcctgtaatcccagcactttgagaggctgaggtgggcagatcatgaggtaaggagtttgagaccagcctggccaacatagtgaaaccccatctctactaaaaatacaacaacaacaaaaaattagccggatgtggtggcacgcacctgtagtcccagctactccacaggctgaggcaggagaatcgtttgaacctgggaggcagaggttgcagtgagccgagaccacgccattgcactccagcctgggcaacaaagggagactccatctcaaaaaaacaaataccttattgctaaaaaatgctaatgatcacctgagctttcagtgatttgtaatattttcgctggtagaggactttgccttgacgtggatggctgctgactgaccaaggtggtggttgctgaaggttgaggtggctgtggcaatttcttaaaataagttgttaataaattttgccatgttgatcaagccttcctttcacaaaagattactttgcccagattcatcaaaggaatcactatgtatagcagctatagccttacaaaatgcatttcttaaataagatgacttgaaaattgaaattactccttgattcataagctgcattatggaagttgtgttagcaggcatggaaacaacatttatctccttatacatctccatcagagctcttaaatgaccaggtccattgtcaatgagcagtaatatttggaaaagaatcttcttttctgagtaggaggtgtcaacagtgggcttaaaatatgccataaaccatgctgtaaacagatgtgctgtcatctgggctttgtttgttcttttatagagcacaggcatctataaatctacagagtagatttagcataattcttaagggccctaggattttgggaatggtaaattagcattggcttcaacataaagtcatcagctgcaatagcccctaacaagagagtcagcctgtcctttgaagctctgaagccagacattgacttctctctagctatgaaagtcctagatggcatcttcttccaatagaagactacttcatctacactaaaaatcagttatttagtgtagccaccttcatcaggtattttaggtggaccttctagataacttgctgtagcttcaacgtcacaaaagtccaagtgctgcctctccttgtacttttatgttatgaatttggcttctttccttaagcctctgctagcatccaacttttcttctgcagcttcctcgcctctctcagcctccatagaattaaagagggttagggtattgctctggattaggctttggtttcagggaatgttgtggctggttgatcttttatccagaccactcaaactttctccatatcagcaataaggctgtttcgctttcttgtcactcatgtgttcactggagtaggacttttaatttccttcaggaacttttcctttgcaatcacaagttggctaactgcttggtgcaagaggctttgctttcagcctgtcttggccttcgatatgccttcctcactaaggttaataatttctagcttttgatttaaagtgagagatgtgactcttcctttcactgagcatttagaggccattgtaggattattaattggctttgttttgatattgttgtgtcttagggaataggaaaaccctaggagaggaagagagatggaggaaaggctagtcagtgaagcagccagaacacacacaacatttattgaataatattatatgggcgcagttcatggtgccccgaaacaattacagtagtaacatcaaagatcactgatcacaggtcaccataacagatgtaataataatgaaaacatttgaaatattgtgagaattactaaaatgtttgacacagggacatgaagtgagcacatgctgttggaaaatagtgtcgacagacttgctcaaagtgggttgccacaaaccttcaatttgtttttgtttatttttgagacagagtctcactcttgtcacccaggctggagtgcagtggtgcaatctcagctcactgctacctctacctcccgggttcaagtaattcttgtgcctcagcttcctgagtagctgggattacaggtgcaagccaccatgcctggctaatttttgtatttttagtagagatggggttggcctcaccatgttggacaggctggtctcaaactcctgtcctcaagtgatccacttgcctcagcctcccaaaatgctgggattacaagcatgagtcactgagcccagcccaaaccttcaatatgtaaaaagaaaaaaaaaaaagcaatatctgtgaagcacaataaaaatgaggtatccctgtatttatcaggaatgcatagtgaattttattaaatactttttgacatttgttgagatgattatatggttttacttttttaacatattaatgtaattaattacaacatatttttaaaacatgaaaccaccctcacattcctagaataaatttattttatggagtattcgtctcccaatgttctgggatataatattaatttgttagaattctgatatttgggacgggcgcggtggctcacgcctgtaatcccagcactttgggaggccaaggcaggcggatcacgaggtcaagagatcgagaccgtcttggctaacacagtgaaaccccgtctctactaaaaatacaaaaagttagccaggtgtggtggcacacgcctgtagtcccagctactcaggatgctgaggcaggagaatcgcttgaacccgggaggtggaggttgcagtgagccgagattgcgtcactgcactccaacctgggcgacacagcgagactccatctcaaaaaaaaaaaaaaaagaattctgagatttgtagtgtttttgtgctatgattgttaggtttggtatcagggttatgctagttttataaagtaagttatatgaatttaaaaaataaaaaaaggtctctttattttttgaaacagttcaaacagctcctgttgtggtttgtaggattattttatttaccccttttgttttttaaaaaagtagactttattttttagagcagttttaggttcacaggaaatttgagtggaggctacagagatttcccatatgaatccccccttcgctattatcagcgttccacaacacagaggtacatttgttgtaatctactctatgttgacacatcatcacccaagggccatcgttcacgttagggttcactcttggtgttgtacattctatggattttgacaaattttgaaataacacgtatccaccatcatagtgttttatagaatagtttcactgccctaaaaaattccctgtgctctacctcctgcctccttccagcccctggcaaccactgatctttctactatctccatagttttgccttttccagaatgttaaatagtcggaatcacacatatgtagccttttcagattggcttctttcacttagcaatatgcatttaagtttcctccatgttctttcatggcttgagagttcatttctttttagtgctaaatgatgttccattgtctggtgtaccacagtttatttatccattcacctgctgaagggcatttcagttgcttccaagttttgtcaattatgaataaagttgctataaacatgctataagcatgcagatttttgtgtgaacacaagttttcagctaatttgggtaaattccaaggagtgtgattgctggtaaacagtcggaatcagtaaacagctggtagagtgtgtttagttttatatgaaaattcaaagtgttttccatgatggttgtaccatttggtttctctttattgttttaaagttaaaatttcacctggatataactagatgatctggcctctttaaatagtttctttagcggggcgtggtggctcacgcctataatcacagcactttggaggccaagttgggaggattgcttgaacccaggagttcaagaccagcctggacaacatggcaaaaccctgtctccacaaaaaatttttaaaaaattagccggcatgatgggatccgcctgtagtctcagctacttgagaggctgaggttggaggatcacttgagctcaggaggtcgaggctgcagtgagccaactgtgattgtgccactgcactgtagcctggttgacagaatgagaccccgtctctaaatagatagatggatagatagatagatagacagatagatagatagtttgctgagtactaagtcactttttgatctaaagagttaattcttcaagtcaggaaattttctttatatttctttaatgattgtttctccacgggctctattctctatttctggaatgcctattatataggtatatttgatttctggatctttcttttctttctctctcttttagcctctttatttatttatttatttctgagttatagggaaagttctcaaagcaatctttccagatttggtttttaattggaaaataaatttcctgtttttgcatattttccatattcatatatgggttgacttttggaattctatttacagtataaattacagaattttactgtttttgtttcttagattctagtaaccctaatgataaagatataataacttacatcttttttcgtatgtctagaaattatcatatatttgctcactttatggagggacctagatctacatttgtttggaattgagatttgaaatgggtattctaaaagatatgtagatcattttcaaacgtgttggttccaggcaatgggaaaagaagaaacatggaatatttatagtttagttttctagattgggagatccaatcgaccatgattagggcaggaagagcttctgagaagaggagagaagtttgctgttctgctgcgcaacttcttctcactgtttgttgaggcagttcaaggtcggctggaagaatgtccccccttctctaactggcatgagcacctgggttagaaacctgctggccaatgtccttgcttttctgtgcaaaccaaaagaggagctgagccttggccaccttctctgcgagcaggcactcgcaattcccaaggttgctcagtttttttcccgcttatccccatctcagcctttttcctagtcctggctgtctattacggggctttagggagactctcctggggcgtatcctccattatttcccaggaatgtccttctttagtcaatatactcatcagcctggttctatttgcactgtatcttgttgaaattccttgaagtttatgggccagtaatgtgattttttttactgatttctagagtggaataggatttttatctctttgtctgtttcaataggaatttggaatagggaggatttaaatgcacgggtccaaattatgatctgtaaacaaccatcagatactgtaacttttgacaggtcagaatacaaaactgatttatttacagtgtcaccactaggtggtgccaccaattagtgaaaacaatgtggttgctatggctggacttccaagaaccacctgcagctactacaagcacatatttgtgagttgtctggaacttgtattcacctgtgcatatttgcatgagcgtgtgcacacacagttattggtgtataagttttcccacagagcaatgttgatttacaagcatgtgcatgagtctgtgtaccctggaaagtatgggcacgaagctaaataatatgagtttcaaaaagcttacccatcagctgtgtggtctagaactcccattccttggctaggaagtcccaaccctgaggaagaaatacaatgacaagcttttctgaagcgggggatccggaaacacagccacagtgtccttaaagttatcagtcttgcaaaccctcatgtacagtatacagtcaagcctccaagaaggtctctgtcacttctttttttttttttttttttttgagactgggtcttgctgtgttgcccaggctggagcacaatggtgtgatctcagtccactgcagtctcaacttcccaggctcaagcaaccctcctgcctcagcctcctgaatagctgggattatagacatgtgccaccatgctcagctaatcttttgtattttttatagaggcagggtttcgccatgttgcccaggctggttttgaactcctgggctcaaatgatccacccctcttagcctcccaaaatgctgtgattacaggctactgcacctggctgtgtcacttcttaacatttatgcctagtgttccattattggaacactaagcatgtgggagttatttttatcatactgatcaaggtcattgccaaggtctgattgcaaaaattcaaaaaattgcaaccttaggcataaatgggttaagtcatggaggactgtattctcaatggctgtccctcactgcccccaggagtgcccaaagcatctaaacaaatgttcactttgggatcctactacccagatggagagtgaacctgcacctaaggaaacagatgtcgtgtgtatgtgtatgtgtgagggggcactcccaacccctgcgccctccaggtttattcacatctccacctcatcttcccgctgtctctgtggaaggccctgctgatctcaggctgtcactctggacggctccctcactgcagggatggtgctctgttgagtacctgctgtatagattagcgcacgaggctgggagaacttaggcaagtgtttcccttctctggcttcagtttctccatctgtcagtgaaggctgagtctgggtgattccaaggggccgtttgagctgactgaagttcttcaagttcatagttgtaaggtcctgccccgccgccagcggctggtgtggggtgggagtcttcctggagaagttctgaggacgaaaatcccctgtttgccttcctcctcctcctcctcacaacagacttccctccttaacttccctagggaaggcagccgggctcccagggccccaggagtctgcaggaggagttcttactccagcatcattaaaagttcaagtagctcccccaagggccaaagaagtgccaggattcattagacctgctgccccctgagcccagtttggttgaagggaatgtttagccttttcatctggtgagggttttcattaagggtttgaggcctccctaagagaactcacctcagactgaggtcagagggggaagggtccctggaggtcacctcttgctccgggagttctgcagaggagacaggctggatcagggcaaggggtttgcccaacatcacagggtggaggtgctgccagaactcagagaaccagccttgcggtgtctgcagacattcctccaggcggtagggagatgagcctggagggaggggctggggactcagcctggagggaccctgcagagccagacacagagctggggctttggggagccccactgcatgtgaggaagaagcttgagaacagcccagcatgcccacagcagaaagggttgcccagagagagagtgagcacctgttgctgaggtctgtcagcaggatgggacggtgcctcccagaaggaacagaggggatttgggcctggcgggtgggcttggagggacagtcagtactgctcagatcctgccgctctgtaaatgctccactaggcaggaatggcactcatcactgctgggcagggagggtgtgacagagcaaggagcatgccatttatggccagttgagactgttgaactgggaaccaggaggctgggctgtgcctgccctctctgagctcagtggcctccttcttgcctcccagcaagcttgggaggacacccagaccctcctgcctcccagaacaggccggatggaggacctccctggatggcaaaatctgcctgtggtgcctccctgagcttctcaagctcattgagctcgggatggctcatctgacagagcctgactcagccccggagggctctgcaggctgcaggacagggaatcacagactctcagatgtcagtgtctcctgagccatggagtccattgcagtaatatcagttgcaaacatgacgggagctggtgttgctgctttacgcatctcaactcctttagtcctcggaacaccctactgaggaaggaaccgttatcagccattttacagaagaggaaacaggacagagaggttaagtaacttgtgcacaatctcagagcaagtgagtggcgtggctccaaagcccgtgttgttcatctctgttctacacagtctctacgagaggagactgaagtgcggagagggaaggtcactgagccaggcagcaggagggtttctttcctctagactcagggctcctccctcaaccagatccagcctgacagctcctctgtctccacctggcctccctgccaggcctcctcagagttaacagcggcctggcctcacccttggccagcagttgcaagtccaaacaggcttcgcccacattccctggctgctctccagcccgcagcagagacaacaaagttcagtgactgagagggctgagcggaggctgctgaaggggagaaaggagtgaggagctgctgggcagagagggactgtccggctcccagatgctgggcctcctggggagcacagccctcgtgggatggatcacaggtgctgctgtggcggtcctgctgctgctgctgctgctggccacctgccttttccacggacggcaggactgtgacgtggagaggaaccgtacagctgcagggggaaaccgagtccgccgggcccagccttggcccttccggcggcggggccacctgggaatctttcaccatcaccgtcatcctggccacgtatctcatgtgccgaatgtgggcctccaccaccaccaccacccccgccacacccctcaccacctccaccaccaccacccccaccgccaccatccccgccacactcgctgaggctgctgtcgccggtgcctgtggacagcagctgcccctgccctcccatctgttcccaggacaagtggaccccatgtttccatgtggaaggatgcatctctggggtgaacgaggggaacaatagactggggcttgctccagctgcatttgcatggcatgccccagtgtactatggcagcagagaatggaggaacactgggtctgcagtgctgaagggtttggggagtggagagcaagggtgctctttcggggctggacagcccgtcttgtgacagtgactcccagtgagccccagaaatgacaagcgtgtcttggcagagccagcacacaagtggatgtgaagtgcccgtcttgacctcctcatcaggctgctgcaggcctctggcgggcagggcactgggagaggccctgagaatgtccttttggtttggagaaggcagtgtgaggctgcacagtcaattcatcggtgccttagtccaagaaaataaaaaccactaagaagcttttgtgaagaggctcttgattgcagcatagtgggagggagggagctgcctggcctgtgtcctcattgccctgggacctccctctctgatgggaagcgtgtggctggagcaggcggcttctgtctggttcttaggggctggttgtggagtgggaagaattgggtgggctctgtctgagctctgagggaggattcagggtttgcacaaaaccctgcccacagcaggtcctgtgtgcaccagcagggctctggccttccgcgggacagtcctcggggagaggaaggttggagccgctgcgagcctggctccccagggctctgcccctgtacttttttcagcccatgtccagggcagactgagctctgaaactcgaggaagccccatccacaggctgccttgaatccagtttccttggtaattggatcagggtttcttctccaagccttgcgttttcagccatcctgccccagctggtgcctgtgtgtggtgggagggctgggaggcagcgagtggagttctttaaagtggaggctgtggtgctggggtgcagggtgttggatggccttgggagaatgctggggtctcactttcctcttctctgcaatggggtggataacagagatgcccacgtgccgaagcctggaggctcgttggaatatgctctgtgaacagctagtgggatccacagcgaggaaggaagcctggctctgaggccttcagcctgtgcctgtgagctgaggtgggaattgggggaagacaaggactgggggccaggagaggcagtggggaggggctggagagcaggccagagactcagggacctggtgactcactggaatagaatgtcctctttcctttctatttcccagtggattctctgtgagggctgcaggaggagggagtgagagagagagggaggcaaattcacactgatttctcccacctgaggtttctgggttgggaaagttgaccctaggctgccgtgcagtgtcgattttctctgcagtgtccttcaaatccacccccttctccattcccatgccctgcctagcccagccccctccatccccctcctggattcctgccagcctgctccctgcagccctgcccctttcccaggcatctccaggctgatttcacagatgaatcaaagatggggaggaggttccccgaaagcaggaaacggaaaaggaagcctatgcagggcaggagagaacccgctgagcaattgccctttattccagttcaaaaatgcggaaccactcagacaatctgcaggcggcctatggctgcgtgtacacaggaagaataggcgatgagaaatcaaaggaacaaatgttaaagcttgaggcatagtctcctggtgccctctatcaccccagttaaggaggtgatgttggtaactcaacctgaaaccacaggccctgcagatcagcccgtcgtctccttcctcctggtcatcccagttaatacaaacaatccaaggaattggcttcctgtcatggcccacagcctgctccatgtggaggaggagcccagggcccagatggtctcatcatctcagaaaagggacagattgagaatatgacaggctatcgtttgctctgaaaagttgctctcccattctgtgcaaagtgccagtttcctaatgctgatactaaagaaagttcccttgggccttggagaaactgaaaaggacccaggctatgtgaacttgggccagccctctgccctttctggcactttgcacccagatcattaaaaccgcagaatcagatggtcgctctgtggtcccatggtaactggaaagtgcactgagctaggagtggagggagggcggtccctcctcggccattgctcgtgcctgttaacatggctaattcagaatggggggcaggtcatttaacttctatgaccataggatctttttctataaaatggaggctatatcgctatgcagggttgctggggaggttatatgagatcatgtctggtgaggtcccatgcctggagttattgttctcactactctgtttcccagaatatggacaaagtggggctaatagcccagtctcctttctggaagtggtgggggtctcaggaggtgctgggtgtgaaagggctctcacctggcagactaactcagttgcctgggcctagcttattcccctgacctcctggcagggaggagggtggaaaaggcctggggtgcgcatggcgggacgggataactgctgagcgggggttggagggctgcagtgtgggtcctgggccctcgctcacaattggaggaaagaattcaggaagtgctcacagctgctcagacatctcggagccaagttccaaccaggacagaggctgcagcacccagggaggaacgccgtggtccctgggacggccaccaggccaggaggctgcagcaccaggtacagccagggctggcctttggggagcccagggtaaatcttaatagttcaagaatgtgagcaacgggctaagcaggcagcaaagagggtgggtgaggccggcatctaagaaggctcttccgggacctccgggtaaagagccccacggtcatggacagggcagggattcccggggaagcacctgatactctatctaaactgcatgatcccagcgccatgcagaaaaggacgccaaatgcaacctgcccctgcctccagcccccactaaaggccctggcacctggggtgacccgtgagtgtcccctgccttgcccagagctggcgcatgccttcctccctcctcatgtccctgcccccagcacagggccaggggctggggaggcagcagataggccaattgaaggactggcccaaggtccctcctggggaggagccgggctcctcctgcatccatagtagggggagtattttgtctttggtctgggcgtaacttgctcttgaaatctgtaggcgtcaccggagggccagcgctggctaggctgtctctgtgcaacgtcttctgacccctcctctccaccttctctgtgtccagggaatctgtgctcacgtcttccaggacagtgcttcttctagaagctgacatggagctgaccacagctcttggaggcatggcctgaggcttagaaaatagacagagatcatctgagatttcagcagtggggccacgtggcagcgcccgaaggcctggagcaggagcgacccagggactcagagcagcatcttcttaggagacggaaggagagccgccggaggagcacggggcacctgcgatcgcgaagagcctcctgttctggatgggagcgaaggctccgagaggacctaaggttgctcagtgggccatggaaacggcagtgattggggtggtggtggtgctgttcgtggtgactgtggccatcacctgcgtcctctgctgcttcagctgtgactcaagggcccaggatcctcaggggggtcctggccgcagcttcacggtggccacgtttcgccaggaagcttctctcttcacggggcctgttcgccatgcccagccagtgccaagtgcccaggacttctggaccttcatgtgacgcccgagtccccaggatttgctgtgctgatgggtcagactcacccgctcctcagcaagccttccctggccttcccctcctcccagggccttctccctgtccttcccctccagtaacctgtgaacttcccgtctcctcccattccagccttctgtgccctccagcctcagggatccttgttattgggacagcccagctggggttgacccacaggatggggcttaggagagctctgaggagtgagtgaacagacagcgccggagtgcacggtgggccggctctgctgatctacaccaggaactgaaatatcactggaatttattgtaaacggtgtgcctatgatgctggttctgttgccacctgggcacgcagcaccctcaagtggacatttctagaaaccgcttcttacttgctcctaattgattacttttgcacattgcacagaacccaacctcgaggcctgctccctgccagttgcctgaaatcagccctgaaattctgaaaccaaagagctgcttcctgagaacaagttatttaccttagaattgaaaatgtatatccttttatgggcctttccaaatctgattagaaaaaccacaaaaggaaacagaagagaaaataagagccacagaaagtacaatatgttttattaacaggaaagccagaaataagatattttaaacatatttttaatgagactttattgctatattccaacaggtcactcctattcttagagaatgtgaatgacttgtgtcacttcggagtgacagaaaaatcaggaactgaaagataattccagacaagttaaaatgttatgttacattcaaagctcttgttttcatcacaaataaggggatattcagtttttattaacagaaaacccattctcccatggccatggaataaatgccatgctatatttaaggagtttggtttgaagggtgcaaaattgtgagcctcctggctcttatgtctgtatccagccctgaatagatggctctcccaggacctgtttgttgaggggggcaggactgagctttaggggggctctggcctctaagggtgtccagacaggctgcccttgccatgtggctgccatgggaagggctttcagagtggcttggagctggagaggtgcacgcggggagggggaagtggtggggagagtgaggctgacggagagggatggggaggagcatggtgggcgaggctcagcccaggtccaggagctcctgggaccatgtcctggacactcctgacaccagccctcgacgcagggccttcagagatgcacagagaagggaacggcacatgtggggaggccctggagacggagggaagagaacttttgagggctgtgttctctaaaagcgaacagtgagacaaagttcgggtgcaagatatttgtcagggatcaacacctacaaaggggagaaggaagaagcaggattgggcagaggaagaagtcaaaccgtgatgcaggtccttcatatccccacctttgctccgtctctgagtccctctcccctctcccagggtctgacctcagccagggcagctctctgcagctgaggcaggtcttgaagcccttcctattttattatttttattttattttattttattttattttattttaggagatgggatctcactctgccacctgggccagagtgcagtcgtgtgatcataggtcactgcagcctcaaattccagggctcagtcaatcctcccacctccgcctcctgagtggctgggactataggtgcatgccaccgtgcctagctaattaaaaaatccttttcttgtagagatgggatttcactatgtttccaaacctggtcttgaactctcctggcctcaagtgatcctcccaccttggcctcccaaaatgttgggattacaggtgtgagccattgcatttggctgaagtccttcctttgaaggggacctgggcagcacatctccacagaaactctgtagggtcctgttcttggaagagcctagactggtcagaggtgggtgaatatgtccagacacaaagaaaaacctgggcacaggagatctatgagaggagagacggccgtgcaggatctggaagggagaagagtgggcctcagtctccctctctcctcagccagagtcagctctgctccagctcaggcacccttcaccaggagccaggcccagggctctgctcttgtactgtgtggtcacagcactcactaggtcagtccgggagggtctgcaggctggaatcacagggccgtgaaaacaaagtgctggtgaagcgggcatggggagggagcctggcctccctctgcaggagacaggctgtctgccaagcccggcacgctcttcatttgttcacctgcccatctgcccatccatccacccacccatccatctactcctggagtagatgccgcctcacttacccatgcattcattcacttattcattcactcctccgttcagtaaacactgactgggcactgactgtgtacccagcccggccaagggaacgtgggggtcaactggacatttggatcccgtggactcctagataaggctgtatgtgtgtggtgtgttttatgtgggtatgatgagtatgtggtgtgtgtgtaagctgtatatgtgtagtgagtgtgtgtggtgtgtgtttttgtattctgtgatgtgtgtgtaagctgtatgtgtgtagtgagtgtgtgtgtttttgtttgctgtggtgtgtgtgtaagctgtatgtgtgtagtgagtgtgtgtgtttttgtttgctgtgatgtgtgtgtaagctgtatgtgtgtagtgagtgtgtgtgtttttgtttgctgtggtgtgtgtgtaagctgtatgtgtgtagtgagtgtgtgtgtttttgtttgctgtggtgtgtgtgtaagctgtatgtgtgtagtgtgtatttttttatgctgtggtgtgtgtgtaagctgtatgtgtgtagtgtgtgtgtttttgtatgctgtagtgtgtgtgtaagttgtatgtgtgtagtgagtgtgtgtgtttttgtttgctgtggtgtgtgtgtaagctgtatgtgtgtagtgtgtgtgtttttgtatgctgtggtgtgtgtgtaagctgtatgtgtgtagtgtgtgtgtttttgtatgctgtagtgtgtgtgtaagttgtatgtgtgtagtgtgtgtgtttttgtatcctctcgtgtgtgtgtccgctgtatctgtctagcgtgtgtgtctgtgtatgctgccgcgtgtgtgtaaccctgcatgcgtgcagtgtgtctgtctctctacctgtcagtgtgtgtgtaagttgtcatgtgtgtagtgagtgtgtgtgtccatgttaacttgggtgtgtgtgtaacatgtatgtgtgtagtgagtgtgtgtttatgcatgctgtagtgtgtgtgtaagctgtatgtatgtagagagtgtgtgtgtttttgtatccggtagtgtgtgtgtaatctgtatgtgtggagtgagtgtgtgtgtttatgtgtgcgtaagcgtgagtgtaatatgtatgtggtgtgtgagtgtgtgcgtttgtgtgtgcgtaagcgtgaggtgaatatgtagggtgtgagtgtgtgtgttcttgtatgcgtgtgtgtgcgggatatctgtatgtagtgagtgtgtgtgtttttgcattcgtgtgtgtgtgagcagtctgtatgtagggagtgtgtgtgtttttgtatgctgtggtgtgtgtgtaagtctgtatgtgtgtagtgtnnnnnnnnnnnnnnnnnnnnnnnnnnnnnnnnnnnnnnnnnnnnnnnnnntgctgtggtgtgtgttggccccaggtacccctgccattctccgcagtgtagcctgctgtataagaagcaggaggggcccagcaacagggcagcggaagcctcttgctatgacggtggcctcttcctattgtccccaagggcaggaggtggctgtgcagggacaagactgaggctggcgccaacatgcagcaaagccgggagtgcttatctggtggtagtgagggaagcggctgtgcaaggtcaccctggaatctggggtggagccacactcaggcctcccagcttccaaaccgagcattctcaattctacttctcttgctggttccatttacttgccttttttttttttggagacggagtcttgctctgtcgtccaggctagagtgcagtggcatgatcttggctcactacaagctctgcccctggggttcatgccattctcctgcctcagctccacaggagcccgccaccatgccctgctaatttttttgtatttttagtagagacggggtttcaccgtgttagccgggatggtctccatctcctgacctcgtgatcgcctgcttcagcctcccaaagtgctgggattacaggcgtgagctaccgcgcccagcccatttactggacttttatgacacaccaggcacattgtgcttcctctgtgtcctctcatgagtgtatacagcaactccatcacctccattttacagatgagggaaccgagcccccatgctttgagccactttgggcaaataccaaatctgcagaacagtgctaagtagtcattttcctccataagtgatatctgcatccagccaattctcagggacacagttcatatcttcaggaggaagggagccaggggatctgatttgctccaggttcacctgagcaaaagccttgctggcacctacccatctgcacctttttttttttttttttttttgaggcagagtctggatctgtcgcccaggctggaatgcaatggcacgatctcatctcactgcaacgtccgcctcctgggttcaagcaattctcatgcctcagcctcccgagtagctgggattaaaggtgcacacgaccacccctggctaatttttgtagtttttgcagagatggggtttcaccacgttggccaggctggtgtcaaactcctggcctgaagtgatccactggcctcggcctcccaaaatgctgggattacaggtgtgagccaccactcccggccccatctgcatctttgacttgaagaagaagcaggtctttgccctgtacagttttaattgacagtccaggaagcctccctcatagagtaaacttctgtggacggctggaattaagggttaacagacatcagtcctgacccagcctgcttaaggccttcctaaggctttgcacctgcagagatacaggccgtgcctctctgagcaatgagtcttgcttctccttcacttcctggggcttctctcagctccacatggggcaaagagcagggagaaccctgctcagttctgtctagcccgactgggacgtggaaaggctaatccgagccccacttctgccactcagttgctgggcctcagtttccctggctgtacggagaaggtaagaatcccatcccggcttgtctagaggacgtgttagagtgaagatcctgggaacccagctgtcaggaacggtcaagggaaagaggcccgccccgctctgcctgccctcctccccaccacctccaaccctcgccctgctctttctccgcattcctggacctgaaaccagggtggcgtttctcgctgggacaggctggattctggaatctaggaggccttgaaataacatgttttccggaaaagtaccttccttaaaggaaactgcttgttccagggagtagaaaaggatcattgtaccttgccaggtccccattcccctgaggacatgacatttgaaaaggcagactcagttggagacagagacctgcaccccctgccctgtgcctccatccagcatattcgtaatagtgaaaagttagaaaccacctcgacaccagcaggagggggctgggctggcaaattgcaacacagccacagaatcaaatgctaggcaggtgttaacgacaatgaggtaaatttaaactcattaacctgaaagggcatttatcatgtgttggtaaattaaaagggaattagaggactataaatgtagctgcacccttagacgcatagaagacgatgtggagagctgtatgccgaggtgttgataggccattgtctctgggtgggtgggactgtttgtgcattttattttttatttacttacttttttttttttttgagatagaactttgctctctttgcccaggctggagtgcagtggcacgatctcggctcactgcatcctctgcctcctgggttcaagtgattctcctgcctcagcctcccaagtagctgggactacaggcaggcgctaccacacttggctaattttgtatttttagtagagacagggtttaaccatgttggccaggctggtcttgaactcctgacctcaggtgatctgcccacctcggcctcccaaagtgctgagattacaggcgtgagccactgcgccttgcctatttgtgcattttaaatgttttccctttgtgtttatctgaatttctcataatgaatgatttgctcttgaataagaaagagcaagaacctaacaaaggaacaaaagttattttaaaaattataaaacaaaccaactccaatctaagagatacaaaaacacagtcaggcatagacacaaaaatgggggcagatgaatttctcagaacagatacaatgataaggacacacacacacatacacacagacacacacctttcttctgcctaattcacatgctgaggtaggcaaggctggggagttgcaagcggtaggggtttgccaaggtttccaggaacaccggaatctgggtgttggggtggctgctggagcttctgggcaggttgggtgggctgaggagagtacagggagcagcctggggctcactagcctgagtgagaggcctggctgtacgacacccagcctgcacctcctgggacagggtaaggctcctaatcccagctccccagttcaggcaagactgaggagcctgccaaagcaactcttccccatcccagcagtggagggagacagcagggtccacagctggggaggagcttcctggcaaccacctacgacttccaggctgaggccttgtcagctgcctacggaccccacttaggaagccagggctgtggtggctcatacagggaccctctgtccttgtcctcctgagatacaggcacagccacagccctggtgtggggcctggcctgaggcaaggggtggatgcatgtcctccatcatccccactgtcactgtgcttgtgcagacctcaccatgtcatctccttatgggcctccctggcctcacctcacccctgcccacccagccgccagagagctctttcttggacacagacctaactccttagagggctattgggtgggtctctgttcccaccttcagagttcgctatctgtggtaggcataataatcatccctcaaagatgtccatgtcctaatccctagaagctgagaaaatgttatgttcaccaaggggaattaagattgcagatgaaatcacagttgctaatcggtagaccttaaataagattatcccagattatctgggcaggcccaatgcagtaagaaatgtcccttcactgtggaggaggagggcagaggagtcagggcaggtgatgtaagaaagacctgaagacagaagcaggccaccagccaaggagtgtgagagtctctagaaaccagaaaggaaaagacaaggaaaagcattctccccagttgcctccagatgggaacatagccctgccaacatctttttttttttttttttttgagactgagtctcgctctgtcgcccgggctggagtgcagtggtgcgatctcggctcactgcaagctccgcctcccaggttcacgccattctcctgcctcaacctccccgcccggctagttttttgtatttttagtagagatggggtttcactgtgttagccaggatagtctcgatctcctgaccttgtgatccgcccgtctcagcctcccaaagtgctgggattacaggcgtgagccaccgcgcccggcctgccctgccaacattttgattttagcctagtgagtcctattttggtctctgatctccagaactataagataatacatttgtgttgttttaagccactatatttatgctaagttgttatagcaacaaagtattcttagctcaaccattagtgctcacaaagacttagccttgaattagctcctctagttaaatctattcctggccgccaagagacagagaaaggtggcctctgagggggtcaggtcttacagctgaagaaggctgttgggtctggagtatgggtgggctgaccacttagagatagggaagggagtcagaaattacatttcctagtaagtaggatgagagtgataatgtgacaattgtcaggccctgcaccaggtgttgggcaatgtgcaaacccagtcatccttatccttaccctacagaaacacccacgcaagtgtgcaagcatgtacgtccaaggttgttcttacagtattgtttctattagcaaaacattataaaaatccaagtacccatcaattgggaaatacataaagattatgatacagccacaaaaaatggaataataggcagccattacaaaaatgtactgacttggaaactgccctctatacatagagaaaaaacagcaagttacagaatggtctcataaaacaaaaacaaaaacaaacaaaccaaaaaacacttttcctcctcaagaaaacaaaaataagaacaaaaaaacctcctaaattacacatatgcgtatgtgtttgtatgaacctaggaaaatgtcaggaaggatgtgatggcctctgggggacaggcttggaggaagaaggaagcttatgttttacttcatatccttctgtcctgttccaccttatttgaacaagcatgtgttgctttttattacaatgttaaaaggaaaaatccttagactaactaagttcaacagtttacttgaccaattaaaatgattcaaaacaaagagaaacaaaaaacaatttgggaatcaggcagccccccagaaccaaaacaggttcagagaactttcagagaactcaggccaacaccatgatcaggcaacatttgtagatagagagagaacagaagtgagatacagagacaacttaattggttacagcttaattggttgattagttctacctaaacgtcttaccttattcaactcagctgacctactgtagttcattaagttcagctgtgtgactcactgaacctcaaccatttgcaagaatatattcctaaagtaattagtttcattaagcgtgatggcttcatattggtttggtctgctaggctcagtaaaggacactaattcaaatcaatggcctcctattttaacacataataacttttttaatgttaagataacacaggttaagaaagcaaacttgactgtcctgttctgtgacaaacagctgttatttgcaaaaaggactccctgggttgagggagaccagagctccacttagcaaggccactcaggaaacagatggaccaacttgagttctttttctgtgtgagctcatctggggaatgagacactgtggatcttctgagtggaaaagtggagtcattcaagccctcctggcttctacagaggtgagagctgaagttctgaaaggggaactgacatattcctctacattttatggcacttccagactaaaatataactttctggcctccatttcagtgaactttgaacttcctcaaaactcacactccccttttcgtaatccataatttttatgtgagggataaaattttctgttttacagcctgatcctggctacttacagaatggctgcactttaaacccaaggtgttctttgcaccctgtagccccagcccataaaagagacaaacactggcagagagatggtcccaggagagcagccgggaggaggcactggagttcagggctccagtcccagctctgctcatctggctcctatgacgagggttgtatccagtgtgtggacgtcccctctcctcaggctggaaaccctctgaggtcagtgcagagcctcggaatagcgacattgacatctgtctggcacataatggccttcaaggtgtcctaagtttacaaagctctttcccaggcatctctcagttgtctcccataacaagccttggggcccagtaaagcaggctgtattaaccgcagtttacggatgagggaaccaagacttagagacacaaaagtgacaggccccactccaagtcactcaacaaattggtcacaaagttcagcacaggaccatattatcccctctccttcagccagagcctcatttttgcctcttttatatcttctgtttcccaggtagattttgcttgataaaaaggggtctgctgctttaaaaggtttgaaagctccagaataatgtttccaaattccccgcgaatacttctgttcagtattcaggaatgagaaattgaaatttctgggaattcatgagcattcctgaaattatacattaaatttttttttttttggagacaggatcttactctgtcacccaggctggagtacagtggtacgatcatagctcactgcagcctcgaactcctgagctcaagtgaccctccttcctcagcctcccgagtagctgagactataggtacatgcctatagagtgtgcccctaacatcttcatgttagccattagggtgctcctggctattttgttttcttcttttctagagacagagtcttactatgtgaccaggctggttttgaactcctggcctcaagctatcttcctgcttcagcctttcaaagtgttgggatgacaggtgtgagtcactgcgcctggctcatattttctataacattatattcacatacttttaaataataatgaatgaccagaataataaacagttaataattgtcagtgacaaattgatgctaaaagttccagactttttccttaaggtttattattattatgaaccaatatgttgtgacaagattatttcaataacataaaaattatctccacctgatataggcactggatatagaaaacattaaaaaggagggaacattattgcaaaataaatgccagataaaaatcacttaaaaatggaaaaataatagcacaaacatttaattttaaaagttatttttaaaatgaacttttaaaacacaaagctttaattgctctatctgatagttttgatctttgttttgtgacaaatattctagatgtaggaaacttttttgttttttcatttttcattgatgttggttgagtgtgcccctaacatcttcaggttagccattagggtacatgttgttttatagaagctcatttcctttttaaatgatgctttatttttatttttactttttggtctgcttactctggtcttgattttgccattgagatcaatattgctcttgctaattcagattttagagcaatttctgatttccttctggagtgttctataacagcaatcacgtcttctttttgcatctcttctgttaaagtatttacaaagaactgtagcctataatgaatattcaacacgtggaaatgccagcaatcattactgggaagtgttcaaataactaacattcagactcactaacaaggttcatagaatcacttgttggaattgccagtttcaagacttattttgctttcaaaatttgttattttttccgacactgctcataggacttgtataagtatcctatgtgtacaaacttaccaatatttgttttatttgcaaaaatgacttaccattagaagcagaccaggtcacaaacacacacttataaccagtgtgtgctggtaaactgactctcctggagaaaaaaaaaaaaacccttatatgtagggtttgccaaattctgaggggaggcataaatgttcccacaatggtcaatgcccagctaccgaggggatgtcactgagagctgggaagagcagcatacaactggctcttcttgagccagcgctagcccaccaccacctctaccctggcaacagcagtcggaagactgattagatgatggccttttctctcctctactccccagttccattcagaacttaactttcctatgggtgcctcagtattttctactctcgcttttgatttggtgtcagtggattcctttgaactagtcacatctagttcaacatgttgattgctaagctttaattctcacacaaaaacactcttaccaggttcctagatgtcttaacttctttttctcaggaattggcatttggaaaaacagtatttccgagaaatgctgggaaggaattcctgcataaaaacacaaatctggccgggcacggtggctcgtgcctgtattcccagcactttgggaggctgaggcaggtggatcatgaggtcaagagatcaagaccatcctggccagcatggtgaaaccccatctgtactaaaaatataaaaattagctgggcgtggtggtgcgcgcctgtagtcccagctactcgggaggctgaggcaggagaatcacttgaacccgggagatggaggttgcagtgagccgagattgtgccactgcactccagcctgggcaacagagggagactccatctcaaacaaagcaaaacaaaacacaacacaaatccaggaaacccaagtaaaacctatttgcttgactgatcgtgatcctactggatacattctcctgggtcccaattttggccaccgctcattttcattgatctcattttaaggggtttgaggtatggagtccttaggatttggtgttaagtttggtgatttttcagagaggccgcaccagagctgcatcggtgatcatttgactttatgtctgaccctgtgcacaggggtctacttgtctcctaacctcagttttcctctttttccttattagaaaaacaacaataacatcaacacagtccctcttggaactaggaatggccagtagaagtggtgtgtgacttctgggaaatgtccttaaatagaggcggaatactcttctttgttttttctcctttatctggccagaatgtagatataatggctggagctacagaagtcagattggaccagagtggccttgggagtagaagccccatttgggggaacaataagataaaaggggcctgggttcctgatactgtgggagcccatatcagtcctatactgccttcttccaggcttttataccaaagcaaaacagtcttatttaaaccactattgatatgtggttttctatcactcataactgaaacaaattaaacagcacaccagtgcattgtattctgttacatagtttatgggaggccattgttttggactagcctcctacactggccctagcagagcagatcaaaccagagcagagtcacctgtgctaactgccaagtcatcaaaccggactttgaaatgaggcagttttccaaaaacgcaggagcttccagtcaccctgaatcagcacaataaaaagtgccctctgctttaaccctataaggaaagcaactttgaaatgaccaatctgctttttgttccctgtttctgctttcttcagccctcttttatccataaagccaaacttctctgcccacttcactggaatactcattctatttcgtagaatgaggtgttgcctgattctagaatcacaaataaaagccaatttgatcattacaaataatttgttgtaattttgcctttgggaagttcctagtgaaagcaaaagctactagcaagaatccttgaaaggtttgtaatggaggtgaaaatgaaagactgtagcattacccagtgactcagagagtgtgggggaggcagctgcatctagtgataatggatgatacatttggaatagaagaggctgtggtttcatgcatgcctgtcttcccatctgccaagaaggctgatgaataagcttttatactcctctaagttggtaaaagaagttttcagatttttaatactcaaaggtcttttcacaaatgactatgaccttttcttttcttttcgagacagggtttcactcccgtcgcccaggctggaatgcagtggtgaaatctcggctcactgcaacctctgcctcctgggctcaaatgatcctctcgcctcagcctcctgagtagctgggactacaggcatgcagcactgcgcccagctaagttttgtattttttctagagacggaattttgccgtgttgcctaggctgctctggaactcctgagctcaagtgatccacctgccttggcctcctgaagtgctgggattacaggtcggagccactgcgcctggcctctatgcctgtggtctttagtttgtaggaaccagaccactcaaaggctggaacgtaccttattgctctgccagtgaatggtttaggaactggctgaaggagctggggattcagtctaggaagaacttacaggagttgggattgggtttgagagctgctttcacacatctaagtaaaaaagatttagccttcctcacagagggctctaggccaaaaccagaacccaaaggtggaggctgccaactttaccctaaattaaagagaaacctcctacccatcagaactggatggaggtagctttttgatagcaactctccactgctgggaatatttaatcaaaggatgcagaaggagtcattaactgagcagcagttcccatataccagcctatgtattggtacctacctgtctataacattttccaggtctcagccaggcacggtggctcatgcttgtaatcccagcactttgggaggctgaggtggaaggatctcttgagcccgggagttaccagcccgggcgacacagggagaccctgtctctacaaataatttaaaaattagccaggcatgatggtgcacacgtgtgtggtcccagctacttggaaggctgaggaggagaatcaattgagcccaggaggtcgaggctgcagtgagctgtgattgtgctactgcactccagcctgggtaacaaagcaagaccctgtctcaaaaaaaaaaaaaaaaaaaaaaagagagagagagagaaaaaaaggcaatgtagtacattttaaaaataaaactaaatatttgcaatttgaagtacattctctttattccaagattatgttctttctatttcaggaggtgttataatgtctttttttagtagtaggtggtattagctattgttgtttaacaccctaattagacaacataaaatcttggcaatcctatataattccattaaaatttacactggctataagatctagaagtctggtaatatggatgagatgacacctggttgtctgaattgaccttccaaggattagtagttcattcgagtgtctactagatgccatttttgtgtatttacagcaactagataatttcatggttcaaatcagagaaaccagtaatgtgatccacgtgcttatggtaacttaaactttattgactattcatttttgacacatatagctactttttgatagacatgaattttctatttgcatttaaaaacaaaactaattttcaaagttctattctcaaaatggcaatgatgacctttctaaatgctctctttaaataatcctccaatattctcagaaatttagtgtacctacagcaaactatttctcttagtaaaagccttctgtgagcaacttaactgtctgatgtctttatccgtgtgagcagggactgggtcctgtcctttttcttttttttttttgtttgagatggagtctccctctgttgccaagctggagtgcagtggcatgattttggctcactgcaacctccacctccagggttcaagtgattctcctgcctcagcctcccaaagtagctgggactacaagtatgcgccaccacgcctggctaatttttgtatttttagtagagacagggtttcaccatgttggccaggatggtctcgatctcttgacctcatgatcctcctgcctcggcctcccaaagtgctgaattacaggtgtgagccaccacgcctggcctggtcctgtccatttttacagagcagagagcatctagcatgccaccacattaatgtaatgataataatttccatttgtctagagacttatgctttacaaggcccttatagtttacttccccttaatggtagttcaagtagcagagaatgaccttttcattgtccttctctgtgataagccaaagtgaatgtaatgtacattcttcatagtgaaggctttctacctcattcatttattcacaaaatatttattgagcatgattatgtgttaagcactgaactgtgctctgtgctgctgggcactgtgtgttaggtacaaacacggcagatggagccccttcccccatgaaatgaacattctaatggggcgttagtcaataaacaaataaataaatagattgtcagggggtaatgagtgttatggggaagaataaagcagtgggagctgggaagcaatgggaggatgtcaatcttagggacatgagaaggcaccctcatgcagagacttgggcaacgtgaaggatcgccactgtgtgaccaactggaggaagcacgttccaagtcttgtggcagaaaggagcttggctgtttgagaatcagcagtgatatcagtgtggctggagggaagggaaggtgggacgagtgggtgggagataatttccagaggtggacaggatgcagattatatgggagtttggatttgattctcaagtgtgatgggacactattggagggttttgagctggggagagacatgccatgaaatgtgaagtctggcctgcagggaagcaggtacaccaactgaatgagttcaatttggagatatatatatttgagatggagttttgctcttgttgcccaggctggagtgcaatggcacgatctcagctcaccgcaacctccgcctcctggattcaagcaattctcctgcctcagcctcccgagtagctgggattacaggtgtgtgccactacgctcggctaattttgtatttttttagtagagatggggtttcttcatgttggtcaggctggtctcgaactcccaacctcaggtgatccgcccacctcggcctcccaaagcgctgggattacaggtgtgagccaccgtgcccggcccaatttggatatattttaaaggactacctgatgcgttaaatgtagaagatgggggaatgtagaatgctccacagagttttgtcctgagcagccaggtgagtggcgatgcttttatttacttacatgagaagaattgggaaggaatacgttagaagaggagacttgagaaaccaagagtaaatgttttggattagtattaattaaattggaaaagtctatgacacatcgaagttcagatgtcagataggcaggtggttattcaagtctgaacttaagaaggatgggttagggctggcaaagttgctatgagatccatccttgtggatctctgctgcctggtcagcttagatacagtagaagccatttaacttattctaatggcacctagaaatttagcatgatctcctaatatcttcactacatttcatctggaatatttactacattctacatctactgaaactatcagacattagaccaatacatttcaaaatacagaaagtataatttgaaaagttaaagaatatgattttctattgaatttacttagcttatttagaagtcactttgtttctgaatgacagctgtatcaacatgacagcactttccttgaggatccacaggtaagagctttgtggtgcagatacctgttgagccagcagtctctttctagaattcaatcctaaggaaataatcaaagactggatcattttctcaacaaagatgttcatctcgtcattatttgtaaaacaaacattggaaacaaagtaaccaccaataaatagtagattcaataattatagcataggacaggcacagtggctcacgcctgtaatcccagcactttgggaggccgaggggggcggattgcctgagctcaggagttcgcaaccagcctgggcaacacggtgaaaccccatctctgctaaaatacaaaaaaattagccaggcatggcagagtgcgcctgtagtctcagctactcgggaggctgaggcaggagaattgctttaacccaggaagcagaggtttcagtgagccgagattgcaccactgtactccagcctgggcgacagagcaagactcatctcagaaaaaacaaacaaaaaaaattatggcatattgataaaatggaaaattattcacacattaaaatgatgtcaacaagttttttgtaacatagtaggtatagttatgatatgaaattaagtgaatcataagatataaatgtgcacatacaatatgatctcaattacataaaaatatgcatgtataaaaaatgaccagacagaaggaaatgacttcaaaatgtttagagctattaaccacaggggatggaattccttcttatatttttgtccaatcttcctatcatgggcatgtattatttagtattctgaaaaaaatccagcatttggattgaaggcaatgaaaaagaaacaggaaaatagaactagatttggcctgggatttgggactgtggtcctggtttgccttccctcccactttgagcagagggaatgccatgctttctctaagcccaagatttctcacctgcaaaatgtggacaagcatcctgccctgtctcccgcttggggctggtgaaaagattcagtggttatgccagccaaagggctgatcacagacacagttcaaagtttggaatgtgaagtgtccgccccaaagttccaggatgtcctgcttcctgaagagcacagttagtccaggaaagaaactgaaggggagcaaagttcacagcccctttgggcatcgtgtccagggtcccctaggaggtgggtcttccagcgtccacgacatgtgagcccagtcccgactccttcgtgccttagggttggtagttagatgggagagacctcagcgatcacctgataataatacttgttttatagttatatttagtgaaaattcacaagtgtcaggattgatgccttttactcattttgttcaccattttgttcatgaattccacccaatatctacctgtgtagttggagttattaaattcattgttatatggcagaatttccctttcgtaaggcctgacgcacaccaactcctgcttttgggatgagtgagattcacacgaagctgggataacaaaagtttgccttctgtaagacaactcaaagctcagagagagacagagatgctgggggcataataacgtaaatctaagtgatgtactacgaggcaatcactggagctgtgctaaaagtctgactgtctctgggtgcttgaggcttaggttgttttctttcatctcctcctttgtgttcacccatttgaaatcatctccattcaggagaaaacaagatggaacccagtgactggccaccatggacacatgcaagggagaaggagaagtccccagtaggaaaaggtgagtcggagggagagtttaaagagcccacgaggcttagggctggagcttggtagtgaaggaagaagactaaagaggatcccaggtagactgaaagaggggcaactgcttgggcagcagccagggttgagaacaaaggttgccaagacctttgaggaacatgaggggcaacctgaatagggcacaggacccacccctaatccttcctctatggtggatgctatggacattgcaacaggcaactggaacccaaggaaagaatccttgaatttcttgcaagtgactacctggctaatcctcagacagacactcttctccagttatggtt

SEQ ID NO: 23616 - DNA, 3138 bp, Homo Sapiens
ctttctccctagggtggcgtgggttgcatccctcggaagagcgaaggaatgagccaggtcggggggcggggagacaggtgcacacaggaggtccagggcttggtccatggggctggtgacctttctgcttcccttgcagaaaactctcccaccatgtcgcagaatggatacttcgaggattcaagctactacaagtgtgacacagatgacaccttcgaagcccgagaggagatcctgggggatgaggccttcgacactgccaactcctccatcgtgtctggcgagagtatccgtttttttgtcaatgtcaaccttgagatgcaggccaccaacactgagaatgaagcgacttccggtggctgtgtgctcctgcacacctcccgaaagtacctgaagttaaagaacttcaaggaagagatccgtgcgcaccgcgacctagatggcttcctggcgcaggccagcatcgtcctgaacgagacggccacctccctggataacgtgctgcggaccatgcttcgccgcttcgccagggaccctgacaacaatgagcccaactgcaacctggacctgctcatggccatgctcttcaccgatgccggggcacccatgcggggtaaagtccacctgctgtcagataccatccaaggggtcaccgccacagtgacaggggtgcggtaccagcagtcgtggctctgcatcatctgtaccatgaaggccctacagaagcggcacgtgtgcatcagccgcctggttcgcccacagaactggggggagaattcctgtgaggttcggttcgtcatcctggtgctggccccacccaagatgaaaagcactaagactgcgatggaggtggcgcgcacgtttgccaccatgttctcggatatcgccttccgccagaagctcctggagacccgcacagaggaggaattcaaggaggccttggtgcatcagagacagctgctcaccatggtgagccacggtccagtggcgccgagaacgaaggaacgcagcacagtctccctccctgcccacagacacccagagcccccaaagtgcaaggactttgtcccttttgggaagggcatccgggaggacatcgcacgcaggttccccttgtaccccttggacttcactgatggcattattgggaaaaacaaggctgtgggcaaatacatcaccaccaccctgttcctctacttcgcctgcctcctgcccaccatcgctttcgggtctctcaatgacgagaacacagacggggccatcgacgtgcagaagaccatagccgggcagagcatcgggggcctgctctacgcgctcttctctgggcagccattggtgattctgctgaccaccgcgcccctggcgctctacatccaggtgattcgtgtcatctgtgatgactatgacctggacttcaactccttctacgcatggacgggcctgtggaatagtttcttccttgcgctttatgcctttttcaacctcagcctggtcatgagtctcttcaagaggtcgacggaggagatcatcgccctcttcatttccatcacgtttgtgctggatgccgtcaagggcacggttaaaatcttctggaagtactactatgggcattacttggacgactatcacacaaaaaggacttcatcccttgtcagcctgtcaggcctcggcgccagcctcaacgccagcctccacactgccctcaacgccagcttcctcgccagccccacggagctgccctcggccacacactcaggccaggcgaccgccgtgctcagcctcctcatcatgctgggcacgctctggctgggctacaccctctaccaattcaagaagagcccctacctgcacccctgcgtgcgagagatcctgtccgactgcgccctgcccatcgcggtgctcgccttctccctcatcagctcccatggcttccgggaaatcgagatgagcaagttccgctacaaccccagcgagagcccctttgcgatggcgcagatccagtcgctgtccctgagggccgtcagcggtgccatgggcctcggcttcctgctgtccatgctcttcttcatcgagcagaacttggtggccgccttggtgaatgcaccggagaacaggctggtgaagggcactgcctaccactgggacctcctgctcctcgccatcatcaacacagggctgtctctgtttgggctgccttggatccatgccgcctacccccactccccgctgcacgtgcgagccctggccttagtggaggagcgtgtggagaacggacacatctatgacacgattgtgaacgtgaaggagacgcggctgacctcgctgggcgccagcgtcctggtgggcctgtccctgttgctgctgccggtcccgcttcagtggatccccaagcccgtgctctatggcctcttcctctacatcgcgctcacctccctcgatggcaaccagctcgtccagcgcgtggccctgctgctcaaggagcagactgcgtaccccccgacacactacatccggagggtgccccagaggaagatccactacttcacgggcctgcaggtgcttcagctgctgctgctgtgtgccttcggcatgagctccctgccctacatgaagatgatctttcccctcatcatgatcgccatgatccccatccgctatatcctgctgccccgaatcattgaagccaagtacttggatgtcatggacgctgagcacaggccttgactggcagaccctgcccacgccccattcgccagccctccacgtcctcccaggctggctctggagctgtgaggggaggtgtaggtgtgtgggtgactgctctgtgctgcgccttctcatggctgactcaggcctggggcatctgggcattgtaggggtgcagtggtatgtgcccacccctctcccattatcctttagctttaggccaagagcgttgctcagggcagcttctgcccagggtgggtgggactgagcaggatggattttcttttgataaaagagtcgatgcctgaaagagaaaccatttccttgattgtgtaaggaacttgctggacgcacattaaagaataaagctcctgtttctaggctcctaaaaaaaaaaaaaaaaaaaaaaaaaaaaaaaaaaaaaaaaaaaaa

SEQ ID NO: 23617 - DNA, 163217 bp, Homo Sapiens
  misc_feature (81732)..(81732): n is a, c, g, or t
  misc_feature (112365)..(112366): n is a, c, g, or t
  misc_feature (120596)..(120596): n is a, c, g, or t
ggtgtttggagactgtatccggataatatatgtgaaacaacctatcgtaaaccctggtggttaataaatgtttgccttcccctccgtctgccccctcatcagggtgcacacctcccctccttcggaggccctctgtccctcctccccatcgcccagcgtgagcgaacatcccttatcgccgtgggcttaagggttgtggccatacctgtcagaggaaagaggacagcggctcagctccggggtgggggagcaaaaactacagttcccagtcctcgctgcgccgccactggggccggagcccaggacgccaggcccctcctctggggaggagcctatgcggggggcggagctaggaggaggttggagagttaagccaagccaatgagaccagctgctaataagtgggcttggcttacaatgtaacagtggcaggaggaggcgagcgaagctattgagccagcgaggagtgaagctgagcctggcctcacacgctcctagaggaccacctcctgagagagttctttcaccccctcttctttctccaagctcccctcctgctctccctccctgcccaatacaatgcattcttgagtggcagcgtctggactccaggcagccccagagaaccgaagcaagccaaagagaggactggagccaagatactggtgggggagattggatgcctggctttctttgaggacatctttggagcgagggtggctttggggtgggggcttgtgctgcagggaatacagccaggccccaagatggacacttctgggcacttccatgactcgggggtgggggacttggatgaagaccccaagtgcccctgtccatcctctggggatgagcagcagcagcagcagcagcagcaacagcagcagcagccaccaccgccagcgccaccagcagccccccagcagcccctgggaccctcgctgcagcctcagcctccgcagcttcagcagcagcagcagcagcagcagcagcagcagcagcagcagcagcagcagcagcagccaccgcatcccctgtctcagctcgcccaactccagagccagcccgtccaccctggcctgctgcactcctctcccaccgctttcagggcccccccttcgtccaactccaccgccatcctccacccttcctccaggcaaggcagccagctcaatctcaatgaccacttgcttggccactctccaagttccacagctacaagtgggcctggcggaggcagccggcaccgacaggccagccccctggtgcaccggcgggacagcaaccccttcacggagatcgccatgagctcctgcaagtatagcggtggggtcatgaagcccctcagccgcctcagcgcctcccggaggaacctcatcgaggccgagactgagggccaacccctccagcttttcagccctagcaaccccccggagatcgtcatctcctcccgggaggacaaccatgcccaccagaccctgctccatcaccctaatgccacccacaaccaccagcatgccggcaccaccgccagcagcaccaccttccccaaagccaacaagcggaaaaaccaaaacattggctataagctgggacacaggagggccctgtttgaaaagagaaagcgactgagtgactatgctctgatttttgggatgtttggaattgttgttatggtgatagagaccgagctctcttggggtttgtactcaaaggtaggggctgtggtttctctttataccttgaacaaaaggaatatgtaggtagcaagagagggattgagagagggggattgtgagagagagagattgagagagagagagagagagagagagagagagagagattgagagattgggagggagactgggagagagaggtggtggtggtggtgagaggcgcttgctcagttatattcaacactctaacttcccgtggttttccttcttgatcccgggagaattcattcctagcttcctctggggggtaggggacatccccacacactgtgtctaatttgcagactctctgttagggaggattcaataatcccttctgagaaatcgcttttcctcctggctcactcgtactaaagcataacccagcagcttaacgcaccaattaattacactccgccttcatgtgtttgccagttcctgcgacttccccttctttcctcccctccctgctccactccattttcctgaggataaaaaagaaataaatgtctgggtggggggtggggattccgtaccattgcccaagtcccttctctccctgtcttctccatctcttcccaagtttctgtttccctcctcttctcagagagtctcgggcaaaatagaaaaccatccatgacctgggtctcctgagggcatggggtaaaaatataggtggaggaaatcagtggtcctttccctcaggagagaggactcagaataaacctgctgctgcttcgtaaacatctcctgataaaaatggctacaggtgttacctgggcagagcagctgggcgccgccttggaatcagctgggggagcacctctccttgggacgggatgacagggcttcccaggcggtccccacaagcccgcgccccagctcagccccagttctcccctcccacctcaactcctccttgggataaataaagatgagtgtgtgtgtgagtgcgcgcccggatggagaacagcaggcactggctttagcggggagctggccccactgctccagcctctcagtccagccccaagacggaggagggggtttccctcccagagggagtggagatggaggaaggtgggtttctgccgatgctctgcttgccggggagctctcctgctgtgggctggaaggcttggagacctgggaatcggtggacaagtggctccacgatacccccacccccaatttgttggtgtgtgtgtgtgtatgtgcgtaatgtttgtacgtatgcatgcgcctgcttgttgcttgggtttttctatttatttgtcatttggggcagggggtggcttggtgggggggtggctgggcgggctggccatcgggtagctgggaggggttcagctgttggaggtttcaaatagagcttgtttcaggcagggcacagctgctgcgagactgtcacattccttattgaaatccagccgcaaaaacctaggaggtgctgatcggatttcccccattcccagcatctcactttaatcggtgatgggcagactttcccgccctggaaacgggtggggcagacctgtcagacgacctgaatagccaggaccaagacttccaggcagagggtcctccagcaacccggctgctctctcagtgggctgccccagcggagggcagcacctggaagccgccttagtcaaaatagctcaaggatgagcgtctcagcgagcagaagcgagtggggtttcccttggaagcgcagctcacttagtcattccctgtaatgagcctctgcgtctgcgggtccttctgctcgctgccttctcagaaccgcctctcctgctgggcgctccaggatatggggctggcagcctcgctaggactggcagctgccctggtcacagccctggctctctccagtcctcccttggagaccaggggccctcactggggaaaactgatgaaggcccaaatgcaaggggggtgtggggaaggggcaatcccagcaccttctctttcagtgacacccgtagtcagagttcttaaggaaacggctattcccagagacagtggctgtgcacagatcccagtgtgggatctatgcacatttgtcttaacgcgacgggagagtcaccactctgcaggatcaggccctcttccctgcctggggcaggtgccacccctgagggggagctcagggaaaggggctttcccagagatgcggaaggcagattttaggtgaatgaaaggggaggccacctgaggtgcttggctccccgcatttctgaatcacagaccctcatagcagcagtggcgtgcaccgagggggcagtagctgagaggtccttcttgcctcagcggccacttcctgtgtgccttggggctggtcttgagataagcagagctcatttaacttgctcactcattcacccatccctgcactgtccatccatgttttgagtcatttatgaaacaagtattttctgggtgtctcctatgtaccaggccttgtacacactgcagggccaagatagatatccctctctcctggaggcaaatgggaacatttcaaggaactgggccagagttggaatcccagctctgccactactatttgtgtgatcttggataagtcatggagctttagcgagcctgtttccccagctgtcgagtagggagaattaaattagagacgtgtaaggcacgtatctgcctgctcaacaaatgggacctattgtgattgttactgatgatgacaatgatgagaggaaaggagatatctttttcctgttatctaactctggctgtaaaattagttggagctttaacagattgggatctaagacttgtcaacggagtgagaagttgtatctgggagggaagaagtcctgagaagggactgggtctgactagagaccacctttaagcatggtttattcttggggggaggtgaatatctgtgtcccagtttcatggaggaagtggtctctactcctccatggtctgggttagtcacagcccaggagagctcagggacattcagtggaccctggggagggatgggtgacactcttttgctggagagctttgtgtgcctggttggccctgctgaccagtctggaggcaggcggatggacaaggcaacctcaggggtaccaggcagattaggtaattctgcccatccagtggcagctcccactcaaaggcccttgggaggtgacaaactttttttttccccaggtgattgaagattaactaaccttgtgcctgagctgctgctttctgaagttctctgcttttttttccgtggggttgtggccttgctgttcacctatgtttggcgggtggctgctgctggggaagtaacttgtcatgcaggcctgggtcttttgaaaaggagggtggcatgtgccctgagcatgttcagttaatgcaaatgggagccaatgtgagggggttgagcaaccgggacagaacatccccagctcctgcctcacaggcctgtaggtgctgatgatggaagtaagctctgctaggaggcatcagcctggagcagggaggtggggcttgattcctgggtgagctcagataagaggagagcttctcattattatgcctgggacatgagatcaaacggcagagatgcctgagatggccccagtgggctcctaaaggtaccaggtgacccttgaaccaaatgaggagtcctttttttttttttaataggcaggtttactctctgaagtcttagacattgtgacgaggcctggtctagagattctgttgagaatcttaatcacatcatctgtactgatcggtgccacctgggtagaccagcaaggacctggggagtccttcttagtgttctttattttcttttagagctggtttggggcacacccactccattgcattaaattacctgtatgctctcttccctgggttcagaaagaattagggaagggaaaggcctggctgccctcccctttccccaggctgtgacttcaccaccctgaccctgccatcatgttggtggctgagctggtacctctgtgtggctggcaaggcacccaggggccttgtttctcgggatctcaggcgttgggctgtgggatcttctcaggggaggctggagagtgctggtgtggcagcatggctcttcttttccaccaatctgtacaacctcaagccacttccccatgcccggccttgaaactggtctgcatctctcctcccaggcagaaccagtcctctgcccactcccccaccatgctcctgtctcgcctgccccactgatttcctgcccctctgctcctctctgtggcccctgcctggcctcgttgctggggtaacccaggtggcagagaggagttggtgtgaagatgcttatccaggctgccctgtctgctcccacagtgtcttcttttcccacttctagttactctttcttcagacaacctcatgggaggccgcttctccgtatgcccaggggagcctggtcgtctggccattcactctttaaacagaatggccaaggccaacttgtctgtctctttgcagacctcacagaggtccctgagtccatccccagcctctagaccaaatgattgagtagtatcactggaaccagttctgatcctctgctctccctggtcacggaagccttgtctgcagaagggcagagcagcagtgcaggcttggctagccaagtggctctgcaccttctgtttggacccaggtgctgctttgggataggttgttggctgtcacagtgtcctggtatttttgagaagatgcctctgggtactggtgcctgtgtttcaggccatggtggaaaagtaggagtaggatagaccctttccagccctttccatggaccctccctgtggggtgacctgcaggaccaggatgcagaaggcaggagactggctgagagcctgcgagcccactgccgagggccctaggcacacattttgtcttcacaggtcacactgagtgtgtcggcccacaggagggcaagcgtgaaaatggccttttgacagcgtgaaaatggccttctccgccacccgccccagggtggtggtgactttatttataatctttgtggacagtctgtaaatgagtcaaacatctgtaacccacagggggacagctaactttttatatatgcttctcctttgcgtgtcatcacactatttataactgtcctggggaaagacttcatcacacatccggacttcccttccccacaggcggcattacccaggtgctccgccaggggcatcctggctggggcacttatctcctgcacagcctaagtagaaaggcggctgatgcctcgtatttctcttattgtgcttttaggaagagggatttgtaaggccatggtcaaaagatctgctttaaaaaaatataaggtaaagaaagtcaaaatgaaaagaaatttgagtaacctctgtagagaatctggggcctggatggaaatgtaagatcagaatagagcgcttcagctctgttgcagttatttgtgaagcacatttgggggagaaaatgagtgtgtgcgggggttgtgaggggcggctgtatattgatgaaataccactttactcagctcagtgacaggcaggccagcacattcatttgtagttctttttcttctctttctttcaaaaccccaaaaggagagcaagaaagcaaggcacctattcctctttaaataatgagggtggggaattctgagactgtgcttttcccaggagctgtagggaggaaaattctagtgccttttcttcgggtgaggaaagtccggaggaggcgaatgggtttttaagtgccccctcccccgaccctgtcattccacccccaggagctcagctgggatctgagggaaaggaggggaggagcagctgggggcagggaccacgctactttctggtcacccagcacttcgctgggctggccgggatgttgctgagtgacaggagaggggaaggcaaggaccatttgctgagtgctgggctggctttacattacacccgggagtacaaggagcaggtcgtgctcaccgccccctgtgtagatgaagtcaccgggccacactgacactgccagcggtggtggcactgagataagaacccaagcccgtttagctcccaagttcatgccctttcccttgcctgctgctgcccatatccttaaaagagaaaaattgagtttatggcactgagacccgtgatgcaaaatgttggaacaggaggaactttaccacgagctgggcaggaagggcttgatggagggcgggagatgctggcgcaggtcctggagaagacagtgctggaggggtggccagggcaagtgtgggcaccccaggttggcctgggatcagggtgagattgtggactggcccaaggtcagttcttgatgcctcctctctggggtctggtgctgctgccctcagggtgataccgggcaggttgtgaggagggtaggtgtggagaatacagggaaaatgaaagcccttcctgcaaaagctccttccacagcccctagcacccccaccttccacccctggagggccagcaggacccctagacctgactggacatgtccatacataactctctcacccctcacctccaccttgctcttctcttaggctgcctttctcctccagcactggctgtgtggctgtttatcgggggacagtcacatgagctcagcatcttacatcttacaaggcattttcacccctgggtccctcatgaccctcacggtggctggcccagggctcatgatgaccaactatctcagggatgagaaaactcggctgcacaggggttcccagggttgagtgactcactccaggtgcccatctcaggaaagagagggttctagaatgagagctcaggtctcagtacacttctgatttccctattccaaaccccaccacaaacttctgctggggatttgagtgagggacctcgaagggcttctccattcctggttctagaagtttctttttcattcttgagtcccattttcctgcgtccctgtctgtgcctcatgcctctgttgagctctgtcatgggcagtgagtgccgagaaaaggcccgtctctgctttgagcccctcaggaggtgcttctgcctcttgcttccagcttgttgtgtgatctttgtcgagtcccttcccctctctgggcctcgtttctctggcctaaaaacaggagctgaactcccttcctgtgccgaggcttcgcaatctgattccagatcatgtttcatcacgaggatgagcagccacagtccggagagtcctgttcttaggggtgtcagacagcacccagatggcatccatcccaggcggatggtggtttatggtgttggtgcttgggaggactgaggaaggagacagtgactcagactggggatgctgggtggattccctgtaggaggttggggggtccctgaaggactagacaagccatgatgggaggggctcgggcaggggctcaattctgagtgtgagaagcccggggagagggggcagagtgtgtagggaatagagcaggcctgagggcagcttcaggttgctgccgtgtggtgcacacaggggcatgtagggaggaaagaggagactgtctcgtctggagaggctttgggcaggcagtgaacacaggcccagggcgagggcacagtgatggatggaatatttggtagcatcagtaaccaccagggctgcagagttctgcacactcaggccccgaagacctgatatccttccttttagaggtggccaggcttggtagttaaggacttggggccaggcgcggtggctcatacctgtaatcgcagcactttgagaggccaaggagggtggatcacctgaggtcaggagctcgagaccagcctggccaacatggcgaaacctcatctctactaaaaataagaaaattagccggacctggtggctcacgcctgttatcccagctccttgggaggctgaggctggagaatcgcttgaacccgggaggcggaggttgcagtgagccgagatcgcgccactgcactccagcctgggcaacagagtgagactccatctcaaaaaaaaaaaaaaaaaaaaacttgggtggcacaccagtgatgggcgctctgggaacttactgaacccaaagcctatttcctcagtgttaagagggaatcacaactactggctgtagcacagcagccaccacagagccagccacacactgggtctcagcagctggcaactgttgcctttattagagtggtggttagaagatgccacctggagcatcaagacaggaggggcatatgcgcccatgtcacccctccactgtctgcaggtgtccctgcctggagagcacgtgtggaacatgccccttttctcatgagccaaatggcttcccgtccgtgacaagctccccagtcatgtttctggatagaccttgttgggtgaatctctgtgagtaaaaaggaagtgggctgttctccggagggcagggctgcagtggtggcctgggctggacttctggagccttcttaccccatggggccctgttattctacactcagttagcaatttgtggtctgggcagagctaaccgggtgtggacatgcaaatcggacaggtggagagagaacaaaaataaacccgtggggccaggccagaggctgagaggcctggaggaaggtcagggggacacacgatgaccaggcagaaaaaggctgagagagtagggccacagggagagccgaactaggaagctgacctgggacagaagcagggaagaaaagcattgccacagcttgcctgatgcgtcgtcaagagaacacaatttccccttcaagacttgagtcagggtgctttctagaattctaaagattctttctgccccttcaccctgcttggagcaccagggctgtggcagtgggtgacgttcccagccaggtgccagggggcaggcagcaagagcagctgggcaggggagggacgtgcccagggcttgccctttgtggaagccatatctgtttcacaagccctgggcacagggtaaccagagttgtattctgagcagagccttgatgatactaaatgaacagcatgcaaatgatgtgtgaaataatatgcaaattggcatctgttatttttgagtcagcttgttgggcatttttcttaaaggacaggagtgctgctcagtgtcaaatgaacaggaaagtcagcttaaaggacactccttacagggactgagctggcacctactccttagagcttgctgataccaggcctgccacgcgacatctgcaaggacagttgtttggtgttttgcttcaggttatagatggagagacctataaaggtgggtgccctgcccaggttacccagtaggtagggaggaggaagcagatgacctgttgcctggcttgagccattgaaccttgctgacctgtcagtggctttgagctgagggggccctgcagggaggcagggagaggctgcccttgctcattctggtccatctgccaccgttggttttccttaagctctgtgcctcaaactctccgagcctcagtgtccccgtttgtaatggatgtggggagactggcatccactaacctggggaggatgacacttgctagtggttggtcaagtggccagcctgctgtgggtgctcctgggctgccagcaagtggtggctcctcctagcccctttgcctgagttggcatcagcctgcctcctcgcaagcttccactagcagcgatttttgcagagcaaaccccttttgagatttctgattttaacgaattggagtttagctattttctttcttttctggcttccagtgggtaagatgttggctcccaaaaatctcccatacatggaaatggccggagctgcctgcatgggtgatgttacccttctcccaaggtgagggcttggggtaggcatgttgctcagggttgagccaccgcctttggagggctcagagctggatggcattggtggaggatgcaggggaggcctcctcaggggggcaccatacctgccctagatggccaagctctgtaggccagccaggtgtgctagcctgggtgggcaagatccctgcatatgcctcccagccctgtgaggaaggcagggaaaggaccatcctcctccttataggaccccaaggcccatagaagttatgtggtggctcacacctgtaatccagcactttgggaggctgaggcgggaggatcggttgagtccaggacctcaagaccagcctgggcaacatagtgacaccttgtctcaaaaaaaaaaaaaaaaaagttacatgacttgtccgaggctactcagcattgttagtggcaggggcatagctggaatcctggaattcctggttttagttcttcctctctttttgtttctcccatccctcttctggaaacatatcctgaacacccactgtgtggcaagccctgctccaggcggcaggagtgcagagaatctgtgccttacagactccaggggggtctctccccagccagatgtgttgttctccaccaactcttcctaagagagcacaggctttccccatagacctggattcaaatcctggctatttggctgtgtggccttgcgcagcggcccctttatttgggaggtggtattttaattcctcttgtgggtggagaggtgaagaattcaacgtgggccagagctgtcacccagggggctcttgtccatgctgggcaatggtgggttttaccttggttgtttcttctgagagctcagtggccttgggatcatgcaaggtccctcacagctgggcccatggttcccagcccctcctgctctgggctggacctggtgttaagctctgccaagatgctttcccctgctctgggagagtaatggtgctgagcctggtgggagggcattttggcagaagacacctgacggggtgcacactatgtgccagcgatggaaagatcccttaagagtgaaatgaaattgatgcaagctgagagcaagtctaggatggagttgagtcatgagggtttcctggtgggtggacgggatcatatagaaagaaagcctgtgtccacagcagcttgggggaaggcaccgctctcattacatgggaacttatttttccttccgtaagaatgactccaaagcaacaccgggtcttattcaggagtgaagaggtgacaggcggtggagaagagaatatttattaagggcctactatgtgtgtttacacacctcatctcattaagtcctcacaacaaccctgtgaggtagatataattctccccgttttacagatgacagacccaaggctccgagagtttaagtgacttgctcagggtctcacagctgggaggtggtggagtttggatttgcacacaggggagtgtctccgacgccctcacattgtgcagcagacatgcttttgcatatcagatcctagactgggctctttcaagccaaaaagcttctcctgccctgcctgagctctccactcccgcccaccccaccccttactgtgccaccctcagtcccctgccagcctcccccagagcctcaggggatgttttgtgctcatggagtggggtaagggtagagggaggaggggaggaggatgctggcagtttagatacaggggtttgctgaagctccaggtgccgtgctgggctctggggctgaggaaagtctcctgtggccctggaggggccacccgagccctcaacagcatgcgtcctagtgttcttgccgcagctctgtggcttcgtcgctgtgcagccttgttgagaaaactgacctctttgagcctcagtctccaggtctgtgaatggggttaacagtgttttctctctctcatgagaatgggtgtcatgaggaataaatgagacaagggcactgcctggcgtgttctggttggttctgggggttcagcaccaaatagacatggagctcacaggctggtgggggaggcaggcactgaacaagtaacaacaggtctgatgtgagctttgcgagagacaagggcacacacatgtggcttgggtttgacccacaagcctgagacttggtgtcccacgcctccgtctgctccccttccccccatttcctgaaggtccatctcaccctcacttcttccatcctccctcatatctgtctcccaggccatcctctgattcttctatatgggctatctagcctggtgttaggagaacaggctttagtgccaagcagatattgggtacagcgctggctgtgtcacttactgtaggctgtgtggctttgggaagctgtctcagtgctttgattcacagtttccatgggggtgaatcctaacctggccgctggggctgtcatgagagttaatgagatattgctgtttgtaaggcagaggacatggtttctggcacacatggagcgctctgtgaaggccagctgagttgcaggtgaggagaagcatcctaggctaggtgtggggcagcttagtttctggtcctctgttttgtcatctagagagtgagagaaggagcctgaggaggggatgtttcctgcactggccatctgcgggaaggtcgtgagcaccagatggaatttcggagagaactggaagaaagctacgctattccagctggcgggggtcctcatcgatggtgcatgttggcagggtgggctgcggggggcgttatcttcctatcccacaagcgaaagcctgtgaagacatcgtggctaaggggattttctcactctcaggagacagctgagagacaggcccttctggccagcctccctccctgctgcctcctccctgcaggccagcccttggcacgagtcctgcttgtctcctgaaccctcctagcagcagggatttaattactataatgtaagtagctgtggcttgaggccttctggtggaggggaaacagatttgtcttctcactgggagaataaaagtctatggaaaggaaaagaaatgtacttttccccgaggtacctgaggctgttgggctcaggggagcttccctcagggcggggagagggagcatgggtggcagcgggaggaggcaccacgtctgactcaaggacccttggcgcttgcttttgctctctgtgggatcactcagctaagctgcctcagtttccccaatgaccctgctaacagatcagcctgacattcagtaggcatctgtcaagcacctaccatatgctagacacttagaaacttccagctgagtagccagcccaggcggaaaaataatttcattcatttgacaaagttattgaatgcctgttatgtgccagtgtattgttctaggcatcacagatatacagtcatgcgttgcaacgacggggacgcagtctaagaaatgtgtcattaggcaatttcatcattgtgtgagcatcatgcagtgcacttacacagactaggtggcatggccttctgcacacgaggctgtatggtgtagcctactgctcccaggcctgtattgaatactgtaggcaatcataacacaatggcaagtatgtatctaaacatagaaaaggtacagtagaaatactgtacaatggatacaaaatactacacctgtatagggcacttaccatgaatggagcttgcaggactggaggttgctgtgggtgagtcagtgagtgagtggagagtgaatgtgagggcctaggacatgactgtagactagtgtaggctttgtaaacactgttcacttaggctaactacatttatttaaaatatttttttcttcaataacaagttaaccttaccttactataattttatttatttatttatttatttatttattttgagacagagtctcactctgtagcccaggctggagtgcagtggcacgatctcggctcactgcaacttcaacctcccaggttcaaagaattctcctgcctcagcctcctgagtacctgggattataggcacgtgccatcacacccggctaatttttgtatttttagtagagacaaagtttctccatgtaggctaggctagtctcaaactcctgacctcaagtgatccacccgccttggcctctcaaagtgctgggatgacaggcatgagccactgcgcttggccaaatttttcactttataagctttttatactcttttgtaataacacaaacacattatacaattgcacgaaagtattttctttatattcttactctataagtttttttccattttagaaatatttatttaaaaagatgcatttttacttacaaaatcttttttggttaaaaactgagacacaaacacacgttagcctgggctgacacaggttcaggatcatcaagatgtcacgaagtgataggaatttttcagctccattataattgtacaggaccttgactgaaatgtcattatgggacacatgactgtagtagaaaaaacccacaaaagagaaaaatctttgctgtcacgaatttacattttaatagataagcctgatagtaaactatctaagttaattatatattatgttcgatggtgataagtgctatgatgagtgttatgaagagcctcttccctccaagatacaacttcttactccattgacaagtcttagatcccaatctgttaaggccccaactaattttacagccagagttagataacaggaaaaagacatctcttttcctttcatcattgtcatcatcaataacaatcacaattgttaggaccactctggatgggagtgcaggggcttctgagaggagagtggtcatattattttatttattttcaaattaatttattattattattatttttgagatggagtcttgctctgtcgcccaggctggagttcagtggcccaatctcggctcactgcaagctccgcctcccgggttcacgctatcctcctgcctcagcctcccgagtagctgggaccacaggtgcctgccacaacacctggctaattttttgtatttttagtagagacggggtttcaccatattagccaggatggtcttgatctcctgacctcatgatctgcctgccttggcctcccgagatgctgggattataggcataagccaccgcgcccagctttttttttgtgagacggagtctcactctgtcacccagactggagtgcagtggcgtgatctcggctcactgcaacttccgcctcccagattcaagtgattctcctgcctcagcctcctgagtagctgggattgcaggcacataccaccatgcccagttaatttttgtatttttagtagatactgggtttcatcatgttggtcaggctggtcttgaacccctgacctcaagtgatctgcctgccttgccctcccaaagtgctgggattacaggcaatgagccaccatgcccggctgagagtggtcattttaaataaatgctcagagctaggtgcagtggctaatgcctgtaattctagcactttgagaggccgaggcaggaggatcgcttgagctcaggagtttgagaccagcctaggccatatagtgagacgccttctaaacaaaacaaaaaattagctgggcatggtggtgcgtgcctgtggtcccagctacttgggagtctgaggtgggaggatcgcttgagcccaggaggtcaaagctgtagtgagctgtgatcgtgccactgcactccagcctggggaatagagtgagacctggtctcaaacaaaaacaaaaacaaaaacagaaaacaaaaaccacaaataaaacaaataaagaagtgcttagggccaggcatggtagctcacgcctattatcctggcactttgggaggccaaggcaagaggcttgcttgaagccaggagtttgagaccagccaggacagcatggcaagactctcatctttacagaaaaaaaaaaaaagctgagtacattggtgtgcacctgtagtcctagctacttgggtggctggggtgggaagatcccgtaagcccaggaattcgaggatgcagtgagctgtgattacgccactgtgctccagcctgggtgacatgtgaaaccctgtctctaaaaataaacacataaataaataaattaaataagtgctcagggaaggccttaccaaaaaggtgatgtctattggaggatctgaagtggtgagggatccagccacctgggggaagaggaatagcaaggtgaaggccctgaggggggatcatgcctggtgtgttgtagacagcactgtccggtggacacgaaatgggagctaccgctgtcattttaaattcctgagtagccatattaaaaatagtgaaaagagaaaagtagaattatacatgttaataatatttttaatttaacccaacatagccagaatattattatttgaatgtgcaagcaatacaaaaaattattgagatcttttacactttattttttgtactaagtctttgaaatctggtgtgtctctgacacagcatatctcaatcagacattaagttttcattggagatacttgatctgtatttagagtttataaaatttacaattaaaagaacagacttgctgggcatggtggctgacacctgtaatcccagcactttgggaggcagaggcaggtggattgcttaaggccaggagttcgagtccagcctgggtaatgtaacacagtgagactctatctctctaaaaaaaaaaaaaaaaaaaattagctgggtgtgtggcatatgcctgtggttctagctacttgggaggttgaggtgggggatagcttgctgttgaggctgtggtgagccatgcgtgtgcctctgcactccagcctgggcagcagagcaagaccctgactccccgtccgagaaaaaaaaaagaatagattcacacactcaagttgttgaaaacgtacttaaaatttttccaataaaagagtggagtgtctttttatatttaattttaaatgaaatggacttaaaatccagttgcactggtcatgttgcaggggctcagtggacacacgtggctcgtgtcctcacactggacggtgcaggcctgggagcagagaggatgcctgtgaggctgattcagtgagtggagggatcatgtgggcggggttgtgaggtcacaggggaggcgggtctggctctgcagggatttgtagaccgtcctgaggagtgtggcctttaccctgggtgagatgggagcaagaggagggcttggagtagagaagtgacaagatctgacttacattttaatgggaccactctgactgcagtgtttggaacagacagggagggtcaagccagggtcagggagccccgctgagaggctgtggggacagctcaggtgagggtggtgatggtttggacctgggtggtagcattgagttggtaaaaagtggctggacccttgggctatttaaaaggagggcattcctgatgaattggacaaaaggtcatggtgtgcaggtcaggcagtggtgagagaaaggggaagtcaaggatgaggctgagacttttggcccaagcaactggaaggatggaatttctgttaattgaatggagaagactgtgggagaagcagttttttgggggaagacagggagtttgtggttggactcgttaagtttgaggtgtatcaatttccatataatgcgtgtagcacctgccccaggggttgtaagaggtcacaggatggtgcttgaggccgtggcaagcttctgcctgggctcctgacccagaacagatggctcctctcaccttccagaggtctgttcgaggcatggctggcaacgttaaaaaaaatttggccgggcacggtggctcacgcctgtaatcccagcactttgggaggccgaggcgggtggatcacgaagtcaggagtttgagaccaacctggccaacatggtgaaaccccgtctctacaaaaaatacaaaaattagccgggcatggtggtgcacgcctgtagtcccagctactcgggaggctgaggcaggagaatcgcttgaacccgggaaggcggaggttgtggtgagccgagatagtgccattgcactccagcctgggtgacagagcgagactctgcctcaaacaaagcaaacaaacaaacaaacaaaaatcagctaagttatccatgcctccagcaccgtgggtgttgactccctgaaggtcactggaagttgctagggtctttctgagtcaatccacatttcaaggtcaaatctccctgctctgggctgatgaataaaatgtgtcataaatgctcagaagctcccccagtgtggcctggaagcctgattttatggaaacttactgaaatgatacaaaacgctaaagatatgcattcctaattttctagcactttcaactccacagggatgttgggggaagggattaatgagcttggagaggtggaataacctcctcaaggtctcccagctgggggaaggtaagcactggatgttgggaatcaccagcctcatgtgcaccaaccatgtcgccaaatgtccaaagcctgcagagggcccagggctctcacggaccacacagggaagccactgcacctgttctttttaagactgggaggagagtggggaaaggcagcaggtatggcttttgaggtcctctcctagcccagctggtgtctgatgctggcacccgggcttggagggtgagagtcttgggacctgtagaccaaggccacctcacttgggcagcccaggcctgctggacatgggccttctgacttagtttcaaagctggaccctgacccttgttggttgcaggacttcagtgatttaatctttgagtttatctgtttcattggggtgatggtgcctgccttggaggagttttgtgaagtgatgttaatgaaggagcttaggccggtgacttgacacatgcccaacataaggaatgcctgtggggccgcctggctctgcccctagagtggagggagatggtgcagagggaacagtagaactggtatgggctgcggatgcctggcgagtggcatgagtaggggagaaagaagcgcctgccagaatgggagtgagggagaacagtggggggtcccctcccttaccacaagacctgggatctaactgtgcctttagatcagagcttctcaactggggcacttttgctcctcaggggacttttagcaatgcctggagacatttttggttgtcacagtcaggagagggatattatagtcctttaatgtggagaggccagggatgccccctacaacaaagaattacccagcccacaatgtcagtggtactgaggctgagaaaccctgctttcgatgactcattctcaccagcttgttatgaggatgaatgcgaaaatggagcctgcatttctaactgcagcctgcccttccaggtcctctcgttccctcaccctttcccaagggggctgcctctgtcatcaagcagcctggtccaggagtcagcagacctgaattcaagtcctgactcctcatgcctcagtgaagtttttccttagtttctagtctccatgtcttttcatccttggaaatcttgtcttgagtggggcagtggtgtctacacagtaatggggctgtggtgtggactgagtgggaacccggatgggaagcatgcttagtcagctgtgatgtgccggcaaagggaggcagcaggccaatccgctttctagtccagcactgaataatagccttggggggcattgcccaggaacccccattggcccctgcgaggccacatggctgttctcccaggcctgctccatcttgcttcttgcttgtgtttccttgaacaggtggagctagtctccatttggggaagatggaatttgcaggaaaatgcagggctattatttctgtgctgtgtgagtgggagacagagctggttgagtggcagatttcctggcagggggagaaacagctaagtgtgccagcccaggcatcgctagaatcctcttgaggtgagtgggccaggattccccagtggccacctcgggaagcaaacatttgttctgagctcaggaccagccccaggaaaagatggggtttgctgtcggggaaaggtctgtaccaatatattgaagctctgagaacattctactcggcaaactttcactgatgcccattctgtggcaggcactggccccggggacgttgggggacacagagatggatgaggctgagggggtgttcgggctgccgtaactctgaggcaaggcagactgtgctaagtgcggtagagaggctctgcatcccgttaagggcctgccgcggatattaatgtttggaggcttcttagaagaagtaggggttgagctgggttttgaaggaaggtagggcttcatgaggcaaaagggaatgcgtgttctgagccgaggcaacagtaggggcagaggctcaaagttggagagtgccctgtgttcttagggagggctggagaggtaggttttcctagaagttctgggaagagaagactggagagggacatggagccccctgcccgtgaagctggtggagtagtgggggcttcacgaactaggctgatgaatttgcacttttgtctaaaggcacagggaacagtggaaggtatgtgagcagggcagtggtgtgctccagccacagcatggaggatgggttatagagagaggaagctggaagcagtgttactgcgatagttgtgaaaaggaggaatgaaggcttgaacccagctcggggcagtgggaagggaagatatggggggaggtctggggaggcaggcagcttgtcaggcttcacctttctccatcctgggtatctgagttgtgtgtgaggctcgaagtgactgtcgtggcccactcgccacattgctctgctcaaagcccagccttttcttggagaatgacaagcagcgagcatcaggcagccttctggtcccagagaacaggatggcacggtgcccacaccagccggcaccagccactctggctggggagggggggaggcctccttctggaactcatcagcgctggcttctggccaggcccaaaggaggtggaatacaccctcttcctgctcgttttcagagatttgggaggagtaggtatggaggacagcagcagcgtgctggagccggctactctcgggttcgtgtcggagctgggggagtgactggctgtgcagttgggcaagttgcctggtctccctgaacttcagtgtctgtgtttgtaaagtgggcattatgatgcttggcccacgggtggctgtaagggcatcacacaggtgtaattacgcaggtgtcatgttcttagctcaataaatggcctctgtttttaattgtcaagatatgatgatggacttgacttgatgggtggggagaggcaagacctccttgcctttaaaggagttgaagacttgggaagcagttggaatggtgaattctatcttgggcgtgttggctttgaggggctggggaaaatcctaggatattcagaagaaatctagggacttctaatcatgtggttcacataaatgacccttactataatatctatctcagagtcaacttttcaagacaccagcctccctgcaggcaaccccagtgtggcatcaggagagcggggtcttgggtcagcatggccagcccagcctctggctttgcttgtgtcattggtgactccccgtggtcctcggtgccttcctccgtgatggcatttcccattggctggctgggcctctgcccagggatccagctgggtgccggcccagctcaggctccagagaggaaagagccctggatctggggccagtgacctgatattcacgctggctctgccccttccctctcggtgtggcctggagagatgtgcaggctccccgagggcaggggggggtagtgaggagggttccaggagatgagggatgtgaaagcagcagcacgtgcctggcacacaggggccctggtagatgcttggcggacaagtgagggcaggcaggggagggggcagacaggattcagggaggcaggcctgggaggagcccagggctcagggaggggggtgaggggtcaggcggagccggctcaactcctggctctgccgcttactagcaggaagactccgagtccggtgcctgctttggtcacatccatgtgtgggtggtggtgatgggaggttggccttgggggccgctctaatgcctacctcacaacatagtgataggtctagatggatacacagcaccagggcctgagagtgctgaataaaccttcattcctcctctagtaagcacagtaaatccctagagggcagtccccaaaggccttgattaccccaactgtggagtacagcgagaagtggagcttctggagccagtgctttctctgctcaattttgtgtattctttcactcgttcatctgaaatctgacccagccccatggaaactggctgcagacacccaatggcagtagggtaccaaggggcaggggagcaatcggctcccggtgcagacaatgaggggtacactgtctgtagaggatatagaaaaataaataaagccaacaaaaagtctggtttttgttattgctgtgtaccggcacttctaaacaaggtcagtgataaaacactcctcctcccggggggcagacgctcctggctccccctcagtatgctgctgcctaatcgtcctccagaaaggagcctcgggggctgtaaatatcaggaaggaactcagcaaggcctggcagaagaagccagcgatgatttggagaataagcccattgatgattgcaatagcagcatggatttggggctcaggagaccaggaaggggagggtgccacactgtgaagtaagggtaaggcaagagagtggaggtaactgctgtgggttctggctgggagaggcatcgtctaggccctttagacgtggtcaggaagagggtgtacttcatctcccttgggcctggcaggaagccagcgctgatgggttccagaaggaaagccccccagccagggcagccgctgccagctggtgttggctggtgtgggtgctgtgccaccccactgttttggaccggcaggctgcttgccatcttccaaaggggactggcctcttgacaagggtaggaaaggagccagggctgccctatgggcttgggggctggtagggcgttggggaaggcaggattcacatttctctagcctggacaacaagcatgtgcgtgaggatcaaaatgagcacttttagggttttattactattatttactaaacaagtttccttgcagggttgtggaaggggcccatgcagaaggatctgtctagaggaggaggctccgcatgtgtacaagggaaggacgtgtgcccttgggactggctggggcacggccctagggaagtgtgtgtgtgtgtttgcgggggtggtctggtcatgtggccccttccctgactgaaccccttgcagggccccatgccacacagcaatgctgcgtccgttgcagaagcagacacctttggctcctgctgtgtgggaagcaggtgtgcattagtcaaggtggcctcagtggtcctgggtagtggggcccccgcagtgagaaaagcagagacctcttgggcccgggggtgtaggagtcactctccctgatctgctcccaaatgcaggtgcatctggttccatttggagccggtgagctggctgatggtggctgtctggggctcctggggctgagcagccaggctaagcttagcccacaggcacttcccagaaactggtggcactgtcacagtgttggctggatgctgaggagttggcaggatacagtgcaggaacagcaaataggttttatctgggtgtcaagttgaaacaattggtaccagcttccaggagggctgtgttgggaaggattctgaggtgttgtctgagctcaatgggaagagtgccctgattgattcatgaggtctatcttgggcaggggaaatggaagagtggcaaggggtttgccatccctggtgtagtggaaaaaatacagagagcctagatttgatcttaggtgagtggccccagttttttttctctctcttttttttgttttttgagacggggtctggctgtgttgcctaggctggagggcagtggcacaatttcagttcactgcaacctccacctcctgggctcaagccatcttcccacctcagcttcccaagtagctgagactacaggtgcccgccaccatgcccagctaatttttgtgtttttagtagaggcggggtttcactatgttggtcaggctggtcttgaactcctgacctcaggtgatccacccgcctcagcctcccaaagtgctgggattacaggcatgagccactgcaactggccccctagtttcctcatgtctaaaatgagggtaaaaatgtggcccttccaacccgatagccttattgtgggcgctgagtaagatagcagagcgaaagccctttgtaaaatataaaaaagcgatacaaacccagagtgggggttttgttgttactgagtctcccaggaacctggagtgacttcccaataataacgtctgccccactggggactactccatggtctgagtgcctgagaggcctgacaggatgtgtgaccggcgcgatgcccggcacccaggcctttgacaccaagtgtcaacgaggtgtttggtcatgtttccaactctaagtcacttcatttctgtctgactctctccctggcttaagatttagagactgttttcatgtctaatgaaagaaggacagaaaatctctctctagaaccttgtctcttactctccattaaaggtagcaaaattgctttataaagtctaaaagcctgacaagaacgcgtactaataatgcatgaattatgcaaatctgtgtagtcacttgatttgcataatggaggggctggaggagggttggggaggggaaggagtgagggtgagggcgtctgcccagatctgtgtgtaacgggggacattcatttgctcccttgggtggagtccccttctgcaagcccctgctggtcccgagggtgtgttctttggccttcccctgctggcctggtgtctgccctttgtggcctggctgtgcagccccccctcctactttcggggcagtcaccgaggcaggggcaccgcaccctgtgctggactcttgtgtagaactggcttcattaaatctcacagccgcccctccatgtccagacagccttccctgaaagtcccctgggtcattatttctccaaacgtctgtcttgctgaggcattggacttcgttaagtgccgtctggaattgtaactattgccaagtgcctttttcttgggttctgtgggaagcaagggtgagaaggagtctccgggagagaactccccacctaccccgcctggtttctctctcagcgtttctcactgttgctttaaaaggtttcagcctctgctgtaaggggcctcttgcttttctctcccagcctccctgcatactcgctaaccttgggacttcagatttgatgaggggccgggcgcagtggctcacacttgtaatccctgcactttgggaggccgaggtgggagacttgcttgaggccaggacaacatagccagaccccatctctattaaaaaaaatatttgatgagggctgaggctgggactgaggatacttgaggcttgagctcagtgggtgctgcctggaagcccggggatgtgggctctcaagctgaagggacgctgggaaccagctgtggagagccaggcagctggcttttttgtctagaacctggatggggcagcttcttgttctggggaggggaactgttctgcagggtggatggatgcagggagccagccctggttgggaggtgggaggggcagggaccatatctagctcctggagaggccaagcagaccgtcaaggctacaaacaggctggggttcagcttatttcaacatacttcttcagcatctatgtctatgggctgggcttgtgctaggccctaggtgtcagagatatgaaggcactcatagctgtcatttattgagctcctattataagtgtcaggtccttcgctaagccacttatttacacgtgtcatctcatgtaatgtgtatgacaactttatgaggtcactactcttactgccccattttatagatgagtaagttgaggcttggtcacatggcgaggaagtggcaaagtggggctctaagtgaggtcttcggactccaaagccccttctgcagaccgtgatgctttgctgcctctgttgagtcaaaccggactcttcccttgaggccctgatggtaacagcagtgtaaacagatggtgagcacagtgtagtgtaatatatgcaaggggagaggttggaaccaggcacagaagtagcactgagcatttaattatgtcagggagggccggggaaagctcacagaggaggtggtggcggggggggggtccctgaatgagccacaggagggaaaccagattctgtctggcacttagggaagcagccagtggaggctgcaggtcagtgggctggggtgaggggtaggggctttaaatcccagttgcttatagcccccttctgccccacttttggggtgcgaccaggtgatgtgaagctcaggaggtcatggctgggacactcaggaaggtcaagtgtggggtgctgccccagggcccctctcctcggcctgtatgttcaataggtgcactggcctccctgtcttggccagacagctctgagagccagggctctgtgggtgcctgaactgtgtgtggaccctgcctgggatgaggccacagctgctcccacacccgcacctgctcacacccaagaagggggccgccatgatcactgtggaggccagggtgggagaaccctctggaccatagggtcccaccccattgcagggcaaagaggggatctgaggcccagtgactggaagtgatttgctgcaagtcacacaggcagcaagaagtgggtcaatcccccaaggttctggtttggagcactcccgggggtctcccctcaccccttaccctgggctcgccctctccaggctgtgtgccatcctcaccacctctgtcgtgccctcgctcacccacgtggctacactctcgcgtgcgtttccttcacacctggccatcctcttaggccaggccaaggctttgctctggagagaacttaaatggcattgtcagatgaggaaggagcagaacctgccgatcccatgacctcccaataggccatctgcacacactcagcccgctctccccagccctgcacagccccttcggctcgcacatctcatccttactcctgctagcaagcaaagatgtctgcaggtgctctcattcggggatggggatgtagtagggagacaatacctggtagatagagctgaacaactttctgcagaaagtttggagtgaggggggctctgtgatggaataacaggcatgaaccagaagcctaattctattgcttagaagctgtgtggctttaggcaagcgacttaacctctctgagtttcaatctccttattaataaaacaggtacgaacagtgccttgctcagtggtcccctaacttggcttcattttggaatcccctggggatctttaaaaaaatgctgatgcctggctcccagcttctgacctgatgtcactgccctgaggtgcaacctgggtgtggggattttaaaaagctccctgggtgatactaatgtgccgcaaagtttgggaaccactgtcccagggtttgttggggattaaaggaagaatgcagacacgtggagagcgcttactaaatggaggtgattatttcagtgttcatctccctgcctctcactccatttaatgtggagtctgtgggactgaggtttttatttttataccacagtgggtttgccagagtgctgacctaagggggctgtcagcggcccatctttacccggaaaagaccctcccttgcgccctcaccatctctgcagccctagggcaggcctcagtctttctgacaggccccagggtcctgattaggtcggggcctgaccccgcaggggcaggcctgcccctggtctccacctggtggctttgggaatggaaatgctggttcccacaaaggcttctgggagacagaagcctaagatggcagggtgcggtgcacacactcagtctggattcggtggcctgacctgggggatccggggagggcgttggtgggggcagaggcgtgggaggggctgcttctttggagctctccactctgctccctggtactgtctgaggccctgcaaacctgagcagaggctgtgagggaagacacatttctccagattcctcagctgtcctgacaggaagttgtgcatcactgggctgacaggaaggaaatggctctgctgtttggaaagaaatagagaattctgactggggctgagggaaaaggtgtctgcttggagaagccgttttgtcccgatatgaggactctttgtctctgcaggcagttgctccctgtttattttcctttgaatgacaaggattggcttcagttaatgaggagcggtgagaggaaagtgagaagcggcttgtgagattttgggacacggaagccttcgcaggaaacctggccctctgcttgtaataagcatctttctttcccagctccctgcttcggggactgtgaggtgacaaaggattttgtgatctcacacgccgctttttctccatccaccaaccatacctttgcaaatgctttgatttctatttctttttaccaccccaaaaacacagtggatcttttaatagcacaaggccttttgaatctctaaccaatcagtctccaaatcctatccaaagtgcacttagaatagacacttttaataaaatatattgcttttaagccagtgtaaacctgtgaaatttgtacatttcttttagagcatctctacaaattttacattattgaaatcaccacccagtgaccttttaggaaatactagataaattgcaagagacaaatagacaaaccaaatggagtaagtacaatttccagtgcctttcctgctaggttcccagtctgagtcttagaaatccctgactccctgtgcccctccccccagctctgtgacctagcccctgctctgcaggcctctctgcccaccctgcccctggcaaggagctagcagctggggtgtcatctgagagccatttgcagctctgagaagcagctctggtatgtggctcctggcaccttgtcccgtctgtgtttgtctctgcgctccatcattcaaaacacttccaccagtggccagtggccagggcccccagaagggctcttgggggtggctgaggactgctttagaaaggctcagatgctctgtggccgagtctgccccaggcgaggtcctcagccttgtcgagtgagagctgagcgggggtctgagtccagcaaccctcactcactgtggagcactctctgtgcctgggccaaaccttcgtcagccaggtgtggattatccactttgtggattgcctgtagtgtcttttccaaacccaggtcacgttcgtccctgctgctgtctcactgcatggggacctttcctccctatcagctggtggtgcttaggggatgtaaatcaggtgtcgtatcttgtttgtattttgtacagggaaaacagaatttggaagacagatggtctctaaaatcacattaccagagcctccaaagggtctcctggaggctcagtgctcctttgggctatgggatctgttccccttctggtgtaggtacgcagagccttggagcagtgatgggggtggagggagcacaactgcgccctgcttcctgaggtctgcagatcgcaggtcactcgatggtggtgggcacgtggttatgcactcatttcatggataagtgaactcagtcaccatctcagctgctttgccatcgctacacagcgacctgtgtcagcaccacaactgggggtgttacttgggtcccctgtatctcagttgctgtttttcccatggagtgacccgactgccctccaacatggggagggagggagagcagaaggcagatcagcggttagagatgtcctgagtggcactggcccttctgtaggtaaagtagcttcgggagaaacaaggtactgtcaaagctgcccaggcttcattcactccttaatttgataattaattccacaaacattaatggagtttttctcacattccaggcactgtgcaaggtgctgggggtgggggagaaacagaaagatgacaaagacttggttcccacactcaaagagctcacagcctggtaagcagatgctcaacgcacttagaattgtctcccgaagaggcctgaagggacagggtggaggaagcgcagaggcggaggcagctctggagggtagggtggtgggagtggcgagaacggagccggtcctgaaggttgactgggaacgggaaaggctaaggcagggaggttgttcccggcccagcaagcacatggaaaggttgagggaaacgaaagcttagtgcattttgaaggagtgtgagcaactcggtatggctagaatttatggtgtgagtatgagatatggggctgtagaggcaggcaggggtcagatcatgccttgcttagggggtctgccttcatcccagaggctgtggggagccgcagaagggatttaaggagtgggatggcacgatttgtgtcttaaattacttgctatggaatctacatggtatagcagaaggagcccggcagtaggggaaggagctaggctctagctctaaattctagatctggatctagcagctgggtgactttggccaagtcgaggcctcagggtcctgacctgtaagatgcaaagactctaaggtctgtcttagccctgacgttctccacacccgtggccgccttcctgtttggcccccacactctctgttctgtacttgtccatccacctctggccgcctgacccctgtcagctggctgtcccaccgtggtcagcagctggtggcagctggagggagaggggtgagtcctccaggaagcatgtgcactcctgccctcgtaattcaggcctgcctggcttctcctcttccagccctgcgagagcgccttcctccccgctgacctcagcacacctggctccccacggcacacagccctggctgggcccagctgtgtctcttcagtgagacagttcacccccttgggccaaaatccccacccacctggcccccacgtgacaagaggcagctgcttcggggttgccacctggtagcccgtgacatctgtgagatgtctgtgcatttggctggtgtgagctttttcctttgctctgacccaagctttgatagctcagtgtgtcatcaccggcagtggatgcctgggagccccagactggctcttcctgcccagggacccccagacccacttctgcaggacgccttgaaacagctgtgggtggaaagccaggttttcccccataagcatcactcgttctgctgccttcctagcttctgtgctctcgggcccagagctcctccagggtgaggaaccaggaggaggagttggctgggttggctgttttcctaggtctttgatcacagctgttacatgtagataggctgggcgcggtggctcatgcctgtaatcccagcacattgggaggccgaggcgggtggattacgagctcaggagatcgagaccatcctggccaacatggtcaaactctgtttctactaaaatgcaaaaaaaagaaaaacacaaaaaatgaaaaacaaacaaacaaacaaaaaactagccgggcatggtggtggcgtgcgcctgtaatcccagctattcaggaggctgaggcaggggaattgcttgaatctgggaggcagagattgcagtgagctgagattgtgccactgcactccagcccagcaacagagcaagactctgtctcaaaaaaaaaaaaaggcttaaacaatgggttctaagcaaataagtatctgtttagtcagtggaacgaggaaacaaaagttgatggagttctccccacaattggaagtgttgttccccacctagatgatggggcctgcagggaagtgattttgcacgattctcctcttcttgtgaacaggccatagggtagcatcccttcattcattcatcaagtatttattgagtgcctactgtgtgccaagtcctctgtgaggtgatggagcagagagacagaaaggaccccgactgtgccatgaagcagccctgagcctggaggggccactcagagggagcccaggggcggcggctctcgggctccagccgagtttacttcagacctaggccctttagctgacaatcttaaagcctggtcccggaaaacaggaatagtgcgagagggatgaaatgtgggtgaggagagtgagacaagggtggaggtaagaaagagggatggaagaaaagacgcagcaaactttcccgtgagagaaacgctccagacagcaccccagttcccagctgagactcccagccacagtcagcaagaacccacaggaggggaggcccacgtccctgctcagctctgccctggcaagtggggtcggagatggggcattccctgcttggggtctcagtctctccatctgtaaaacgaggctttggactaggggagctcagagatctgtttagaactaatattctgtaaccggtgcagggcaaaatagacggggggcaggagcccaaattaaggccagtcgagtatcaggtggggtgttcctctggctcctcctattacaacagcaagagggacccaggggtactgtgggagtcctaccatctcctcacttgtacgaggtaccttctggctgctcttccggctgctcaacactcaaagaaggaaggtgctgggtgtccttgtttgcatatttttctggcacggacacattcttcttggagtttcttgacattagggccacttgaaatgctcaaggtaagggctgctctgcctggcagacatgcgtcaggtgcctttggctcctccctggcaagtctgcctccagacgccctcagatcctgtccccatgcctggccatggggctatctgaccactgatgccagagggtcacactcatcagtctatacagaagacttggaaatgttttggcaaccctgtgttagaagagtggggtttcctaactgtatggctttgggtaattgcttaaatcctcccagccttagtttttccatctgtgggttaggagtggtcctctctacctcccagcatcaaataggaaactgtgcaagaaaatgctttgtaaacaggaaagccctaaactgacatccaggacacagtgactcagtagcaaatatattctgatattcagccttttccatggttacagcctcctctgtgccaagaaattcaagtcaccaagggttaaagcaagcaaggcacatggccgtgattgtccataattgatgaaataaaccttaaaggagtgacatataattaattgcaattaatccaggcactgtgacaccaccttgctaaaaatactgtctactaacaattgctttgatccagcagaatgatgtctgcccatgagcctggcaaagtgtctgctaatggagtgcacatagtgggtgtggaagctggcaggtgtgggggcagagggcgggaagggggccccaattctctcagaccctttggcagcaaatactacatatatagaatgatcacatgattcattgtctaaactgggacactttgagattattatattaatcattaccattcatagtaataattatgccagataacaggcatacactggactctcctgggtaaacccgaatgtatcgccaccctctgcataggctgttttaagcccgtgggaaccctcgactgggagagtattttcacgttcattatctgctcttcctcacaacaaccctggaaggaagaaaggattttttagtctcattgaatagatgttaaagatggtgatggtgtcaaacggtccagctctagtctttggcctggcttcctcggtggctgaccccatgcaggtagaggacagctggtcaggaccgggagttctggggatgtggaaacaagtgcagctcagggggaaagaagtagcaaatctggcttcagtggagcaggaacaagcgacctcctccgtgaagagctcagggtgtaggtctcagccgggactgtgctgcggtccttaccaatcctgggcttggaatcagaagctgtgtgtttcaagtctggctcccacagttcagctgtgtgatcttggcaaattgtataatcattccgtgcctcagtttctcatttgtcaagtggggacagttccttcctgtgaggattaagtgagagtttatatgaagatggatgggtagactcagagcctgtcatataacaggtactcagtaagtccttgtagagtttgaatctgtggagagttcctagaggcaacacctgtaggggaaccatggagatccttctgccttgaaatggctctaacttgaaccaattagtgtggaatgactcccgccttgagatggggctgcctcatgttcttggagaaagaaatggaggaaataaccacatggaggaattgggaggttccctgaccccccctagaccatggatagtctacttgggagactctactgcatgccccgtgataggcaggaccagcacccaaggagtctttgcatcttgcagtttccttgaagccctgtacaggctggtggcccacgttggtgtgtggcttccagccttcctccaggctctcagatgaacatgcttggacatgggcaggcagtggggctcgtgtcgtgccccattgctggaattcatggcacctcaaagtaaaaggtaggcaggttggcagcagtctggtgccagagagctagtgagagagagaaagaattatacaagtgccatgtttggtctattaatagcctgtgtttggtctccaccacttctatcaacatcgtccatcacatccaaacaattgaaaaacctgtgccaaatgttaggaaactcacggctgtgctgtttctgaaaaacagcatttctacttcttatgccgcactgagatgccaatagttccatgccaactggtttttatttttccagaccatttccctttatttatgtttaagcttttgtattgttaagccaaaagaagatagagaacctggagtaggtaattattgtttctcctgatttgtccttgaatgaggcatggaggaaatgttcactccccaaacctgaattgagtagctgcagaggggtggagagaggactaagacaggggcctgtccctttcagacagtgttcaagctggtggatgggcagagtgaggatgtggcagaacaccagccccacccttggaaggcttagggcattatcagccctttctgttactggtgtgtggccttgggtaggccagagtccctctctgggccttaatttgcttgcctatagaatcggggagtcagacttgatggcttagaaggcctcttccagctaagtcgagtgttgggtggaggactcactgtctcacgtttgttggcaaggccgtgggtgtggaaatggaaggaaggtgatgctgccctcagaatgctggcaactccgggaagcctggaagcatggctgggaaacacggacgaggctgttctttatctgggaaactccagaacagcctccagagatgtctgtggagcctgcaggcggttgtttttctcaccatatgtgatttctgggtgtcttaaaaattttcatttggcccaaacattgccggggttgggggatgattttgcccagtgtggggatggaaatgggtttgcctctgagcatcaggtgggtagtagtggttttctccattttggaattctctgacgaagttggaaggttcagctggggccctagtgttgcagcagcttctggtgcagacagaggcaagggctggagggaggaaagggggaaggccaattggaggggtgataaggctgagagacccagggtggggagttgtctgtaggccttgctttgtgtctttaaaacccacataactctctgtggctatcaggtgatgaaaatcaacattatttcaagttatagccatctgaaatgaatgtagccagttccctgtaattagctgaccacagctcctgcagagaatctgggaatctgttgtgcgtcttgtcagcgatggctggggcaggatggggaaagggaagcccaggcctgggacaagcccagctaggctggtttggttctagtcagcaacccagtctaacagggagcccacagctttctgtagagcaaagtgatttcctgctgttttattcatttgggagccagataggttttactaagagaaagcaaaactacttcaaagcaagccatccagaaagcacaattatttgtttcaaatattctagaacatttaagaaaatgggggttcctgcaatctggatgaaatatgggggccagatccttggcaggtggagcagtaaatatttgctaggtgaacccctcatggtgatggcaaattgaccagcgttctgggaggcgctaggagggtgaataaaggttaagtgtttcactgtaactctgtacaccctggatgccaggacagatctgggggctgggactaggaaccttcagtatgctatacagttctcctgagataaaggtatggtgtcaggaccttcagaacctgatgcatagtggcaggtacgcattcatcaaagccagaggaggctgtagggacttcttgacaccacaagagtaatgtaattgctaactggccaagagcactcacattccacaagcagaggaggctaaaagctcatcaggagcccatttttttattggagaaggaaacagtgactaagtgacagtcttggaggtgacttccaggatagggatacaggcttttggagaacagatgaattcagggaccggttgttatatttccgttagtatgaaaagcagggtgggccgggctgcctgcccctgtaagcataggccgggagccccaacacctgggttctaaagttttctccaagccaggatgctgtatgatgggggcaaggcagcctcagtgtcatcgtggagaatgagggttggggaactagctgatctcctggtgttctgtacgttaatgagtgtgtgtcccagggagaggctcacttgtcaaagtcattgacatagacaccgggatgctaaagtcagagcaggtcttcacagaggcatttgtttcactgggaccaagcactgcaggcagatctttgaaaaagagccatccaaaatagagtctctccagggctacattgagaggaagtgagtttccaacccctggagaaaatcaagcagagactggatggccatgtgccagaaatcttaggagactcatggggcactgaactagatggcttctaagctccattgcttgtgtgtatgactgtctgtttcacagtgtctcagagctgtgagggcaaccccagcctcctggcttctttctttgtgccccagaacagcaattctcatttctggcccgcacattagattcactgagatctttttttaaaagttagtgcagagacctcacttgcagagattccaatttaattgctctggggtggtgccaagcccctcagttctacaaggacccgggctattggtgcttgatgggcttccatcccacctccatcctccctgtaggggtggggagttacaaacccttctgctcccattctgcctttgtatggagcccaaaggtttaagtctgtatttaccgttccatattcatttacccaagaaacacttgttaagtgcttgctttgtgtctgcaagaatcctaggtgggccagcttttggctacctgaggagcagcaaggaccaaactgcctttaaaaaggcctcatcctgtatgtttccacctcccgcacagtgcctggcacatggcaaacatgtaataaaaagtttgattgaatcgcatggaatctttgccaatattgtaagtggggcaggaaaataaattataagcaagcatgcagtagagaattcatgatatgccagttcccctctgcccagaccttataaaggaaaccatctccttaattggaattatgtttgtggcctgaaggggtgccccgtctgacttgatattttgggagcgtggtctcctaaatgacctttttctgccttccttgggacatcacacaatgggagagccagggcctggggaggatcattttctcttaattggtgtcctggtcatcatgctggcttcactaaaaattagtaggccaccctctgctcagacctgaatgcccttgttattaactgcatgatgtccctcagacatcaggttccgtctccttctgggagtggcaacgtagagatccagggaaatgctccagggcaacttgactttatgagttttgtgtcgagaccactggcttccttcacgccacaagtattatctgcctagtttccccgtgccgggcccagtctgcagagacggtgaagaccccaagccctgagctcagtctgttcaccatctatcacaccactaaagccacacaactgggggcttcttcagagagcaggtgggaccggtaagggcagggcctgcaagggtgatgttctggcaattgccatcctgtcttcctgaggttccctctggatcagtggtgagagcacaggtttgaatctagcccccacctcttcctcatccagggacggtgggaatgtgaccctctccaggcttcagatccctcatctctagaatggggccatgggttgttctgaggacctaacgaaattagcacagtacctggcctctggtaagtgaataataaatgttagctgttactttcatcacctctctttagttttgatgaatttggaaattcaggatggaagtgtctacctgcttgacatatctcaaaaattttgctcccttccttcaaatattcaacgttcaactaatatttattgacttactatgtgccagaccagtgttctaggcatggggctctaggagtgaacaaatgcaatgtaaaaattccctgccctctggggttgacactctggtgggggtgtgagaacaacatcagtgggaaaatggggtcagatggtgaaaggtgctctggtcaccccagctgggcagtgccaatgggagacaccaggcatggccagcctcgggaagggtgtggggcccagggcagaccagcggggttcctggtgctgaggttaccctgtgtactattaaagcaggtaatggctcccagcttcgatggtgggtatatggaccccgttcagggatgggggctgaggagggcacaggaggactgaagacagggctctgaggagccacctgctctcgggtctaggtcagaccccgcatcctgatgcgggtcagctggctcatgatgcctggctggctcctgggactgagaggagagtgtggatggtcttgtctcagctttccgcccactggggatccacctcaagcatcccctggctgtggggttgaggggtgggcccagaacagaagcttcatgtaagaaggtgactgggctggagaaaaggtggcagtgaggtttagccccatctccagcccctgggacctgtggtaaagatgtcctcacccacacagtgggctcaggcaggcaggaaaggttcctggagcttggcctctaatatccattcttgagctctgccgtggagagagctggtcactcgagcgcaaaggaaccacttgtgggttttctccctcagcctgggcttcctgcccattcctggctgtcccagcctgatgtgtcctccagggccccctgacctgacccttggcccatctcttcttgaccttgcactgtgggcaggacagagaggccagggagagtgtccaagagggacaggatgggatgtcaaggtgacggggcgatgatggtgcagagggcagcccttgggatgagctcctgggagctcctggatgggattcaggctcagcaggttggggttggagcgggtggggaatccctggcatttggcaattgcccagcacagtgcctgggcatggtaagtgctcagtgaatatatgttgtatgaatgcacaagtgaatgaatgtttggctatgcggattgcaaaggtgtctttctgaaatgcctcagggatatctttataaattattgcagccataaaatgctgatattgggggtgcagtgagcagctccggactgaggatcagctgcatttacctgcactgacatctgtgtggcaagagaaggggtgtttgactacaagggaatgcatgcttctctttgtgtgaaaacagaatgagatttttcatatgcatgatctcatctcatcccctaacagctgtgagaaaagtaagggtagttcttgtttgcagagaagaaaccagaggcccagagaggttaaaggaccgatccagtgtcacacagctagttagtagcaaagacatgacttgaactctggccttttggtttcaaatcctatgttatttagaaagagacaaggaacatcttcgttagcccccccatgactaaaaataggaagcttgccttgttgtgtttgaggagaagatggtgtgagtgggttttgtggctgaccgtttcacacccaacatttcatcacagaaatgcctgggaaaagaaaactcctaagaaaaaaaaaaaaaggaatgagtgttggacatgtccctatgacctgtttgtcatggcatgtgtgctcggcgccttggtcatcaggcttaactgaacttcggagaaggttctgtccaggagtctcattttactgggggctgaggcttaggagaaggaagcaacttgtccaggccaggcattcactatggaggaggctgagactcctgcgccctcggatgcacaccctgggcctctgttccagagctgtcttggctagcaagtatcaggcccttctcccttctcaggctggtcagaggtccagctgccctctggagtccccagagtctcccttcccactgtgacagcatcggctgtctctcccggtctcaggttggacagtcctgggagagagagggtctgagtgacttcattctgtcacttcattcattagtgactgaaacaggattctgttagctgacttctggtaggagccaggttgggaagccgctctgaggatgctgggagggccaacagctgcaattattattattattgttgttgttattattattattattattgagacagagtcttgctctgtctcccaggctggagtgcagtggtgtgatctcggttcactgcaacttctgcctcctgggttcaagccattctcctgcctcagcctcctgagaagctgagactacaggcttgcaccaccatgcccagctaatttttgtatttttagtagagatggggtttcaccatgatggccaggccggtcttgagctcccgacctcaagtgatccacctgccttggcctcccaaagtgttggacttacaggcgtgagccaccacgcctgggcttgcaattaaattagggtgctgcacctgggaggaggaggctgtgctaagataggagctgaggatgatgggtaagaatgaaagatcccaagaactggacagtgtgagattgaggaatgaggaaggccagggcttggtgctgatgtggagggaaagaagcctcaggtctccatggagaacagcgaccagtgatgcggtcttccctttagcggaagaggggctggtttaatttgcatagcattaattagcaagagtatctaattaggacaaccattacagaaccacagtcataagccgatgttgaatatcaatcaattttggagcctctccatgaaattgaaggaaaagttgaccttattagatagaaaagatttctaaatcaattatttcccagattgaatgcacaaaacatagtgatgtcaggcaggcacatcagaccttaattcagaaattatgaacttcagatactatcaccttttccctttgggggtttcagccagtgacagaaatcgtgaatggaccacatatgtgtataaacacacacacacacaaccatacacatatactctttgtgggtaacagcttggttggggaaggagcctgcgcatcattatctcagttaagctaatatttcagtttggttcagtgcccctccaggtctctgtctgtaagcatagctttctcttttttgcgatgacccaaacaataaaatacatttagaacttcaaagtctctgggaagatataccataatcattacagttctggcctgtttttggaagctacaaggcaggccaggagagcaatttatgtggctggctcagaagctggggaacacactccatcaccctctgcacagcctcaggggaggaaaggctggaacagctctaagaagcctcgctgcagatattggagggccagcaaggcgtggccgccagagcaggtggggtgctgggacacaggcggggcaatggaacctggaggcagacagatctgggtgtaaaacctggcttttgcaaatcctggctttgccatggtgagaagttaggtaacatgcccttggacaagttacctaacttctgagagcttaagctttctcctctgtaagagtgggttgacaatgccatccttgcatggtaggcccctatagatgtgctttattacagattattgtcatcaatgagaaatcacagatctgtgaagggctggctcgtggcctggagcagaacagggaccacatggatggaggcagctcttaggaattctattgacatattttcagtctttttctacactaaaaaagcttaaaaatgaaataattggaaatatactacatatcgttttggggtctgagtttatcacttaatattctatcatcaaccattctccatgtcttcagatattgtctgcagaagtgttttttggttttttttgtttttttttttttgtttgtttttgtttttttttaagatggagtctcgctcttcacccaggctggagtgcagtggcactatctcggctcactgcaagctccgcctcccgggttcatgccgttctcctgcctcagtctcccgagtagctgggactacaggcgcctgccaccacgtcccgctaattttttgtgtttttagtagagatgaggtttcactgtctcacccaggatggtctcgatctcctgacctcgtgatctgcccacctcggcctcccaaagtgctgggattacggccgtgtgcagaagtgtttttagtggctgtgtagtgttccatcactgccctgatctcaaatctacttaaccacttgaaaatttgtgggcatttaggaataaaatgactttaaaacatgactctcagctgggcgcggtggctcacgcctgtaatcccagcactttgggaggccgaggcgggtggatcacttgaggccaggagatcgagaccatcctggctaacacggtgaaaccccatctctactaaaaatacaaaaaaattagccgggtgtagtggcgggcgcctgtagtcccagctgctggggagactgaggcaggagaatggcatgaacccggcaggcagagcttgcagtgagctgagatcgtgccactgcactccagtctgggagacagagcaagactctgtctcaaaaaaaaaaaaaaaaaaatgattctcatcaaatgggatataattcctaagcattcctgtgtgttaaggattgttactctgtgttgaaaagttctgagtcacggggcagaagggttgaccagttgaccgctggattccctctgttctacaagccccttattggtcctcagataggagtgagtgggggcaatgcgtgtggcaggtaccctatcctgggatgtatggcagcccggtgtcactgccatcccccaaggaaccatatcaatttcaagcttcactgatgttcaggcagcaaagagaagatgctaattcaacattttaccaaatagaaaacattcctagttcagccagacttctttgacatgttttccagctattaaaagcggttggttaattttttttattgacatgcgatggagaatgcaaagaaatctgtaagatatcgagagtccctgttgatccagcacacagcttggtcatcccacagggctggagctggccagggaggttgtactggccaaaaccaagaagcaggtgggagttgcctgttcatgtaaaggttttgagctttaggacaaaaggaagaggcccaaaggagagagcatctggcccctttcccttcactgcttcctttaaaatgatggaaatagacttggattctgatgtcaattcattgctgccaaaagaaataaataaggggctgaaatgtgcagctgatcccaaatccttcccggggaggtgtgatgctcccagatgctttcagacccctttgaaaagaaagttatggtcatttctggatggaaaacattgtgagctgtccccagttgatccccagttgattgatgtagggaggtttgttttaccctaatacagtctgagtgttcctgaattcaccatttgctcttttcagccccatctgggtcttgtggttgggtagcatttcaggcaccaggaagtgcttgtgaagatcaaaatatttttgagggccagcactgtgttctgtccttctctgtgcttatgttggaccagaacagcaccagccctccttaggcccccatacatgtgtgctgagtaaatgattgcaggctgctcttatggaactgtggaacatgaagaggctaaaagaagactggcttatgtgtagatcatcttatgcatagcaaataatggagaccttttcccatagttggacgaccccatgcaatgtagaaagtcagagttagtgaataagccagatcagaagcttctggtgtatatcactgtatatatagaatctagcacactgttggatatctagcaagtgctcagcaaatgagaagtggttgaaatttttgtgaaagagtgaatgaattagttactttattagttttctttgtatctccagtgggcctcaagaactgtaccaattaaatgaatggggagattaatagacatcagggagagcactttcattccatctcagcacacagagtggggccgagagcatggacctgggcacttggaagtcctgggttcgagtcccaagccctcctctcattcttgtggttgccatattggacataccgcctcaccccacagatctcagctgctcctcacatctgcctctgaaagctgtctctgacccatccacagtggcctccctcctttgagctcccctagctctactgtaggtttcactctggcaattgatcatactctaccttaccttgttgtcttaagatgtcatttaggtctatttaaatggatgcttcccatgtttctaagttgtttcccattggagagtgtgcctgagggcttgtgggcagtgctctgtactgcgagtcagaggccttgactttgaattctggcacaagccacccaccctcctctgggcctcagcctgtaatatctataaggtaaaaggccgagggctgttgtgaggatggatgagaacaaatacgtgaaaccaccttgtaaactgtaaggtgccttccagaaatcaggcatcattcttctaatgaccagctccctgaggaagggaatgtttcttttgtggcgtgcaccactcaggaccaagtgcagggccgccatacacacagtcactgcttggaaatgcttcctggatctcatctgctgcctttgctcagggctgtgttcccgccttcctttggaactaggagctatctctacttccagcttcgaaatgcccagaggtgcaccaagttccaacccagacaccctgatttgtagaggatgcaaagtaaatgataagggtagttaacacttacttggccaggcactgttctgggcactttgcatacattaactcctttattttcacaacagccctgtgaggtagtccagaatattatctccatctgacacaggaggcatgctggtgcagagaggtggagtgggcgttccaaggtcaggtagccctaaatggctgtcgcagggctgggacccagcagtctggccccggaggtcatgcccttaaccacacttctcggtttctctaagctgccctgggactgaaaggctgcagtggaggccacggggctcacctcccccacctaatccctagcaggagggaccatcagggtacttctcctgccaggacccctctctgctcctgtgcttcctggcttctctctccagtagctcctctgccgtccctgcctccctcccctgcccttggcctaagccaggagatgagagcagctgccgggacattcaaattcattcctgaaagaattctgcctccgaaatcctctggtttgggtttaagagaaaacagaggcccaagctggcgtaatattgatgcccaaaccatgtaatagcggcacaacaaagaatgacgttcatatgagttatgagcatggaagcacaaattctaaataacacatcagcaaactgaatctagccgtgtataacaaacataatacatcatgcccaagtagcgttcatcccaggaatgcaaatacgacttagcccgagaaaacagaggctcaaagggggcagctgctgagacagagccggcccgggcacagcccaaggcttttgtggggctcaggctgactttgtgctacacctgctcctaggaggggctggtaacagtccctcctgtgtccccaccccttctcttttacacagccgcagaataaagtgagacgctcctttccccgcactccctaattctctctctccattgttcctgcaggactccatgttttcgttggccctgaaatgccttatcagtctgtccaccatcatccttttgggcttgatcatcgcctaccacacacgtgaagtccaggtagtgcccccacctcaccccttcatgcagcggctgatcctttggccttgctctgagccgagcccatccccacccccaaaacccactcccttagcagctacttgggtgattttacaagacggtgcccaagatcgtggctcttctcttctggtttggacccaaatgggagaggaaactgcgaggccgccctgtggctttcgaataactgttaagttgtcttcaaagtggggatcccagaggcaaacatagggcttcatgttgagcgaggctgccgtattcgggaccctcactgagcaccatcggaccgggagagcccctgatgcattgctctgccttttgtgtctcttgtcctttctgaacttgggccactcagttcatcccttcagtgaggcagacctgccttgtgtacccccacatatgctgcaccaaactccaccaaggagtctgctttttgtgaatggtgtggtcttcacccttgtgggtctaggctgggggtgtcattttctagacagagtaagagtctgctgtggccgagaaggcctctgtttcttgctgcccaggagtgacttggtacccagagaaacattggctgggcctccagggtgcacttccagtttggctgacatagggaggatggttcaacccgggccaggagggtcagacaggagagaacagatctgaagcatcttctggtgacaatgagcttcccccagcccccggcccttcaggctgacctgcactgctgtggacctgagaagttctaaactatccagatgtttttcctcatgtgcatgtgaatccggaaaccatcccggtcctttggctggaggagcacagatagattcacatctgggcagcaggcgagagattgacgaagaccagagctcagagtcagaaaaactggggtcaagtctcggccatgaccttttttcttggtgtgtctttggccagccctgtgaccttcctgggtctcgatcttctcatctagaacatggggcctttattccagctctgctgagctgttgtgaggatgggatgaggagcgcatgggagagtgctttgtgaagcgctatttaacaacaccgttcaaatccagtcccatttgttactcggcattttcagggtggagcagcagtgcggacgcaggtgggagtgcctcctcctcttagagagccttggctttttgtctgaaggtcaggggccactgtggctggctgggacatggaagccttggctccaggccaccttggcagggctgcattctgtcaatgactagaggatactgacctggatgctgggactcttcagcctctaaagggttgcagatgcttggacaggggctgtgcctgtgccagatgccaccaggcagcttccttcatggagtctgaattggacagagtggtggactttaactcagaccattgtccagtcagccccagaaaggagccaggagtacaggcagggaggactagggccacggaatcgagacaggacagaagttgacagtctgggctccgggcctggttccaccccacccaaagccagccgcgggatccaggcagtccctcagtgttcatgttctcatctgtagggagactgtattactatgtgtcaccctgacctgtgtggggaggtgtcacacacaacaaagaaaaaaggcagaaccataaaactcagttatgacccaggcttgaggaaggggaagaagaggagctgttctcagcctcaaccccacactatggtggtgctaggcctgattacttcctctttctgctccaggcattggggtgggtagagccaggtgtccctccctctgatgctcctgaggtccttgttcccagtccagggcctgcagccctagctctcagcctgttctggtccagctgcagcttgactcagttccggcctggtggcagggtcatgttgctgacagcccagaacctggctgggtacccattgtcccatgtccagctcatggccaatctctgtttcagccctaatcatgggcagtagatgatgctattgggggtcattcattttggcctgacacaatttggagaaacaaagtgaaatcagttgtgttgaatcctgactctggggctcagtttccccatctgaagtatgggaaccacatcacccactttgctgaactcttgcaggggttggaaacagtgtagagtacagagtgggctttcacagaatggaaactttggtccctttcctgtgacctttgtcccactgcttctagctgggccttgcacttaccagctgggtccaccaggtggtcactatcatgactgcctggtactggcaggtggctgggcttcctcctgctctggcccagccctgcctgtaccctgagctcccaccacccagccccttatcctccctgcagcctccgtcacttgaggaaagtcaccaaaaccggcttcctctgtgcctcttacctttccagtaaagttctttctgtgcccagctagaccttctcttgccagagggaaatgggaacagtttgggcccagagagtcagtgggagggaggttcctacggagcgcccttgtatatacctcactgggccatattgtagttttctgttgggtgtctttcttccctacctcagggacagttatctttgcattaatctttgcatgtccagagacttatagtgtctgacagtatactcttctcggcagagtatagcacgtttgtagcacgttctttgaatggaaagcatgctgagttcaaggtaactcttttccaaagctggtcgtaccttgacttagctttttggtctcgggcctcagtttcctcatctattacttagccccccaatcttgtaattctctgatttagatctggctgctcagccagctgcggaacctgcttcttgcgagtggaggaaggagttatcccaagtgtgactgatgaagttatgcagaggggagtgcttagcaagcacccttccacaggcaaaggccagctgctgctcacctgttgcgaagcaggcagggcagggggtggctgccgcatctcccctttgggtgatgtcaggacctttgctaggaatctgctcacagctttcctcatccacagtggttcctgatcacctagctaaattttagcagggaccagatgatcatgtccccgtcttccccagccttgccccagaagctcacacccaggacccaggccctgcccagcacacatgtgaggctgggggagtaccttttagaacagtattgttacttgttcatttagatggcttgagtttttcaggaagaagaattctaaaacactgttgggtaactctcacccaagctgggtaatttataaggaacataaatgtatttctcacagttctggagatcgggaagtccaagattagggtgccagcagcttcagttgtctggtgagggctgctctctgcttccaagacggcgctacgttgctgcatcctcaggcagggaaggcaggaggctgagggactgaacactgcatggggcctctttgatacaggcctcaatcccattcacaagggaggagccctcatggcctcaacatctctgaaaggccccatctcttggcactaccacattggcaacatctgaattttggaggggacacgtttaaactgtagtgtccacctagtgcaggaaccccagggcctctgtgtgtgctactgtgacggagctgctggcccccctgggagaggctgccctaccaatgtctttagaaagcccgcccttctgccgagaagaggcagcctccctggaacttgccccctggcctggttctgcttctggagcagggaaaagaaggggttggtttcccgcatggtagcctccattgttggaagatggcaccccaccccatctctcctcagtctccctctctgttggcgttttggagcacggacctttcaaagactcaggcacctcttttcctcaggccagtgtgtccgggagagaaatgaaaacacaagaagcaatgcattttgtttatttaccaaaactctgactgaaaaccatgctctcccttggagagtccatttacttctgtggtttagctctcaccaacagctctcagaccgtgctaatcccctccccaggctgcaggctcacgttttacatgccaccggcatgcccctggctccacacacaaaacactgaactcctcttgctccccagtatcctctcctcctttgcccttgatgacccaccaagtgcagtcattggttcagcatctatttaataatgttcttctaggtgcagagcccaggacaggagcccagttctctagatgagaaactcagaattcaccattgcttctcccaggggtcatcagccttgagtgaatctatggctctaatgaatggccctggtgccatcctggaaggcaggctagcaggcagaatcataaaactcagttatgacccaggcttgaggaacgttctctactgagaatgtagacttcagagcagcccagcttggcgcaaatcatgctgtttgtcacatttagtgtgtaggtggcctttagcaagttacttaatccttcttagtctatttcctttctgtaaaataggactaataaccatactgtggaggccacagcaactccatcttggatgctgatcctccatattgacttccgattaacccagtttcgggaaagcctctaagatttctccttcatctactgtttactgtaagtcctgcccttaggcaaattgcttctgaagcacatatacccctttcctctggtatttaatccctgggactagggggtcgtggtgcaggatccaccatcttgtcttactgctgccagagactgtggcttttgttcataagtccctattaaatgcttctttctgagaaactggatatgtcagcccctttcttcagcctttcagcttcctcagcctttgggggtaggtttgaatatgcctacccacccggaaccagtacctaccagaaagggttattgtacagattaaattagataatatatgcagaactccttagcttaagtaagaatgtgtttgtctggctgacagagtggaaaggataccccagacagaggtctcagagtaaacaaaggctctgagatggggaactgcagagcacactgggaatgtctcaaggacagggtcctgggtagaggggcaagttcactatggagggtgggaaggacccgtagggacttgtttgccttgctgaagggttttggaatgtcctgtaggcagcagcagaaactatgagaaggtttcaagctggggacagagatgatcagatttacattttagacagcactcttcatctgcagcatgcaaatataggaaaggccaatttcagaggcaggaggacagtgggaagcacgtcatcatgggccaggtgaggggtgttgatgcccagagctggggcaggagtgaggaagggaggatgggagggatccagtacccctgggaggaagtgcctggctcagagccccaggcatggaataaggggtggggtgcagacacattcacatccggaggcgtggagcagagcctggcatccttaataaagttgcagggatgggaggtgccgtccctacatccaggccaatgccgggcacgtagcaggtagtcagtgaatgtttattgaattaaactgaagagactactgtgacccaggatgggatacagagcagtggcagagttcatataatccagtcccagaatgggagcttcagagatcattaatttcaaattgtggttcttggccatattcaaagtaaaaggcatcaatcagatcaatggggtggagatccactcttgcctggggatatcaatcccctcaagatctagcgttggtctcagatgtttccagtctttttcaaactcaacagaaacgtaacggtagtaacaaactatgggccttcaacctcatgaatttgaaatacaagggaccaaaaaaaggggaggcttttaatttattaggtatataaaagtggatattttcattaaataccaatagagttctgagcagacagggaaattacttgaaattacaggacataaattataggaagcctcacttcctgtggcataattgctctgtggatgggagtgtcctcctgggtgcgtgtaatgtgctgtcacagggacatgggtgtctgtaatgcaggaggtgttgctggcccaggtgctttggggtcccaccgctaaatgagttagtggtgtcttcccctgaaagaacagacaggacaactcacgttgcgtcttgctctgtgccctcaccctcccttctccctgtaaaagaaagcaggctcaagtcacatcctgaatgtaacctgtaaggtgtcctggcactgagagacaaggtataatagcagagcacgtactgacctctctaaattttccaaccctagtacagtctataaaaatggtgagtccattcattcgtttacttattcaacaaacatttattgtaggactactttgtgctaggcattgagaatccagaaataaagcagacctgattcctgcctttggaaattggtttgtcctagacctttatccactgtgacccagggtcataagtgccataatatgagggtctgtgaaacaccaagtggccacggaggagggagtgatgcatttctcccagagaggctgggcaggtttcacgcggagatgatgctgtgccctgcattcgccaggagcagagaccttgtatgctcaggacaaagctggcccagagcgtttcaggagaggaaaaaaaaagagaaggaagctgtgcctgtcctccgaagggaggtggaggctgcccaaaccccccaggtaggggctagagtccccatccttcttcagacacctggtagaggtttcctaagggtgtctctggctggttggttgatgaattagaaataccttcattgaacctccgagatcttgagacccccagacagacttctcagcctggctaggtttgagcatgtcagctccttaactcaggtgtgatgagcagatggaaggagggagctcgggccactcgtactgaaggggaggagaccttgacaaggaaattccagatgggggcctcctctgccaggtttacatccctctcctgtcccactttcatgagtgtgcccctggatgatcacagcacacaagggaaattgaaaatggggaatgtgttccagagaacagcgactggtgatggggattcactggagcgctgctcttctttgggcctcgcctcctgcctggcccagctgtgcacagtggggctagaaagaaagggagaaatagagagaggagctacaccaccaactgggcccgagaagtcagaacaccatggaataaatcctcgtcagactacactttgaagacagaaagctcagagctgatacattagcaagcgcctcagagacgatggtgtggccacgtcttgtctagcgctttgtattttttagagggttttcacatctatgaggccttgggcctggccgccttcacctttttgccttttaggtttcagcatagatatttcctcctccaggaactctctctggccatcgtcccccttccctgaccccagggtgccccttctaggagtggacctagcaccagctcttatagcagcggctcttacttgtccctgcgtgtcttatgttggttgtgaatactatttcttgcctgcaactcccttctctgactgtgggctccatggcagtggggactgtattggtttcactgttggacccccaaaggcatgagagtgcctagcacatagtaggtgctattcaatgagtgtaggctgaataaatgaatgaatgaatgacaaaactggggtaggcatggcagatttactccctcctcattctaaggagaaagtagagcctctaacaggctgagagcctgacctgaagcccacagacctggcatctggcccgtgctttctgcatcctaaggggctgcgggtcccagcaggttgcccagtgagctggccatgcccaccatggccctccctgccactctctgggaggcccacctcgatcccagcaccttttcacttggatcggccgctggccatggattgccatggttactacaccagccctggcagtctctgtgtgacattttggttttatttgctaaacatttaaacacttgggcttaaccctttctgcctcagagggggctttcctgcccctgctccctgtccctcaggtgtgagggcccccggctgctctccctggccctggctggcgtctccgatggggtgggtgtgctcgtggtggcagcaaggcttgtttctcggctgcctgtattgactttctgttttgtctctggggaatgtcatcctggatcatgctctcactgggtggtgctgtgtccattaacaggtgtgaaaagccctgctccgggcatgttaaggcttgacctccccgtcagctggggttctgttgacttccaggcaaacgcctcttgccaagtcctccaggagcttccttagctccaggagttcaggacggggtggggaggggtcatctgcccttgaaccctggcaggaggacagaggggagactggtttcgggaagagtccgtgtttgtgaatgggaaggcggtgcgtcgcctggcctcccacgcctcctcccctgcgggcttaagatgaagcctcccaggaagaggaggcggcccgggaggctgaatccacccagctatgtgttaccttggaaaccacacacttgtcctcgccctaggccatgtgaagtgagggggccgtggacacgcttctcaggaagcttccagtgtaactcaggatacaaaaaatcacagtcccagcatgggcagctgagagaatgaaaatgttcaaaaaaaaaaaaaaaaaaaaaagcagcctaacaactgccctgcccaaggggctcccaccccagcaaccctctgcccattctacatgggacgagaggccagggccagtttgtctgggatgctgatcacttgtgagcttggacaagctacttgttctagctcaatctcagttgtgttgtctgtaaagtgggcagattaggccagaggatctctgagaactctgattgtagccagaattccatgtctgaggggcactgcctgacaaggagaggaaaatgtcgggagagtggctgtgagcggtttttggtaacaatgactgacctggtttgtgttcaggaggccctttgtgggactgtccgaacaacttctgtcccttctcttaatagccttgcctctgcccagtcacagagctggctgtcccctaaacacagcctcaaacttgacatagaaaacaataataaagacagctctttggctccaacatcttaaagtttaaaggtgactcctcttgagtctcttacacacaggagctggtcagacagcttaaagttttcaggataatagagtaagtggccaagtcccctgccttaacaatccattccaaactccttccatgaacgcgcactcccacttctccaaagtcatggggaacaagtgctcagcttaatagaatattctgtttctccatcattctcagcaaactatcgcaaggacaaaaaaccaaacaccgcatgttctcactcacaggtgggattgaacaatgagaacacatggacacaggaaggggaacatcacacaccggggcctgttgtggggtggggggatgggggagggatagcgttaggagatatacctaatgtaaatgacgagttaatgggtgcagcacaccaacatggcacatgtatacatatgtaacaaacctgcacgttgtgcacatgtaccctaaaacttaaagtataaaaaaaaagaaaaaaaaagaatattctgtttctctgagagtgccaaggtgtgtcatccctgactttttcaaagttaatccgttctatttggttttgttgttaccatttttcaatgatgatcatttcccccgtggcagcggttctcaatcaggggtgtgcctcagatcccccgtgtcatatctgggtcctgcataggcaggtgaaccccactgcctgggaatgtgtgttttgacagcaccgcaggggggccagtgcacactcttattaagaaacatggcactcaattaagctcagggaggccagcgtcttcccaatcatccctgcagccacccctgctgtgcctaacgaagagcactgtgcatagtaggactcagtgactcctggggtaaggatcattgactctctgagaatttgtaaagttggaaggcactgttgaatctttagtgtttggaggcttctatacaagtgttgttgcattgtgctatcaagaaaattctgataattctagtttcctgttgagtacaaatctagtaaaatgacattttcctgtttttaagagaaaaaatggcaaaatcaccactgctcaaattctccaaaacccaacaattggacgaggaaaagagatgaactgccccgatttacctttgaattaaagaattcgatgcaattcaattgagcagttttgtttcctccaaaggcatctcccatacaaacctgtcctgttagcatgatggtgggagagacactgagcctgcggtccgtagacctgggtccaagttgagacttgttcatttaaaacactttttaaacttgtggtaaaatatacataacctataatttagcattttaaccatttttaagtatatggttcagtgacgttaattgtctaattatattcttatatatatatttgtatccttattattgtatatttgtcaccaccatccatctccagaactgacttttgtcattttctgtgtggccttgtgtgcctccaccaaggcttgtggtgagctctcttcgcacatcatctccacaagcatctcccactttgtcagcccctaaacttacctttaccctgtcccatcgccctaacgtcacgggccggggttctgattccaagtttcgattggggaagtggttggtaatcccacaggtggtaatagtgtcgcctccatctgttgatctcttgtgtgctggagactgtgcctttactttatcatctcagtgattcttggcgacagtcccgtagttaggctctgtattcataccccctttatagataaagcaactgaagcagagaaggtaagagatgtgtccacagtcatgtggctggtgagggcagagggttttgaggtcaactgtttgagttgaccatctccaaagctagccaggttgccctgcctgggggagagaggcccgtcctcaaattaactcttctacccctggttcctacaatggctagaagcagcctagaaggtgggctgagtcatggggacttccctccaacaagggtgaatattaggaagcctagggctgaacagtaacccagtgttggtccaaccttgcagcagctctggaggccctcatcccagccacacccccaccttggctgtgccttgtggtggctcctctgcctattaaaatcccttccttctcctggtttccctattgtcctccccttgggtccaaggcttgcctcaaggatgaggcccagcacccttggggaggtagaagggcagccatctcagggtaacctgcccagccatcagaactgggacccgcttcagtttctctgccttgccttctgatcccaaggaaggctagggtcttccttgaagcctcactgagccccatactgggtcttgttctttcttgcctccctgccttctgaggggctgacttctacttctgctcgcctggagtcacagtgtccctgatagtccccaggccctcaggatcagacctgcctctaaccccaagccatcatctgcctgggctgagtctggtctttcccttagacactgtgccttgggctgccagtggcctgggtgagtcaggcttcagcagctcttcctgtttccccgcccatattctcccctccttctgcccgttcctatggtaaggtgccagcagccttccacccaaactcccctaagctggacccaggacttccctagattaaatgcccccacttccctgccataatcatgtcaataatcctgtttccaccctgatcttgctactctgaacaggatctgcttggtccacagcagcccagggatctggtgacacactgacccttacacaccactgggatcaggtcagtacagaaggcaccgacctgctttctcactttgttactgcagccaaagacagccagtgacttttagctttcatggtagcctgttagtttatattgaattgaatatttactaaaacccctctgtcttctcatgagctgctaagcagctccccaccctctgccccctcaatctcccatccttcctaataccgttggctttttaggtgagaactgtacctttcattttcttctgttacgtttccctgcagctgtttcagcccttcattctagtctgtccaggccttttagcatctcactcagcaacatgtatttgggggcctcccagcttcctgccctcccacatgtgatgagcctgagtataatagcttcatctaaaccattgatacaaatgtcgaaccagaagtcaaatctgggaggtaaactttctttggttggactaaagacaggagaagtaaagaagaaacttcaaggatttgcaaatctttttcatcttaaaagttttgtggcctcctgtgaggttgtagttttatgtgccctcccaccccagcccccaaataagcctgctctgcattcatagaacacgtgtttattgagccatgctctgtgaggggcacggtgcctggtatgggacagagctgtgaactacagactggacccggtctcgtgttactcacagtctgtgaaatgaaagcgtggctgctggtgctggggcttggctgctggggctgagtgttgagtctgtgaaatggacgggtgaagccgtacacctggtcactcggtgagatcacgttgtgtcacaggagagtgctgaggcatggccaccgtggctggacgttctcagagacactgctcagccacagcagctgggcctggctatgaccactgacctgtgactacatcaggcacagccacaaaccagagatcagtaaccagacacggcggagccatccagtgggcgcagagcagccaccgcctctgaactcagagccacgaggcgtctctgcgggagccgcccgacacctgcctgctgtgtgatcgccagcagaccctgcccctcactgccctcagatccctcacttgtgcatctggggaggaagctaagggctctccaaggtccctatcagctctttatggtgcttcttgctagaatgtgctagaaaccatatcgatttgagagcaaagagaaattgccaccagtgggtgtgtatgtgtggaatgggaggcgggggagtgggcagggcgatatttgtcttcctgctgctgttagaaatagcaactattctctcccctgaggactggacaaaaggtgattaattcattcagcacagagctattgaagggctgttctgagccaggcaccgtggggacagcaaggtccctgccctaaacaggcttgtgatctaatggagagataagcacgcagacacacacgccttggctgctggtgctgaggacaagggtgtggagggcacggcgcacagttccacctagatgggaatgaggacgctgctgtgcagggcatctgagatggtcatggggtcagttctagcaggtgcaggtgggtcgagggtcctctaggggaagggaccagctccagcagctgtgaagaatgcagaagctcagggctctgcggaatgggaggcatgcagctgatcgtaaagggaatgttgaaaggtgagaatagaaagaagggctggagccagatcctggtgagcagcagctggagcgatgaggcacccaggtctaaaatggtagtagccccattctatctatgagaaggggttgggggatggcgatctgatggcgggagagggaagccagggaatttgtcttcaggttgcacctgcaaagcattttatgtaagatggagagaatgtcaatagtctgtatcaaagactgagaggtaagaatggggatgggagacgggtgtagattatggtacaggttgaacccccctcaatcactgggacctgctctgaccttagagtacagggttgggctagaggaatggtggatgaatctccctccttgggagattgttaggattaaagatgagagccacctggtacactcttgtttaagagtcagaggaatggaaaaacacccctcccaccccaaaacgctgaggttctgatctcactgactgaacaccacccaaccaggagccagggcttgagggcagcccgagtttgtcttgctctgtcggatctttttggatgtttagcaggagcgacactgatcagacttcacaagaaccttaggattttacaattttgctcttcccttattgttcacaaatcaagcctatgcctaaaaatacactcttctccagcagcctcggggacttagcttctcccccaggcagggagtttacatccttcctttgcctgcagaattcaattcaaccttgcaggtttggtggggtggctggaaaccgccaccatcccagagcaggcttctatccccagggcctggctgtcacccgcagcagcagtgacatcacccaaagccgactttgtgcggggggcttctgagtgttaagtgggctcaaaaggttgaagtgcgggggcaggtaggaggagctgcatggcttgggaaggagcagctggcgctgtagagggaatgacttgccccagctgctgttgggttacgggctcgagttgtccacagccaccaggggacattttttcctcttctcagttcctctttgaccctgcgctcagcttcaccaaaaccaccttgtctcaccttctctgtgtgtcctcggcctctcctttcctgcttgcctcagtctttcccatctttcaaatctaaacatgtggtgtctgttgctgcgggttgactgcatgtgtatgtgtggttttcaagctgaattgacagggctaagttttacagccaatactgcctggctctggaagaagagaaagaggaggacaatgagggacaggatctcttgtagcagagaacattctgatccaaatgtcctttcaggataaatttagttcccggggctgggaccacattctaatttggtgggagtccttgggcaccctggtggggaatggctgcttccttcctcacctccctggtcgatttcagggaccgcaggaaacccaagccttatgaacattatacagaactgcaattacaacaatcctgagctgacataagatttattcattgggcaccaaatttcctttaggcccctttctagtttgtagtttttgaagctgctacattttttatggctggcacatctcaaggaggaaatgcagattaatagtctgtactggctgtgttctcatgatctcaggattgaatcaataatgactgcagtattaattaggcctttatgaaaagaaaatgaaatatggtatgacatggaagattctagatttagaatcaagagttctaatctcagctctgctgccgtctaatgggtgacctcgggcaaatcactgaatttccctgagtctgtttcctcctctgtataaacaggtcataatgctggccacatgctgatgttgtgagcatcagctgagagagctgggttaaagggcccaccagggcctggcacaaacaagagacttcggtgactttaattttggactctccttgctaaggagatcaccactgcaaatccagccctttgctggtgcacagtggtgcagctcttgcctgttcttggcagcaggtggggtacccaacaccttgagatgaactctccaaagtccttgctgacaatgtccacggtcccttcttagctggtgaccaggaacactccctaggggcctcccttctcaaccttccacttctcctacccataccccacaacggccccatttcctgttgtttctcatgaatagagtctggaagtagaaacactagttcgtgcagtgttcacggacatcacggggctctaggaagcctcacatcacatcactctgacactgactctcctgcttctcttttccatatttaaggatccctgtcattatgttgtgcccatctagataatccaggataatctccctattttaaagtcaactgattagcggccttaattctatctgcatccttaattcctgcttataacatagtcacaggttctggtgatttggacacagacattttggggggccattattctgcctaccacaatcctctatttgtagatgaggaaactgaggctagggtattagatcacatacccaaagtcacacagccggtaagtggcaaggttggaatttgaactggagctgcacaatctgaagtctactactaccctaaagggccccctagaaacccagagaaagctcattcccacagaatggccccaaacagccgaccacagcgggagaagtagagatcaaaagagcccacccattggaatccccacacaccgttttagttcataatgcagagaagagactggtgaataatactgcataaactctgaaccagtgcttctcacatttggattgagaaaaagtagtttgtaattgccctgggagctttaaaataatactggtgcctgagtcccacccctagggattctgatttaattgctcaattgctcaattgctcaggggaggcattgaatagaggcgatttttccaagctccccaggtgatttgaaagtgcatcagaatgtgagaatcattgccctgaactaacccatggccacagccattccccctacctgacaattgtgtccataatctgattagaccatgcccagaacacacccctcccaccttttgggccttttccctgaacgcccaggtccccctgtttcctcttcaccgcctcactcgaaccctgactgtgtgccgagcagcattagatgtgtagagaggaccctcccatgggaaatggggcatattctctcctctggcatctctcacgcccctcttgcatggctgtctgcagaatagaattgttttaatgtcctctttgtatatgctatatttctatagagtctttccttgaaaatgtaattcactatgttttcggtgtctgcatcagttcagcttgaaaggcagtgtgtgcagagggttggaggtctgactctggagccagactgcctgggtgcaaagccgaaccctgccagttcctgactgagcttggggtgaacgattctagctttctgtgcctcagtttcctcatctataaaatagggatcagaatagccgttacctagggttggtgtgagaactaatgctttcatatatgtaaaagggattaggactatgtatttgctcatgttactagtattgctactactcttgtcttcaccgagatctgtgggattcagttaatttcagcagataccgattccctactcagtgccaggatgggaaagaataagatgtgttctctgccttcaaatagttcatggtcttgggagggagagggctggtaaggagaagggaaggagtcaaataggtgaacagctaattaatgatataatacagtgttgacttggaaccacgttgctgtggaataataaagatggggacatcatgatgtggggattcactatggtcgtgaaggcatatcatgaattctaagcactaataaaaaactcttagtgcgttttgtcctgccatccatccgcatttgcgaagctgtgggctgtaacaccctgttaagccccttagactcatttcatgagttgtgaattcgagccaattgtgttagtgtttgtgagtgaacgcattaatctgaaaggtgtcagtggcatcccagttcctgctgcaaatgcccctcacagggagaggaacggggtggctttctccaagaaaacagccagtctcttcaaatcctagccctaccctcctttcaaggtgcatcccagagagcggctggagtccactgcagagggtggtaaaggaggacgtgtcatgccaacaagggagcaatgacagcaatcaaaagggacatccaaggaaaatgcagagttgcacggggagacggggtcttaaaagcccacacaggcagggattggaaaatgttcctctgggaatgctcatgtggtaaggtggccatgggtgagtgggaaaggagggaggggtgaatccttggtgtgtgaggctctgtagagagaatggttgctgcctgggcagatgcctccttcctgtcccctccagccaaatggtcacacatctctcgctcagattaacagcttgctggccggtgtggcgggcaactgtaggaatctccgtcagctgtgggaacagctgtacactgcccagggccacatcacaccctggcatgtttcccattccctcttggtcaaacacacttaaaaacaggactcaacgctccttggtttctaactgtaaaatatgccacgtgaaggatgcaaactcatgtctgcctggggactacagtggggcaggcaaatgtttgatgggcttgtgagtttttgtgttttgaagaaaaacaactgtctcaaggcagacagatgttgatgaacgtgtttatttataaagggcttactgagctaataatgacaccagatcatccccaaatgacaggtgtcactgctgacctatagctcagagtgtcactgcctctgttggagcaacctgctccatactgctggcctttttcatctgcagcccagtgttgcttgtggcaaaatgtttacagtagcctggggcttgcgtgaaagccttgctaacccatccctgtgccctgctagtggtcagaaatgtctgtttttgtttctaggcttccagagtcactaggactctgggcagggaaggagggccctcagctcattggtgtctagggcctggggcatttttgagccacttcacaaagcctggccacagtctgaagtccagtacatacagctgcagcccaggtgactccatggtgaattgctccatccctaacataaggcacttggcacagcctcagtgagctatgagagaggccagagtgggaaggtgtcatgcacggcgtgaaaagggccctcacaaagacagagagcctctcccctccaaccaggcagaacaactaagtagaaaggctggtgcagctggagaatatggccaggaaaggagcctaacagtgacagccagaggaaacccaggccgaagccactgggcctgtgtgggtctgcctcttggatggggctccatgcacacccatgttagtaggtggagctgtgtgggaacattcaggtccctggggttaagtctcatgcctagccctggctggagggttttgatgaatggatcttttttttttctttaatagtgtagaaattgtattttgcctcatattcttgggttatccatattagtctgcagctgttggtcttcctaaaccatgactgagtaggtcatcctctgttcaccactggtgatttcttaccatctggtgatttctggataatgctgagcccctgagcttggacatcaggctctacagcagggctgggctccatacttcctgggccctgccctggccagctgccctgaggtcactgaacacctggggtgagaatagatcttacccacccctgctccctgtgttttttcaaactcccctccttcctggctctggagtgagctcctgggtgcggggtagtggcttgagctccatgcaggtttggtgccttgctcatactgagaagctcagtaagcccacatcaaccatttgtctttctctagccaagagtcaaatagatccacgtttaaatcccagctctgccttttattagctgttggactagttgtttaaacctctctgcctcagtttcttcatctaatatcagtaccttcctaaaggggttgctgtgcccattacatgaaataatgctcagaaagcagtggtacagggtaggaattcagtatggtagctgctattgtttttgttactattattatttcatctcacccctactgccagtgccccgcatgcagtaagtgctaataattgtccaatcaagaaacaagtgaacaaaggccatgttcttattcccttgctcttgtgggttggccccttcctcttctgctgcctgcatgcccactcccatcagactgctgagagcgttcctggcgcgccccgacttggtgctgacatcagcaaacagagccccggaggccgagtctttcactccggggttgtgcatcctccgggggtgtcagctcttcaagctcttccaggtcctgcagctgttggctagagatgccagctatggaaacagctgtgcctccaccatcttgcctcttcctccccgtggattcctgctatccctttggcaggcaagcgcacttaaaaataagtggcaaaagttgcacttgtttgaagtgtaagatatgtcactctcagaaagagattttgttcttactgaataaaggataagaaatagattcctagttaaagaacttttttggctaactcttctttcagggggtgggagcgagcatcctttgtccttttggcgtaggctcttggggaagaatggatgttcttgcttcagagccgccagcacaggctctctgggctctggctttctcattgatctatttccctctagtgaatgggttttacagaagctgcagagagattttcccctaatgattgtggatagaaaagaataaaaagtgactccgggggtatcttgggaccttaactgtcattgcacgctgatgcttcatttcagaatgcaaacggccttcttctactttgccgggataaatggttccctttagctggggacagtgagaaaagaagcagggctttccaggtaaaattgaacggcctcctgtgttgggggtgaggctctcccccccacctcctttcctcatctcccccagaatcctaaagaaaggaggacggaggctggagtccactggccagcttggtgtatagaatctttttctttctctttttgagcgggggataaggtctggttggagggaagtggcaccatcttggctcactgcaacctccacctcccaggctcaagccatcttccgacttcagcttcccaagcagctgggactacaggcgcgcacaatcatgcccggctaatctttgtattttttgtagagatggggttttgctatgttgcccagcctggtctcaaactcgtgagctcaagccatctgcctgacttggcctcccaaagtgctgggattacaggcgtgaggtaccatacctggtgatggatacagtcctaatctgtttcctcctaacaggcatctcccggtgaagcctggagtctagggaaggaactcctgcttaatgggcccccaggaagtcactttctcaggctggctggcatcagaactggtgcccaggtaggaggtgccagtgtcagtcttctcagggtggggtggtgtctgcttttcctgtgggtctagcatcctcaccaggttataacaaggccagctcggagctctgtactgggatctcttaacaatcaccggccctgagcacccatctcctgggtgagggtttgggccagaaagatcctctgagccaattctggactccttatctgtgtcctgtggtagagcaacagctctgtgaggacagagcaaagctagggggccaccgccgtgtaccaatatcagcacaggagcttggccctggtgggaaagcaatggaaatccatctgcgatagaatggatgggtgaaggaagaaacttacaccttctcaagcaggggcaggtggccctcatgattccagactgtggctgtgatctgggacaagctctcccctttatttccaagtgagctgcttatatgtcccattctgtaagaacacagccaatgaatcatcacaacagcacaatgacaatgatgactttgggatccaaaataagaaaatcaaactcccttacattcgttcaggaatctacagttcaacgaggctgtttcccatgcatacgtcacacccttcgcctgcatgtgagtggatgaatgtggcctccgtttacaggtgaggcagctgaggtgctgccaggtcaagggacctgcccaggaccatgcaggcagcaaaaggtggggtggctgcctcccaacgtgggatgcagagctgcagttgccccagcacaaagtcagtttcatgctcagctacagaactaatctcagtgacctttcctgggtcccatgctctgctgccagatctcttgtgggatgaggccaccatgctgaccaagaagctccagaccacgatcagctggctgtccgctgtaggggcacaggtctccccaccccagggcacttgcggattcaggaaggaggcagtggaggctctccttgctttcagtaggagctaagccttttcaactgcactctagggcatttccagcaaattcctacatgaccctatgcaggggaggggacacaaccctggtggcttcactttatgggttgaaagtctctgtgggctccaaaagcgggtcagcctgccctcgttttctggagactctggctacgctctttggacagttcacagggataatctctagaggtgccctggctagaacacggagatgcctggcactgctgtgcattcatccaatgagtgacagtgatcttgagcccttgacctaatccgacagtgtgacctaatcccacagtatgacccaatccatttggcattaatgctggctgagactggagaccactgacctcttttcctttcagtttgatcatataataagaactgtgttagtataaatcattatttaaagtgtgctttaggccaggcatggtggcacatgcctgtaatcccagcactttgggagactgaggcaggcagatcacttgaagtcaggagttcgagaccagcctggccaacatggtgaaaccccatctctactaaaaatacaaaaattagccaggcatggttgtgcatacctataaacccagctacttgggaggctgagtcaggagaatggcttgaacccaagaggcagaggttgcagtgagccaagattgtgccactgcactccagcctgggtgacagagtggactctgtctcaaaaaaaaaaaaaaaaaaaatgcaataagtgtcagtgttgtgtaattgactgttagttcatagcaatggtctcaccagtctgcccacagtatagtgaggtggtaggatggaaggcctggaactagagactaggatttgaattttggctccaccacttcttagttgtgtaacttcacacactctgtaagtctcgtgcccctaatctgcaaagtaggtacagtgtcagtgcctactcattgagtttttgtggggacaaaaccagagaatgcttgtgatgtgtttgtcactgtggtccccattacccttaagaaatgtcagctcttttctttgctcttattactacattagtgtaaacaatgtctcccatagaggctgctcctgaattagtagtgtattcttgccataaattacacttgggaatagcctgattaatagtcagagataagaggcctagggtgtaaactccaccaaattgttcaatgtgtgagactttgagttagaaggcttggcgaatgtcctgcctcgctatttgctgccttcatgggtataactaatgtaccttctcctcatctgtgaatggggataatgatgttcctgagctatggagaggaccaggcaagcactgtgtgtcagagcacctggcatagggcctggtacaggtcaatgcccacctattttctgtccttcctttcttcctgtttgttcaaaccaggtctgaggctaacagatgtgtcttggtgagtccaagagggtggctgggccataagggttgggggagtggagaagtggggctaccagttgctgctggcaatttgcaatatctaccctgtcccaggaattgtaccctggcctctcgggatgatttagtatggcagtcatggagctgaaagttacaaatggaggctccagtgatggagctggatttcctgttctatttagtccagagcccatgtggaggatcaagacaattagagccagagagtgctggagaaggcctcagtgatcatcatcagaccatccttcttattgaacagatgaggaaactgaggcctagagagagaagacacctaaaagtccacacagcaagttacagagacttgctcaggcagagcacacccctgtgtccacgcctctggtccttctaggtctctggggtcacactgatcagaattcctccagcatctgctatatgccaagctttgtgtttctcattcaattcatttaccaaaaattgaaagagtgcttacactgttcctggcactggggacacaataatgaacaggacagatatgatccctgccctcatagagcttccaggctagtgggaaggcacagggacaggcaataacaaggaatcaatcaaataagtccgtgtaaattcagatgcagacaaagaacggaatgtggcagtgatggggggtcatggaggaagaaatgaattagggttgtagcttcaagggcgacctctgaaagttactttggtattgtgagatttatttctattaatacttcctttcgctatgtactacagtattatctcctcaggaaagtgaggctcagagaggttaattaacttgcccaaaatcacacagccagtcagtggaggagtcagaattcgaaccctactctgcctgactccgaagtccaggttttttccaccatccttgattatctacagaaattaggacaacctactacagaatgtcaggtaatatggtaaccattagtatgagcattaagggaccccaaggccagacctgtgagcccagcctcactgctgtctctgtctcctgttctagggggagggacgaggtggatattctagatggtcttaccctctcctctccttcggagactggcttcattgggagtgagatgacactgtcgcagggctagctttttgtaggccactagttgtcgcaggctgctgatgaagccaagcagatcacccccatgtccacaagcacaccgggattagatacatttaagtcctagatcccaaacgcctttttcatttctggttttgcatttgtttccattctactatcttcatttggaaaaccctttcattcctcaagaaaacaagccacacaatcaaaaaaagatgtgtcttatcctctgggcgctgcctcattgcctgccccattattgaccaatgccaccggagtgccttgcacagcttggccagcgttcgctgtgcacatcgaccagtgagctggcatgctgacagcggcagaggcccccagcttcagacacttctgaacccagctgctttacggacacaatcggttgaatcggttgaatcatgacttgtctcccaaaccacaaatttgtaactagttcaccgtgagcctatgcagccagatgaattgtaacttgggcagtccctgcacctaaattttttttttacccaataaaaaatgatatctagacatctctgtgtgcatgaaagcatgtctgtacgtgcgtgtgtatgtttggcaccaatgggaaatacagagacgtggaatgccagctctgccctcaacctcttcccagacgggtgggagatgatattctgtggactgtaattcaaagaagacagactaataacaaagagctatggagaccaggggaggggcaagaattcagatctggagtggagaccaggaaaatggtcctgggaggccagactcttggagaaatgtggacctggcaataagaatttatgagctctttctcagtcactgctgagtgtatatcttccaaggtattttccagtgggcataaattacctttcgattgcagtattcgccacctccactcatcccccaacaccaggtcttatgtggactgttagggaagcctctaacttgtaccctgcctcctcaccctttctgcaccacctcacctcatcgtcacagctgtgaggaatccaacagacacacacactggaccttgtccttgtctgaaaacttttggctgctcctccttgtccttagaatacagtctagactccccagggggcagatagagccctccagaattggccctgcctgctctgcggccacatctgtgccatttcctcctggaacactgtgccagtcaacctggagtcccctgtgcccattaccctggagtcccctgtgccccacaggtccacgtctctgggcctctgcatgtactgctcctccttccaagtgctgttctcatctcttaagcctgagctgtcctccctgacccacccccaccaactttcagtgcccccacggagcctcatgcatacagacgtctcttgctgcacctcttatatgcaatatattcctctgtttacatcactgctcatttactgagttatatgagggtggtccaggcccgtgcctctttgagtccccatgccttatacagcatctgacagaagggtggctcagggaatgtgtggcacagcagtgaatgatgtgcagcttccaccgtacttccagacatgaattgatggtcctggaaccttcagagaagccttaccacgttgtgatcagtaggtgggggactcgacactaccactgcagaggtggctttgtggggtggcccctgtgtgccctcttatgtttgcaaagtgcgttctttcacgcagtcagcctaccaatgggtgaccagattctttcttcagaagccagtcagaaaagggacttggcttcccagattacgcaaaggcaatctaatcccagaccttcagtttttggttagccagcggctgcacaagtgtcacagaccacaggggctgggcgacgggcatggtggtccctctgctttcctgggcacgttaggatgtcattctctcacaggactcgtttcagagaattttccgtgtaaatgtgaaagacctaaatttatgcctgtctcagtaactaagtataggctacttatggaaccacccagctatgggaaatccagccatgacaactaactgtgaagaaatagccccccttattacacagagcagacatcctcagggattggatgaaaaagagctctctaggaagtcagtgaaaacgagctccctgcctcctcagagtatgcctggtccagagtatgcctggtcaatgtgtgacaggctcgctactgggttcccatgctgcatccataacagacataaccaatcgatcccagcattctttctagatgggctcaaagtccttcctccctccagtgccacctccatgcacaatgcctagcctcaggcatactgctgctcctgcacctctgtgaatgagccctccacagaggtccacctttggtccatggttgatccatggaccaaaatgcctgttccttgtgggcctcaagacagctgaataatctactaattcaaagggagaccagaaaggcaatagtcaaagataataaagagcataacaatagtctaccctctataatgcaagttttttctcctctcagagggtccctgatcccatcagaggactcagttcttcacaagcaagactgatcttgcagcagagggctgatggagtcatttacatggagagccaaagagagtctctcccaccaggaccttgagctcctttgaggtgtgcctcattttttcattcatcaagtgtttattaagcatctatgtttaagggcaagctctggggaaaacatggacatagaaacagacatggtctctgtcctcaagcagcttatagcctcagaacaggccagacattagtcagataattgcacaaatgactgtaaaattacaactgtggtaagtactccaaggagcctagattgatccagtcagaggatgaataggattaacttgacatagagtgaagggaagaacattctaggcagagggaacagcattcggaaagattgtgtgtcaagaaggagatgagcacaacagccttggtggtcctgggaagaggatttgtctacattctacgcacaacaggaaaccaccaggcagaacctctagccctgggacagtgctgtgcacattcgagggctggatgcatcagtgaggaacaaaggcatgcatgggggaaaggatccagtgtgatggaatgacggatgctctcccacccagattatgtgcaaaccctggaatgaatccgcctccacactgactttggagatctggggcaggtcgggtttccaactgcaggtctttagtattccttgactaagtcagcttagtcaactacgttaacgaggtcaagtcaagctaagttaactactccagccattcttagaggtatttcactgcaggctttttgtgttctatttctgcctttccccccacaacagttgggtaacagtccccagcatagtgaataagttctgtaagatttaatattgatttgttggagtttttaaaaattgaaagtataattaatgatttattgctactttgcagtttgcattaatcactgtcattaatggtaatccttttaggtggtttataacttttaaatggagtctgttaattcccaagcctggtggctttgtctctaggctgcattggggtctgccaccctcccatgcccccgacatccctccccatcaccccatttgctttaagatacagggatgaaactccaggtgtaaacttttcagggtcagcctcttaccaaggaacagacatttgggtaccttcctggccaagaggaggggtggtgcacaagctggctctgggcctttgctgtgggcagagagaaccaggccactgctagctcttcaacccactacttcatttacaactctctgactttgtattccctggtttgcatgtctgacacctcacttggcacatgatttattacagcttttcaatagcccgttctttctgattgacctgtccatctccatttggagtggaaagattggcttctaggtgtttgtggtgagaatattcctgagtgcgatggtttggggttaggagcttcctgctcttggtacagaaccgaggaccacaactaaaggaactcccctttctctggctgggaaatgaaaagggtggggaaatacacactagaagttgcctgagacctggctgaaggagagaaactttctgttttgccaacaccttcagggatagaaaaaaaatcaaacttctgcctgcatcacaggcaagggaaggcagctcaatggaaacagcatgaaaagaacttcggagcccatataggtcaatcctctgcttctggggtgggcattctctcccacatgaataggtccagatttcattttgaaaacatttccctgggaggaatcttccctcaaattctctctctttccgtctctacccttcttcaaggtttgacaatctctctaaccaaaatccctcttgctgtagttagagcctcttagggaccagttaaactggaataagggatggccataacaaaacatgcaaattccttttccttttaaagagaaatatgtctcctggatattacctgaataaacccatcagcttgctgttacttttctgggattatacttgatgaggatggttgcagaaagtcctgtaaacatcttctatagtctgtatggggaggacaagtcccacctgtttccagtggaacattctgattcctgttgttactctatatttacagagtgggctccactaagagcccacctccttctgtcactggtggaaaggctatttaatatgatcccaattagagggaggaggatctgggatggttgttggaacatggcagacgggggagaccggagggaataaaccaccccaggatgctgtgtgaccacctgaccctctgcaaagcagcatcgtggcactctgttccctttcaaggttcccacagtgagtgccacccatttttaccacaatggcaacaggatttatgctcccacccactctcagttctgaactttctatggctttgccctcattggtcataaaacacgtgtcacctgcctctctgacttggcttttcttgcaattacatggtttcctttgcgatcttcctggccagtggaagcagaaggatgcttttacagacagggtattatagatgggttggcagatgaggtgatttctgagggcctggcacaatgccaaagggacgtgagtcagctctcagaggaggtttggtttttccttccaaattcatacaaacagcagtgaagtttaatagatcctcaagtggattacaacccccattcatttggcagcagaggagcacaactgtcaaaaagtccaggtactttaagctgtggaagaggcacagagtcactctcaagttggacagggcttcaagctatttccaaaatttacattcggggcctttcgttccctttcgaggttcctttgaggaatgggtgaaagccacctcttcttgaccacagcagtgactggatttatttttgtcctgtcttcctcctccacattctcagttctcgaggctttttattgtttttggttttagccaggcttgggctggttgcttactctccggtgtgcagggcttctagaagtgttagccacagccagcgggaggcagccgatcacccatcccacctgctgagtgtcgcgggcagacatctgttgagctcctccccagcaccagccgcaagaatgtacctgatgtggtctttgtctgcaagagctctcagtttagagcagtctttttgagaaaaaaaaaaaaaaagtggtatgatacacgtaatataaaataccatcctaacttgttttttttttttttttttgagatggagtctcactctgtcacccaggctggagtgcggtggtgcgatcttgactcgctgcaacctctgcctcccaggttcaagtgattctcctgcctcagcctccctagtagctgggattacagacatgcaccaccatgcccagctaatttttgtatttttagtagagatggggttttaccatgttggccaggctggtctcgaactcctgacctcaggtgatccactcacctcggcctcccaaagtgctgggattacaggcgtgagccaccacacttggcctcatcctaaccatttttaagtatatagttcagtgatgttatgtttactcatattgatgtgcaaacaatctccagaactcttgtctcctgcaaacctgaaattctgtacagtatatacatgggggatgtgttccaagatccctggtggatgtctaaaactgcagatagtaccgaatcctacagagagagatagtcccagatttaacgatgatttgacttaagatttgtcgactttatgatggtgtgaaagcaacacacattcagcaggaactgtactttgaattttgaattttgatcttttcctgggctagtggtatgcggcatgatattctcttgtgatgttgggcagcggcagagagccccggtcagccctgtgatcacgagggtcagcaactgatacagtactctaccgtttacagtgttcagtaaatcacatgagatattcaatgctttattataaaataggctttgtgatagatgattttgctcaaatgtaggctaatgtaagtgttctgagcacacaaggcaggctaggttaagctgtgacattcggtaggttaggtgtattaaatgcattttctacttacaatattttcaatttacaacgggctcatcaggacgtgacccatcataagttaaggagtatctgtaatgctgcaatgaacatgggtgtgcaaacatccctttgatactctgcttttaaaagcaagtgttcttggctgggcatggtggctcacgcctgtaatcccagcactttgggaggccgaggcgggcagatcacctgagatcaggagttcgagaccagcctggccaacatatatgttgccatatatgtagcgaatcctcatttctctactaaaaaatgcaaaaaattagctgggcattgtagtgcatgcctgtagtcccagccacttgggaagctgaggcaggagaattgcttgaacccaggaggcagaggttgcagtgagccaagatcgcaccactgcactcctccagcctgggcgacagagcgagactctgtctctcaaaacaaacaaacaaacaaacaaacaaacaaaaaaagcaagcattcctaacctggggcccgtgaactcccagaaactagctgcaatacatggtgtgtttctgtaaatgcttcttgttctagggaaagcaaattcatagctcgcatcaggttttcagtgggcttaggatgtcaggagggctcagtctagagagtaacaaaagcagcacctccttcggaatcccccaaggccctgcctgtcctgagtgccgcctctccgatggcagggcaggtgtgaaggagcaagtcattcacttcttggttcctgtcccagctgtgccatttactacctgggtgacacttggcagttcagctgacgtcttggagccctagtcttcaaatctgtaaaatagaaataatgacaacgtcttcctaggattgttaggaagattaaactagatttagcacaatggtcaaaagcataatgtggtaggctgaatcataatgcccccccctgccccaccgaccaccaccctgccaaaatatccagctcctaatccctggatatcctggcaaaagggactttgcaggatgtggttaaatgaaggatcttgagatggaggagagtatcctgggttatccaggtgggatctaaacgtaatcacaagtgtctttgtgaaaagggaggcagaggaagctaccgaagaggaagcaggacgagtgatggtgaagcaggaggctggagtggtgggagaagaggctacgaggcagggaaggcaggccctctctggaagctggaaaagcaaggaaacggattcccccgcctgatcttcgggaaggagccagccctgcggacaacctccacgttagtctagtgaaactgattctgactccacacatctggccttcggagctgtaatataagatanttgtgttgttttaagtaatgtggggagcattaataagaaatgagtgtacgtggactctggggccagactgcctgggtctgagtaaaccacttaccagctgtgtgaccttgggcatgtcacttaatctcttcatgcctcagtttcctcatctttcaataataaggcccaccacaaaagggctgctatgaggagtaaagaagctagtatgtgtaagtcattgagactagcacccggaacctagtaaacgctgtgttaagtatttgttaaataaaataactaaaaagcacgtgaaggtggctggctcacaggaggctgtggggtgatgcgagtggatgctgacgggtttggcggcgtgggctgtgctccgtggagtcagttcaggaaggcaggggagtatttggtgcctctcaggaagactatggtaatcttcatgaaaatgaaccatggatgcttgaaggaatgaaccctccattgtctgttacactgaatgcctcacaccctgcatttcccagtgttccttgaaatattaatagctgttacttcaaaacaagagtcaaggtcaaataagtttgagaaactgcatttcaaagccgacttgttttcttttcttttagaagtctcagaagctttaatatgctaatgagcctgatgaatctctgagaagcatttttcaaacatttggccactcaaccactttgtatggtgcttccaacatggccagcactcggcagaaggcgcctcagagcaagcctgtatacctgtgcctgctacagaggtgtgtgaaggtgggacaacccatctgagaggcagtgtcaggggcctgtttgcctgacctcagaactaactagaaaatgcagctgcagctgctcctgtcattcatatcccagacagtcagaaagggttaccgacaggcccatccatccctgtttccttcagggcctgggcagcctccagtggaggcgcctagaccctgaggccccagaccctagcatgcccctctcttgcctccctcctgacccaatctaagaccctgagggcactgtggatgccacagccctcagatctaaacttcatcctgccccctcctccagctaccccttggctgcttctcaggcttagggatgtacctaccagcagccagcgtcagcctatgggaggacagatagagaaagtggcagcgtgggcccaggaagcagccctggggcctttttggacaggggactctgggcgtctggatatccaaacgggggtttagaaggtggaggcagacaaggcctcttgcgctgtgggcttctgactccacggggtgtggtgtgacttaaggaggggtcaagcagggccctctagtgtgggggacccagagccagagctccaggtgtctggatccagggcagtacctgtgggcattgaccacacagcagcacagaccccgaattgcaaatagtgcccccagtcaccaaactggccctctccatagccatatctttgtttgcttctgcgcatctctagcagacacgcagttctaagctcctggttcattaggaacttgcatcctgatctccgctgtaccccacgggtcttggcattgtacctggcacgctgaggccagatccgcagtgacctctcaccagcagcagtcgctgtggtgatggtggctgccgcatgccctggccctggccctggccctggccctggtccctccctcccaaatggagggaatggtggagcaggtttcctttctcaactgtggggagggccaccacttcccacagggagcctaggcctctgccctcagtgggggagcggagtgggccactgactaacgcggctttcagtgcctacgataggaattcacatggagaggtggccttgaaataagtgccttgtttaatcttcatgccctggaagtatttttcacaaggtggcttagttagaggggctgtggatctggtaatgaggctggccttggagggggagacttgtgagaggagctcagctatgaacacttctagcagggctgtattcataaaatcctgggggctcccaggggatttgaagctctacacagaaaattacagggcaggaaaggacctgggcaattatttttcctccaagaatggccatgcttaaaacatcaccattaggcgccacaagtggctttctccatgacagctcttttaaaaaatactttattgggtttttttaaattacaaaagcaatataggcttcttttaacacagaggtgtgttctcattatcaaaaggaaaaaaatcaataggttccctgattcccatctccctgcgtccccagtagtaccagtgttaacaatttagtgtttagccagaggtgattaatgcaccttttgtgtgtgcttatacaaaaatgtaccaacatgcatacacatatatgggcatttttgtttttatgtgttggtgtttgcttttttaaaaaagaggaatcacactatacccattatgctgtaagtttctctttttacttagcaatatatcgtgaacattttctaagtcaatacatatagatccacttcatttttaaaaacagctacataatgttccccagtatgagtaccataatatattcagctgtttccctattgatgtgtattcaggttgtttccagggttttttaaaaaattataataagcagttcttttaaaatattctttgatttctttttctatcttgtgcatatgttacaaaagactcttttgccttaggaggattataaaaatggtgaacaattaaaatatttctttacagtcacattgatatagttttgacaccttaaaccctttatgtattcatttgggtggccctgggcgctgtgcctggcactgtggaggacagtgaccaaggagatgtctgtcctcaaggacccctgctttagtgagggtgctgacaagcaggtggacaggaatgcggctcagatggacgatcaagaaggaggtttcggccagaatggaaacttaatagatgagagtgtggcctcttggtttaaatcctgtctccaccacttagttgctatgaggtctgggggatgttcacttttcttatggggctattgtgagactcaaagagttgatgtaaagaaaagtgcttaggaggccaggtgtggtggctcatgcctgtaatcccagcactttggaaggccgaggatggctgatcatatgaggctaggagtttgagaccagcctggccaacatcgcaaaaccccacctctactaaaaatacaaaaattagccgggtgtggtggtgcacagctactcgtggtagctgggtactaatcccagctactcgggaggctgaggcaggataattgcttgaacccaggaggcagaggttgtagtgagccataatcgtgccactgtactctagcctggaagacagagtgagactcttgtctcaaaaaaaaaaaaaaaaaaaaaaaaaaagaaaaagaaaagtgcttaggccccagccaacaagttggactcaccaaatggcttgttgctgtttgaagtgctgcccccgccactgggagatcaggaaaagctccccctgaaggggtgacagtgcagctggcccttgggaaggaggtgaagggccttttagtcagttggggaaaaaacaaacactccctgcccaccaccaccacctggtcctgacctcagttcttcagctccctaggctgttcaaagatccaaaaacctatttatttttagttgctaaaaatatcccctaagccagggttaaagaatttctcccttagtggtaaacaggtgacttagaaccaatcagggcccagcagccccagtgatgatgctgttcctcccctacccccaaacattcagcaggatcctttcatgtgtcaaaaggaaagaaacttatcagaaacttcctgttgagaaaacgatacctcttaccccagacttagcagatgcacagaaacctttgactcctggatctgccaaggcacacaaagaaccagaaacacctattggcctggcctgggataggcaaacactggggctcagcccaacaagccttcctagcacagcctgggggcagcacacacagtagtcaagagagctgcctgccctggctgtagagcctaggtctgccccttattaactgtatgacctgtagtaaattatttagcctctccgagcctcagtttccctgtctgtaaaatagaaataagaatacctgtctcaaaatcctgttaaggactaaatgagatggtgcctgtaaggcacacagcacaggacctggtgcacagtgaggctgcaatacatggcccctgctgttaccattgttaatggagaccgccgccctgctccctccgccccctgaaacgggggctagcactccccaactgtctggccatccttctccagctgccatttggggattggctctgtgacaagcagggggcacagggcctggggaatactggaggaaggcacccagccccacctgggagtcagaagggaccagcttaggcctgtggaagggtgggacgctggatctggaggtctctggtgaagaagctgagaagagggagtgcttgtacagaagatggaagggcgcaagcttaggggttactggtaacttggtttagctgggatgagacaccgggtgtggcaggtgatggggatagaggggccagctggtgccaggtgggaaaaggcccttttggccaagtgcagctaggagggtggacactctgggttgccacggaaaggttctagaaggggaggtgacatgatttggtttgtattttagaacatttgctctggcagcaatgtaaagatggctggggtggagcacatgatgagaccaaggtgtggccacagcaacccaaggattggccggggtcacttggccttactgcttcaaatataattggttacaaactcccaccccacacaggaggggacccggtgtctttccactggtctctgggggcttggaaacttccatttctctcttgacagctcatctgatgccaaactctttctgctgaattctccacctccatcctgtacttagtaaccgctttaggcacccttcctgttcctgttgctcctcgagggacccatgaccaaggcctctaggttagctgacatttccatggatctggagcaaggggaaggggtgaggtggtggtggcacaacagataagacagcgctgaacgccacatgctcctgatcttacagtctcagcactgtccctgtctcatgggtggtcaagtcctcagtgggctccggcctccccctctcatgggactggcccaaggtgctgcttagccagctcccctctccttccagtcccacagctcacaatcccccatctccagtgttcctgttcatttctagggcacatatattaagccctgtgttggtctcctctgaccccaccccaagcctgtccagaggaatcttcttcattagcaaacatgctggggtgcataagtgggctcctaaactaagatggtctcttcctcgctagggaccccatcaccaggtctccatagaggcctgttcactggcgggaagaggaggaagggaaagatgataaatggatattgtatctgtggaaatgaaagccgtggtcttagttccacaaacatagcccagtctagattacagataacgatgtgggtttcccaggtggtgtggacaccagggatagaacccagtttattttaatcatatattgattctctggtcagcaaagattcttctgagaatgagcatttaaagggtgggcttgagttttctttcttttcttttttctttttttttttttgagatggagtctcgttctgtcacccaggctggagtacagtggtgcgatctcgactcactgcaagctctgcctcccgggttcaggccattctcctgcctcagcctcccgagtagctgggactacaggcgcccaccaccacgcccggctagtttttttgtatttttagtagagatgggtttcaccgtgttagccaggatgttctcaatctcctgacctcatgatccgcccgcctcggcctgccaaagcgctgggattacaggcgtgagcctccgcgcccagccgagttttctttagaagacaaagtaaagcccaaactggccagcccccaaatagagtgcctgcttagcaggctggcaggtgaaagggcgtgggacttggaagacacagaatgctgcaagccccaggcaattgattgaacctgtcttggtttgggtttcttcatctgctaaatggatgtatgactcccttacagggacattatgagatggcaatgaaatggtatgtgcagaatcacctgctcggcccacagtctggcttttgggtaattttgacacaaaagggaatagctatgaactgaattgtgtctccccaaaacgcatttgttgaggccctaacctccaatgtaactgccttggagaaagggtctgtgggaggtaattaagtttaaataaggtcataaggatgaggtctagtcctataggactgcagctctaggagaagagaaaaagagagatccctctccctttctctgccatgtgaggacacagtgagatggcagccacctgcaagccgggaagagagcctgaccgtgttggcaccctgatctcagacttccagcctccagaactgtgaaaaaatacatttctgttttttgagttacccagtctatgatattttgtttcggaggcccgagctgtggtgcatatttaacctgtgggcagtgtgttttcagaaagtggtgacatggtgcacatggccctggtgggagtgggtctgtggtctcctgtcctttgaggaagctccttctgtgacatccaaggtcccaatgatctgggtcctgctaccttcttggtctcacctggtatcatccctcacttctttctcacattggtcttctttcttttatctctccaactctctaagctccatcctgccttggggtttttgcacatgctgtcccctctgtaatgcatacctttgcaaggctcactttggattcagaggtcccttccatagagagccctccctgtcctggctgtctgggacttctctcatttcctttgccctgtcttattctcttcctggcaggcatcactctctaaaattaaatggtttacctgtttaatatctgttttcctcccctgaaatgtaagctctgtggggacaggggccttgtctacttgtcttgctatatccctagagcttaccaaggactgtcacataatgggggctcaactcatgctcaatgaatgaatgagtgaataagctgatcggggcaaagctccctgcctgtgcatcgagcacctcttgaaccagaccccaaacacttgatttccagcatcacaccttgtctctccttacaactagagaccagctggtccatccaaaggatttccagtcaaagggttctatggagagcatggggtccactacagagacctaggctggaggaggaggtgagtgagttgatctttgaatgttcttctctaccctttcaactacaacagctctgaatttgtctgtttcccatgttgggcgtacatgaaaaatcttatgaaagaaatggccccacagcccagagaaaatggaaaaccacaaattgcatccaagtcttcacattacactgaggaatctgaggtccagagacttgccacacacagatggccagaggtgggatgctctatccctagtggtgacgtgctcagggatcaagaaattcctgctacgtgagtaaaaaatagtggctcgctcaaatgccgaaacttggctttctttctctgagaactgaggacaggggaaaggatttatgatcaccactggtctctgttagtcccaaacaaacttcagactccataacccccatgagtggtcattacacactgcaagagaccaaaagtgagctctggcgaagcgctcaggagaagcctatcctggccggaccaaagagccactgtgggacatcacacatggcccagggagtgggatggtttcagatgaggacaatttcttcttagacacagagcggggtagcgtggaccccaacgccctaagcatcttgtttatggtagaatcatagacttccctgacaaggcctgttcactggctggcctcttttagagccaccatttttccacctttgcttcccaacccccacccgcctccctttcttcctctagttccatggagcatttgctgactggtaattttaccaaccattgctgcaaacccagaagttcatttcgtcactggcaatcagctcctgtcctcagggaaacctaattaggtactacaggatttttgatgttgcttccatggtaacccccgtagtaatggtgtacatgcagaatatatgctccagggtgtttaaatttatatatgtatatatatatatataaaatataaaacatatatataaataatatatcttaagaaaatctgtaattttttcttcttgctttgtttctgtgtcgtttttttaaatgatggaaattttcccggaagttcttctccccacagagagagaacagtacacaaaaaggctttttccattttctctcctttaatttagagaaattcacagttgtgcaagagtgaaagtttttcaggttggtcagaaagtgtctaagcaggaatacgctctcctccctgatagctgagaacattttaatgacagattttgcttaaataaaaaatcagaaaggtctcaagtctttcaaaatagaatggggggaaaaacgagtgaatccaatgaatcgactctaaacttatcctaaaaaaaaaaaaaaaaaaaaaaaaaggaaaaaaagaaaaaaggcaagcttccctgcatgcctacccctttgcaggaaatgtggggaggcctcgcaagtctgaagctcgggctgtgcatgtggctgctggaggcactgggtagtgtccttgtctccttgtcaaggcagcctgtcccaggccctgcagagattgcagctgaacggccctgtcctgaggtgtccagatggccttcagcgttggccttgtggtgagctggtgatgacatctttgcttggcgagacactctaaccagggaaaggtcagacctggactccctgaggtgcaggtgacaagggagagggcctgtgacacacccacagctgaaaccaagggcttctgaagaatccctgaataactgaaagtgctttctgtactatccctcgctggccgtccaaggatggaatgccatgctgacctctttgttagctgccagcgaatccatttaccctcagcatttgccaacaaggtccactgctcccagactccctgctgtttttctccagcggcccccctgcccattaattctgttgtgcccttgttccctgattcagtctaccagctgacttcctcacatctgagaaaacactttgtatgcaaaacaactaaactgcttgcaaaataactttttaaatgctctgagttattctttgatatctcaaatcatgtgtccatggggagagtggggatgggggaatggccatcaaggaatggcccttgaccctgatctcctccccatccagtcacccagttacttgagaaggactggccagcaaatataactgagtggagtgggaaggtggggacgggtgagggttcctgctaggggctgtggcataagaatctaaaaggaaaatgttgggcacagtaggcacatgacctggcttttctaatatgtgccaaatataagaattagttttgttatatattagttttgttgcataacaaagcacctcaaaacataatggcttaaaataataatttaggtcacgtttctgtgggtcagtcatttgggctgggctcagcttggtggttcttctgctggtctcaccttgggtgagcttctgtcatgcagctggtctaggacggcttctgatggctggcagctggtactggctgcaggctggggtgaaagggatagtgaggccatgtgtctatagtgagcctcatggcgatgacattttttaaacctctgctgtatcacactttttaatgttccactggccaaagcaaggtacatggctaagttcagacggaagggattgagaaataggctgtactggccaggcgtggtggctcatacgtgtaatcccagcactttgggaggccaaggtgggtggatcactggaggtcaggagttcgagaccagcctggccaacatggtgaaaccccatctctactaaaaatacaaaaattagccaagtgtggttgtgggtgcctgttatcccagttactcaggaggctgaggcaggagaatcgcttgaacccgggaggcagatggtgccattgcactccagcctgggtgacaggagtgaaactctgctcaaaaaaaaaaaaaaaaaaaaaaaaagagacagagagagagggagagagaaataggctgtacttcttgattggaagagaggcaaagtcacatgtacagaagtaagtgaatgggatgggaggaatctgtggccttttctgcaagctgccccctctggtgtgtctgatgcatgccttccgggcgctgctgaagccctatgtaacccaagaagcttttcaaattgcatcctaatcatgcatgtcttttgctagaactacttgagattgtgcactgattcatgggacatgtgtttgattcagatttatatacccacaatggcctaaccttgttgattcttaataattattatattgaactgagttgggttagttctcctttttctctaattacaagctccttaaaggaaagtttggaatcactgttgcataaaatctccctcccagagctctcagaattatactaacggctgaaaatccggcaagttctcagaaccaccagttaagtggtagagggattaggcctagagccacctctggacagagcaactatctgaggaaagaatggaattttcaggaaaccagagactgtggtactgacacattgcatcttcaggtcagtcataccctcaatgagtgaaatcacttttttaggcttaggaggcagaaagagtcagtgactcgaagaatgtggctttccttttcccattcagggaagccagagtacaaggagcaaacctatgcctcatcaggaagagactcgtttgtcagccctgggcctctgtggcttctcctgctctggaacaggccagaacagaccacttgagggcccacggtactccctgccccatgccacactctgtccacatcacctcagtacttctccagaatccatcagaggccaacagtcaagctggtctagaatcagggctggatgactgagactaagccctaggggaggatagtcctttgtggagccacatacacactccccgagcccctctggtccagtgctactcaagatcctggttccagacttgctctagaactttctaaggcttggaggtcacctgggacagtttattccaggttgaaccaccctttgggaataagagggtgtcccttcccatggtgtgagatgaattgtcaggtcctttgtgagtcacaggcttaggaatggattttcaacaggaatttccattctgggtggttaacaagggccacaggcaatctgtccttttcttcatatgacacagtcatccgcctacacacccctttattcaccaagattctactgactgcccactctgtgccaggcaacgtctcaggcatgggagtggggtgagatgagccaggcacggttcctgtccctggagagctcaggtgcaccgagaacacagatgaggcaggaggtgcgagcaagagggtctgtgtagaaccacagaattatggcttcttagagcaggaggtaccttggggattgtctagtctattccctcattcctcagaggaggacgctgagcccaagagagggaagattagtccaggggcacgcagtaagtgggagttactaattcactaaataagcatttattgaacacctactaagtgctaagatctgggctaggctctggagatgccacagggaacaaggaagacacagcgcttgtctctttggagctccaactgtgactggttggggggtcccaaccctggttacattttagactcacctgggagccttaagaagaacacccgtgccagggctccacccccagagattctgattacttggcctggggtgggcctgggcctgggcatgggtatttttgaacaagccctccaagtcattctaatgtgcgacgcaagtaggttgagaaccatgtctaaggggagagacagcaaaacctcacacatgcaaatcaataattgggattgtgctttgttaggaatgaatgggacccagagtgaggaaacagcagggttggggtatctgctacttgctctgaatcgggagggagcgaggccacacttggagagctgtgattccaagggtcagaaggaaggaagcatagagtgtcctcacgtgggacagcaatgggatcttctgggacacatcccaccctgcagatgcagaaaaccttgcagcggagccctgtctagcagaagcttttaacctgcagcctgaaaactctcccccaccccctactcaaaacacccgctctttacacacactgtttacgagtgcccccaggccagccagcttaataatccctcacatttttagagcagtgagtaaagcactgtccaactttttatctgtattattggatcctaacactaaccccaggaggcaggcagggccaaggtcagtcagtgttcccctgttggagatgtggaaacaagctcggagaagtcacgcacggcctgagatcacatggctaatacctggatgtgggggacttcaggctagctctcccacctccagctccactaccccatgtggcccccaccttccctgcaccagcaagccacaaccaaggcggggcacctgagaggcagctggggaccagcaccctcccgtctcgctgggcagagctgccggtgcattctccccttcagctcttacttacaatcccactcctcatcaggcaatcaaaggaatctgttactcgttgcttccattcctgcccagagtgaacccagttactatagtaaccagatgcgattctttattacggagtagatggttttaattttgtatttgaagagtttggccaggcagtcacgttgccatggcttggcctgtcgggcggcagttagaagcagagggaaccctttgagcagccattagggctttctaattgctggggaaaacctatgtctggaaaaacccaggctcagctgcactggggaaggaggagggtgagtctccagctggtgctgtgctgggtactgtctcctgttcagagatgacagctccctgattagagccaccaggtgagcctctcagccagttgctcccatagtgccctgtagtttcccttcaggatcctcatgggtgggtgggtggggggctggctgctcagagggccatcaacacatttttgttgaatgaatgaatgaatgaacaaatgatcctttgtagtttattaaaccctttcaatccattgtctcctctgctctccagtatggctctgtaagggtacggagcagggagaaagagaaactgaggctcggcaaggtaagagacttgcctcctagtgctgcctcccctgtctgtgcctctcagggcccatgaattgcctggaatgttccccttgctgcagaaacatatcacaggtagatgctaaaagcaaggcaagcatcgcccgcccacaccacaccaggcctggtaccataggtcctctcctgggtcctcagttcttgctgaactgtaaggaaggcagcaaagtggagtgagaaagctgcttggtgactaactttgaagcagagcagaagcttcctttggcccagaccatcaaggagacagttgggtggacagaataaagggctcctcattccctgatctccctgtgcaagggaggaaaggaaggcttcactcggctttcagccagcccccgcaaatccacgctgatccagtctctctgttacgctttctgtgctgagggtgtatttccaggttaaataaaacctccacccaaccctggccccaacattaatttctcctaacccagcctagtttcttccggccttgcagctcaggccttcccaggatgcatgcatggcctgctctcccagccaggaggtgctgatgctggtacccttcatcctgagctcatgttaggccacaggaccctgctagctcctccttaaaggcaatcataaccagctttggagagcagcagctctctgtggctgttggtggagcaggcagcatgtgaggctggagtcttgagtgggatgtgttcgtggatgagctgggacaggcaacagccagatctgctggagggccaaggacccagtaaagagagggcatagtgtgatgataaacattccactacctcccagaagtgaggtgcctgcacaggaggcccacaccgaacatatgcccggatctcaggcctcaccctccaagaatcaaatcatcggagctggatgagactttagaggcttctcatttcagtctcagatgaagactgaggccccagaggggaaggatgtgaagtccctttcacagtcatcaaatatggtgggactccacagtgggacttaccggaagacaaaggctggacacacagcaggtgctcagtcaattcttgtgagaacagccatcctcatgaggtgacagcaggaagcatcttcgtgaaagtttagggccagaaggaagtttagacatcactgagcccaactgtcattttacagaaagaccgagaccagatccattaataatgctacaaataagaatagctaatagttacatagtgtgctgggtgctaggcaggattccatgcatgttgcatatacgaacccactgcagcctcacagtgacctctatgcagcagttattatcatcatccccagatgaggtaactgaggcacagggtggttcggtaatttgcccaggatcatggagccagtagtgttaggatcaggcaatctggctccagagtccgtgccgtgaacacttcactgcactgtctgagagcacagtgctgccagcaaacacttgctgcccccttctctgagtggggagaaggaatctgtgccagcccttgtgagttcactcatgcaggaaacatgactttttcatctttacatccccttacagggctcagctcaggtctggcaggggctcagggatgtgtttctaatataaatgagttgatctttctcaccatcgtgaaacagccaatttggcacctgtgtgctggaagggaccttgggaagtggctcaacatagaacacttgtggtcagcaaaaaggagggggtggttcccacacaccaagcaattctccaatggacactggctgagtgtcctgcaatataactcaagcctgattgtccgcctggagttagtgttggctcccacaggttgagggctcagtcccaccacatttacctgacttccgatgctagtcaccagccccaggttgttttatctgagcctctgaccaagtggctataaatcagggattcccaggacgcccttctcaggttttcattaattttctagagcagctcacagaactcagggaaacacatttactggtttattataaaggaccttacaaaggattcagatgagcagccatatgggagcgaagcaaagggcagggcgcatgggaaggggtggagcttccatgccctctctgggcacgcaacactccacgtgtccagggacctccatgtgtgcagctatctggaagctcatcgaaacacaaagaggggaacgacagacactgagggtggagagtgggagggagaggatcagaaaaaataactattgggtactgtacccaatagtacctgggtgacgaaatcatctgcacaacaaatctctgtaacacgagtttacctatatagcaaacttgcacatgtacccctgaacctaaaataaaagttaaaaaaacaaaacaaaacactgtctttttgggattttgtggaggtttcattacaccgacataattgatgacatcattggccattggtgatcaactcaaccttcgggcccctcttccttctcaggaggtggtggggtggggctgaaagttccaaccctctcatcaccagattggttcccctggcaaccagcgccatcctgaggccaccctggatccccaccccgaccgaccccagccactagtcatctcattagcatacaaatgacacttatcactttggaaattccgagcgttttgggaactgtgcctaaaccaggataaagaccaagtacattatttcttattataaatcactatatctcaggcagcgatttgcagaggaggaaagtgaggccaagagagtcaaagtgtcttagccagggcttcccaggtagactgaatccagctctccctactccacatacagggctcttgccacatagcaaggcccctaaagagcatgctgaggtggtcaggctgacctgagcccagcagcctgccccagcctgccccacctgtcctgcctggaccctgctgtgggcttcctggtcctggccacactaatggactttctgctcccaccagctcttcgtgatcgacaatggcgcggatgactggcggatagccatgacctacgagcgcatcctgtacatcagcctggagatgctggtgtgcgccatccaccccattcctggcgagtacaagttcttctggacggcacgcctggccttctcctacacaccctcccgggcggaggccgatgtggacatcatcctgtctatccccatgttcctgcgcctgtacctgatcgcccgagtcatgctgctgcacagcaagctcttcaccgatgcctcgtcccgcagcatcggggccctcaacaagatcaacttcaacacccgctttgtcatgaagacgctcatgaccatctgccctggcactgtgctgctcgtgttcagcatctctctgtggatcattgctgcctggaccgtccgtgtctgtgaaaggtattccacatggggctttctgagtacagagcctgtgctgggacagggaagggaggaggagtaggggtgccaggaagtatgtggtctgatggaggagacaggcatgtacccagacacctgaaaggagacaatgggaaagaggggagtgctgagttggggttcagtatgagctagaattgcagcattggaaccaaagtaaggtgggaaaaaggcacagaattttcctgattttctgttccttctttgcaaaccaatatatcaaagcattctggttacatcagtaactcacatataacacattgcaacttactcctcttgggtattaataatgcttattagcattttaaaggctctgagaagtcctgaagtaatgaaaccatttatttttgtttggttcagcctttcttaattgtatttgcctgcaaatcctttttattataaagcactattggtaccttgctactcaaagtttggttcacagaccagcagcactggcatcactgggaacttgttagagttcccagaatctcaggccttagcccagaatgaatgaatcagaatttgcatttaacaaggtcacctggtgattcatatgcaccttagtttgagaagcactgtactgatggaacatactttgggaaacattgttttaggaggctggtggttgggagtcattcagagaagctactcatgggaaagaagggagatgtggcctgacagagatccagggctgtagaacaaaatgccaactccttggaacagccatcaacaaggctcaagggcaggactgaagccacctccttccaccaccctcgagctgcctttaatgactcttctccttgcaaggggtcctggattttcattttatttatttatttatttatttatttatttatttatttatttatttatttatctgagatggagtctcgctctctcgcccaggctggagtgcagtggcatagtctctgctcactgcaacctctgcctcctgtgttcaagcaattctcctgcctcagcctcccatgtagctgagattacaggcatgcgccaccataccaggctaatttttgtgttttttagtggagatggggtttcaccatgttggccaggctggtcttgaactcctggcttcaagtgatcctcctaccttggcctcccaaaattctgggattacaggcgtgcagctgcacccagccctggatattcattttaatctatttgacatgtggagtctaaatctaggttagaaaccgtgattctgctcctaagtagctgtgagacctagggcaagttacttaacctctctgggctacagtttcctcattttaaaatgaggatcacttgagatagaatgaagctatgtttgcttgagatagattatttttattatgttgggaggtatggtgaagcatcctgtgtaatttacacaaatcctggtagtcgcccttaatttgtcaacacttacgattatattgccaaatcttccatgcaccagtgtcctagcagagatcaaacaagacaaagaagtctggagaggagttagcctcaacacaccctacatgggtgccttgaatcgtatctcctacctatttttgagacattctgtttgcagacatttctttcagcgttttggccaacagacacacggtcaaactgagagggcattctgctgccgcagaacaagggttcaggctccaggatgcaggttcaggttctgagagccagtgcagtgttggaagacctttctcacacacagagccccagggacacaccatgctcacctattcagaacctcgccattactcagcagctgacattgcaacatctgctctgagtgggaccacactgcacagggcttcatgagccttctctggtaagcagacactcttcccccaatggagaaagcatgtgcttgggttccgaccccaaactcttcatggtactgttagctgagcaacattgtgctggtcgcttcacctctctggacctcaattttcttatctgaaagctggacacaggatttattgttagagtcaaacaaggtgtatatatgcactatgtactgcaatccaatgatggtgaaagttaataataatagtgcagatcccttgataactcttgggaattttgtgctgccttcttttaattagaacagcccaacttgtaccatacatgggcctatactcttcctgttttcctttctaaatgatggaagccatgttgtctattaacatagtaattgaatttgcgtagccctttaagctatttgaagtctttcacttcctcagatgctctctggcatgtatttcagatggctgaacatgcaacaaagtacctgcaagtgagtttcgtagtttattgaacctatcacaagaaggggtgactatttttcactggaaaataagcttgttttaaagaatgtagtttgcaaagtacttagatgatgcaccttatttgatattgcatggccttccatagcttccaagctgaggctgggttagtttggtccctggtgggccactgggtctctctctctctctctgcagacatgggtcacaagcccccgctaagaccaaggcacagaggaacaatgagcaaatcggaaattctctgaaagttcccttctcttgcgaaaaggccatttgaccaaagacttaggtataacatgaggtgtattaaagcatggtggatgttattgttgcacccctgtgctagttctgtgtaaaatccatatgtcatcccagcttgccctcacaatagatctatgagagaggtaccttgcctgagggaaggagagcccgggtcctggaggggcatttgggtgaagcaacatgtcatccactacatggatgtgtttgaattggacatgaaggctcatgggagagttgaggaaactgatagaaagtaactggcccgaggtcacagagctattaataataagcgtggagccaaaatctgaactggtttctgactctgaacttccatgtgtgtgtcaccaacccaggctgaatcctgcacatacgaggaaatcttggcctctactctactggcaactttcccaatctcagagtcttaaggccactgagactaacatgtgaatcccagtcttgctgttttctctgcctctgctgcctatggtcttgaccatgttatcatactagcctcctgggctgccttcatgtccaattcaaacacatccatgtagtggatgacatgttgcttcatgtcaacatgaaggggacagatgccccctccaggacccgggctctccttcccttagctggggttgtgactgagtccctctcttcaggtcaaaccccttgcctgggggcagcaagctcccgaggggatttgtcagtgtgggagttcaaaggcctaaccccgtttgcttctagtaggacactcagccaggctccagggtccctgagggatcgcctaaggcctctgttaccactgcatccgggaacttcctctataccccagaggtattgatcctgagagcagccccagtaaaactcccacccccaaatctcagcatctcacagactgtttcccaggaatctgccccgttaatatattgtttcctaaacaggcaaagcacttctcttaccaagactaagcactatttttagaatcaagcttaaatgatcattctgtttcccaatgtcaaataataagtaagattggcagaggccttcagccaggacttattcagccagagactggacagaagctggaagcaggggaagctttggggaactgaagcgtcagaccagggtagtgtggacaggatgccttgatctctctcagcctgatctaatgatgattctatcaccttaggcatcagagagggtaagtgacttgcccagggtcacacagcagcatgacaggttctagaaaaatccacagctgctgatgcccagagcctgttcacattccaggtagctttcatcagcctggacttatctctagttgtatacacacacttctgaagttgctatggaaatctctctacagcaagatgtattttaaaagacagttctcatatcttgggttggtttttatgtgacaacaaaggtttttcatatttcctcctcccaaggagagaaagtgggatcataattacgcagaacagccgtgccatggggagggcagcgcctggttgctgggagggcagtgacaacagtgggcttgttttccttggcccccagagaggcattacatcatgggttccgaggcctgacagttgtggcactctgcattctctgggattctcctggctgcctgcccacctccctcagggaggaacctcctgattttacactgtcaagtgccaagcagctttactggtggagagaccatctgaggccccgggtcctcactgcggcagcaggttggagagccagccttcctagcgtgccttgagcagtgcagtggcctgccagctcacctttgtatgtttatctccttgggaggagcaacaaggcctcccataacattgatgaagtggggtgagccttgctgtcacagccatgctttataaatgaccttactgtcctcttgagtggattcccttcggaccctttggacccttcactttggtccctcctgaggctccaaattctgcaacaggctgtctcagtgtcccaggccttccagtctgtcaacaggttttttattttgctggttaacttttggcatactgatattttaatgagaaattttattctggagatctggctcctaaagcaggagaaaaacaatttgtggcccattctttctctcattaagagagccaccactcccattgtaaggagataaaaagaggcttccttgctgtactctcttctgcccctgcctcagacacccaggcctgcacttgccagcagcaggaagcaagaccacagctccctcctcctcccatctccttcccacaacctcctaccccctccaagaaggggtacttccactccaagaaaacagtaggaatggccaggctcggtggctcacgcctgtaatcccagcactttgggaggccgaggcgggcagatcacgaggtcaggagatcgagaccatcctggctaacacggtgaaacccccgtctctactaaaaatacaaaaaaattagccgggcatggtggcacacacctgtagtcccagctactcgggaggctgggacaggagaatggcgtgaacccaggaggcggagcttgcagtgagccgagatcacgccactgcactccagcctgggtgacagagccagactccatctcaaaaaaaaaaaaacaaaccccaaaacaaaacagtaggaaagtggtcattacagggatgaagcaccctacatggggttgatggaagcctgcaagctaaaccctgtaggctgagcagaactgagcagagcctgggaacagtggggccaggcactgtggttcctcatggactgctttggtttgagttataacctccaatgtggggcacacgcacagtgatccatgggactattgggagaaatgatcagaacttctacatatatatatatatatatatatatataaagcctggctagtatttaataaatggatagagagcaatacatgtctgtaatttataataaatatatgtataatggaggagggcatgctcaaaaaatttttaattggtaggagcccatgattttaaaagtttgcaaaccactggtttatgatatcagaggactagttagagaggataggaaagtagcctaccacatgggatgaagcctgctagacccaggaaccctgccctctagctggagaagtgagaagttagcctcctgtagggaaggagcagcctgtagcgatccccttctggtgccaggcggagagatagatggctggggagggggaaggtggggaggcgacagggatcctgctggaggcctttgagaaaaacctgcagcattaaggaagaggaaaataatcctgaagattcctgaaaaatgtttaattatgaaaaacaaaaagcaacattagaagagtcttgggtggccaggcacagtcgtcacgcctgtaatcccaacactttgggaggtcaaagcaggtggatcgcttgaggtcaggagttggagaccagcctgaccaacacagcaaaaacccatctctgccaaaaacaaaacaaaacaaaacaaaaaaaaaccaaaaaaaacattagccgggagtggtggtgcatctgtagactcaggaggctgaggtggggggatcacctaacctgggaggtcaagagtgcagcgagcagagattgcgccactgcactccagcctgggtgacagagtgagaccctgtctcaaaaaaaaaaaaaaaaaaggaaaaaggaagaagagtcttgggcatctctaatagggtgccagaatatatatgatccttatgatagagaagagtgggcagatgtgaaatgaaaatgtatctggttcacataagcacagagttccagaaaactaaaattgttttagcaaaatgaaaatccacattgatggcactacatttttaaaaatgtggaatgtggagacaaacttaaaaaatttaaagctctctcagaatgcagaagagataagagaaaggatgaataggacagaactggaggctataggatccaggtgaaatctaagaattagagttatttcagaggaagaaatgataaatttggataaaagcataatcagaaatatacgcacagtaaacattttcagaattggcctaggtaaggggatgttgtgtgtggggatggtagatcagagtaggcagatcgaaacggattcctcttttccagttagaatgtgggggacaggaggagccacccctagacataccccaatacattctttttctggaaaatttattgaatcataaggtgaaacaatcctagaggcacacaggcatcccagagctgactctccctcaggaaccctaaattcagagtcattagaacagttccacagtattttaaatttggatccaccctgtcatttgaatgaggcaaccaaagggcaacaaaagtcattcttggagtttacttttggggggaactcgtttgccagttgaccaaagactgaatcacaattaagatcttaataatgaaatgttgtaaagaaaggcagacattggttcacacaggcaaacatgaaatcaagactaaacttacgcgtagttgcaaaactccaaattctaatgtcaaagaaaaagtagattctggaaagagtggatgtatgaaattaaagcaataattcaataataattagagggttgcaaatcctcagattaaaaatttgagaggagaaggctagaagggattagtaaaagcatgccagatgcgttgtcctatgtagaggagaattttaaaataaagccctattactcagttttagcaatcagagaaatattttttttaaaacctaaaggaaccacaggcaaaattttatgagtataacaagaataacagtagcatcagccatatattgtttcacttaatccataccatagttctatgagactgtatctgcattctgtatatgaggatgttgagacacagagaggttgagcgatgtgcctcaggccacagagccagcagacttgagactccaacaccagcctgagagccttttccctaccctgaaaacatatacctcccatgccacatcagagcccacatagctaagacagaaaaaataaaggaagcaggaaggaagaatttcaatacaaagtatgaaagaagatcagagaaaaacaaacttaaaatttataacaatcaacataattgtgtttacctccttgttaaaagtaaatgtctcttagatgagatttaaaagcaaaatttaattgcatgcaatttacaaaagaagtacctagaacagaaggacccaaaaataaatgaagagcaaagatttattaggtaagtacaaatcagatggcaaacgaatagaaattctcattttaaaccaaaatgaattcaaaacagaaatcattaaattgtccaaaagaaccatttaatatggataaaagtgctatatacagtaaaactgtgaattttatacaaaaaatgagattgataatctgaatttttaaatgtttaaattaattgagcactttgtagcctataaacaaacatcttctttttaagcatccagggaacactttaaaaaattgatcaacttcttggtcacacatttcaaaacatcagaaaagttgctcgggctgtattctctgaccacaagcctataaaactccaattaaaggacaactttttggtgggacttttaaagcaatctcctcaattacaacagagaattcaaaactaccgttaaaggctattagaaaattacaacaatgatgaccctgtacgtaaaaactcaggatgtgaccaaaggtgtactcagatgaaaaacatccttaaagtttttcaggcacaatggtgtgcactgatagccccagctacttgggaggctgaggtgggaggatcacttgagcctaggagttcgagccagtagtggactatgattgtgcctgtggatagccactgcctcagcctgggcaacatagggagaccccatttttaataacaaaaacagaaaaaaatgaacagagaaaataactgaatccattagaagaacaaaacaaacctcaggagggaagattaagtttataacaaaggcaaagataggaattaatgaatttaaaaaccagaaaaacataattttataatccaaaagataccaacttctaaaatataaatttaattggagaaaaagaaacacaaaattagaaattttaatggagaataactactgattcttaggatgttttaataaataagtgagaatagcttaactttttttgaaagagaagaccattgaggggctttctctactagatattaaaatgtattataaaactgaaagtaattaagtccctctggcattactgaaaaatcaataatgacagatcaatgaaacctaatggaaaacactgaaataaaccctactatgttagaacccaatatacgagaaagaaaaccaactgggaagcgatagattattcaataaatggtaatggagaaattggaagcttggatgaaaaatcaaattggaaccctagctctcaccagccaccaaaataaattccaggtggattaaaaagtcagatgtaaaagaagaaaccatgagcaagctccagaaaacaaagtgaatatttaatcagccctgagaggagaaagaactgttaagcataaaatctcagaagaaacatgaaggaaaaaactggtgtgtttgattacatcatacacacaattttagatttcagtccctcaaaaaatatgaacttatttaaagagcaaatgttatgctagaaaaagtatttgcagcaaacatgacaagaggtaaatatccctattatacaaagcagtcttagaaactaatcagaagaacttatctccccagtgaaaaaaataggctgaagataaggccaactacaaaggaagaaatacaaaaagccaataaaataaaacacacaacacatattcagtccctctaatcaaagaactgcaaattataactacaaggagaattactttttcccctctggagttgacaaaattttaaataaatataactcagtgctggagaatcttcttattgttggcggtgggcgggcatggggttgtcttacgctgagggcaagaaggaaattagaccatctttctggaaaacaatttaacaatttgtcacaggagccttgagtttgtaactttgatccaggaattctctttctaggaagctattttaatagaataatcaatttacatcaaacctcttctgcatggtgcagtttataatagaaaagaatgagaaaccaagtaaacatctaggatttcaatggctaaacaagtatggcacatccatatgatgggtagttagcaagaattttaaaaaatcaaatcaacgtgtttgttttcgtttttgtttgtttgtttgtttgtttgttacttcgttgtttgtttttgatgcggagtctcattctgtcgcccgggctggagtgcagtggcgccatctcggctcactgcagccaccacctcccgggttcaagcaattatcttgcctcagcctcccgagtagctgaaattacaggcacctgccacaacgcctggctaagtttttgtatttttagtagagacggagtttctccatattggccaggctggtcttgaactcctggcctcaagtgatccacctgcctcggcctctcaaagtgctgggattacaggcgtgagccaccgcgcccggcctaaaaatcaatcttttgaaaattacagtaaggtaggaaaatattcatgatgtaatatttgaaaaaggagcgtacaaaatagcattatgtaggatattaccgatttatagataggtgcagaaatacctggaaaatacatagaaacattaagttgatttctttgtgttacatgtaatatttatttatttatgagatagagtctcgctctgtcatccgggctgtagtgcagtggcgcaatcttggctcactgcaacctctgcctcctgggttcaaactattctcatgcctcaccctcctgagtagctgggattacaggcgtgcgccaccatgcccggctaatttttgtatttttagtagagatgggttttcgccatgttggcctggctggtggtctgcagctcctggtctcaggtgatccgcccgcctcagcttcccaaggtgtacatgtgattttcatacatgtaaacattaagttgatttcttatgacgttacatgtgattttttattactttttattgtattttcaacaatgagaatgaatatacatatataaatttttaatggaaagaggtagcatttgtttttacacacttgacgaagcccctcatcttccataggaactcatgttttacatcaacgcggggtggaaagtaaagctgaatggctcagtttttacacataattttctctaacaagcgcaatgcaagttccgtcttgaagggctctcttccgacccgtcggccagtggccttggtggacagggccgcggggcgcctttgcggggccggagtgcttcttcgcgggcgcgcgcctcccttggagcccctctgcggccggccgcttatgggagcgcccgagccggcgtgcgggcaggtggagctccacaggggacgtgtgatcgaggcaggcgccactggctcttcagtagcctcccgggcgtccccgcggtgttgcggggtccggtggggagaggccgcgagtcgcgggtggttcccgcgcggccaggcggtcgtggagaggccggggcccgggagaggccgaggctcgctccgccagggggcgcagggagggccaggtgggcggtgtccccacctgcagggactcgctgtggaggagcagagcgttcaggtttcctctcgctgtgcgacagcggagcggcttcagggctgggccggcggctccagggctgctgctagctcctggctcctgtctcgagtgggatcccattctgatttcacctgcgtgattcacagtctccagtcccactccgcggccgctttctcgttctgtgatctcgtattcagccgttctttcctcttcctcattggcagtatttttgtgccctttgacacttaaactgctcattcgtggctagtttttttcgtacttttatattaaataattatacatgacttagctattataagtaatggctgatatctcttagaaaggagaatcaagaaatagggaaattattagccagcgtggtggcgcgcacctgtaatcccagctactcgggagactgaggcaggagaatcgcttgaacctgagaggcggaggttgcagtgagccaagatcgcaccattgcactccagcttgggagacaagagtgagactccgtctcaaaaagaaagaaagaaggaaaagaaagagaggagaaagaaagtgggagagagagagaaaataaaataaaaaagaaactggtaaagcaaggaaaatttccataaaatttgcattctgaagcactaagtttgggactgtgggtgcaaagtgaaatccatattgcattgagaaaccattccattttttcagtcaagtcaatccccaaattattccaaattatttgctgcattacaccaaacctgggtttcccttcactctcttctgctgggaagtcaccagtgtcttttgtctccaggatttttgccttagggagacccagttaaatgccagggttccttctttaactggggaggactatctgacctttgtcactggaatgaattccttcccaagtctgccaaagatggtacacagtgacagttagtgccatgctgggtgtgtaggagagaagtgacttcctttcctacagcggatgcctaagggcatggggcttcattctcacccgctcccccacccacctccttggaggggctgaggtaaggaaaaggaaggggttcctgtaagtgacgtcagccacatctatttgtgggctgacattagtcaagcaggaaatccatattctgtcagcttttccatccttcaactttggggttgttttgtttgcccctcgtgatcccattgtgccctacatttccggtgcagacccctccctcaaaggacgggcacctcagctccacagggccccttctccatgagtttggtgtcctaggctggctctcaggagcgcagctcttcacccccctgtgtttcccctgccctccactgccagcttggggcccccgcgccaggctggggtaaagccctgcattcctggctcacatagcgcagctgctagaagggtttttaaaaatgtgattttttttggccgggcatggtggctcacacctgtaatcccagcactttgggaggccaaggtgggcagatcacctgaggtcaggagttccataccaccctggccaacatggcgaaacgctgtctctattaaaaatacaaaaattagcccagtgtggtggtgagcgcctgtaatcccagctactcacgaggccgaggcaagagaatcgcttgaactcaggaggtggaggatgcagtgagccgagatcacaccattgcactccagcctgggcaacagagcaagactccatctcaaaaacaaaaacaaaaacaaaaacaaaaacaaaacgatgttctccttccatttaatacagactcctctgttccctgagacttggccccagtcccccagaggctgagctgagagggaatatgggtgagacatgccatattccttgagtaacccaactcgttccattcggtctggatgcctgcttgccccccaatggaacaagaatttaaaggcaccaaagtcccctggcctgcctttgagtaatggccctggaaacctgctggccctaacacacctggtcattttgttttcccaaatagccctgggagcgcctgggtacacagcccctgcggccctctcagacagggcagacatgctgcaacgggccagatgcgtctgacactcccacaatagagggggcacagaacttagtaaaactccttttaaatatcttaaacatgtttcagnnctgagccaaggggaaaacacctagtacacagtggcaatcgcaccagcacaggatccatcctgtgatcaggactgcctgaactcagggtggaaaaactcggtttgacccctggttctaccattaaccttgcacttgtacttaacctgaccagagtcatgcagcctcttttgaacaccctctgggacactactttaaaagactatccaatccatttgcagacagctctgacttagaaatctcttcctattattggttaatattggttaaaacgtgtagtttctgtcttgggtcctaactcagttctctgggtccgcacgaaagaagttcaagtaccataggctggcggttaagccattgacctctgggaagatgtgagcgtggagccttgcttatgctcttactagcaggtgacgttgggccaggaaaggggataattcacaaaaagcccttagcacagtgtagaacatttagcacacggtgagtacccagtgaagcagccaggtatttctttttctactgaaggtcccttgagtatccaaagtcaggttgaatcttctctgctccaacccagtggtctccagtcccctcaaccattgtcacaggacttctggtcagactccaccctctcgctcactctcctcccctggtcatcagtgtcctcatgaagcgaaggccccagaacgaacatagtgccccaagtgttaggcatcctcccatttcctcggcattattttccttttaatgcagcctgagagtggcccatattcttagggcaaagggctcccaggcataatggcctgggaattagggagcgagacccagggcccatctctgtttagattgggcactcttgacacactcttgacagttccattctatagccccatgctctattgttaacttttcttcaatacaattgtaagggccttgtttagcctgaatcctgcagggagcaacttgcacccttgttccacatggccactaccagataagagccacagctcagtaaggccagaggagtggttcagccacgtgggaaccagccaggactcaaagagacaagaggctcctgtcctgtttccagctttagcaagggagttgagggctggcctgaagtccatttctctctgccttagttttcctgctgataaaagcaatagttagtttctcaggctcccgcagatttctcaacagattgtttgagcactgaagttgagatctctcctgctctctggacacatctcatactgattccccccataccctatttcctacacaggtctgtcctttacctggacattctccctcctctgccgtttcccttcatcatgcttgctcccggagaatgcaggcactctcacaggaatgcatccatgcatcccaagtggagcattgagccacgcctctctctgagctgcagtgctctcatgagagacttgctaaataataatactgttatgtataggtgtggagctctgctattcaccaggcactgtgctaggaattaaatatatcttaaagcataaaacacacatgattttttccctcatgggcttacagtctaccagggaagacaggtaacaagtaaggaaacaaaaagtagataatttcaaatctatgacatatactgtgaaagtggaaaaaagaagtttgcaatgattcttttttaaaaaaaaatttatggcattggattgggatcctactcatctggggcctgcttggaggtgtctctggggaggtgatgcttcagctgaggtctgaaggatgagaggaaatgagcccttcacagaccaagagggtgagccttctgagaagaatgagaagactgcaccaaggccctgagctggcaaggagccggggggaaggagtcactggaaggagagtaaacagatgaaggggggtgtggcagggactgagccgcagaagggggcaggaggctgaaagtgaagggccctgagtgccatgttgtggggttgaacctaagtgcagtggaaagcctttaaagagttttatctttttatttacttgttgtttcttcttcttcctcctcctcttcttctttttcttcttcttcctcttcctcttcctcctcctcctccttttcatcgtcgtcgtcttcttcttctttgcctttgccttcttgttcttcttgctcttcctcctcctctacctccccaacccctcctcctcccctccccatcctccacctcttcttctcttcttcttctcctccttcttcttcctcctcttcctcctcctcatcttcctcttccttcttcttccttcttccttctttccccctcctcctcctccttcttcttcctcttcctcttcctcctcctcctccttttcatcatcgtcttcttcttctttgcctttggcttcttgttcttcttgctcttcctcctcctccacctccccaacccctcctcctcctcccctccccatcctccacctcttcttcttctcttcttcttctcctccttcttcttcctcctcttcctcctcatcttcctcttccttcttcttccttcttccttctttccccctcctcctccttcttcttctttgccttcttcttcttcctcctcctcctcccctctctctctcctcctccacctctcctcctccttcttcttctttgccttcttcttctccttttccttcttcctcttcctcttcttcttctcccttctccttctccctctctccctctttcttccttccttcctttcttctttctttcttttcttgctttccttccttccctccctccctcaggtcggaaaaccctcctcctcctcccctccccatcctccaactcttcttcttctcttcttcttctcctccttcttcttcctcctcttcctcctcatcttcctcttccttcttcttccttcttccttctttccccctcctcctccttcttcttctttggcttcttcttcttcctcctcctcctcccctctctctctcctcctccacctctcctcctccttcttcttctttgccttcttcttctccttttccttcttcctcttcctcttcttcttctcccttctccttctccctctctccctctttcttccttccttcctttcttctttctttcttttctttctttccttccttccctccctccctccccctccctccctcccttctttctttctttctctctctctctttctttctttcttccttccttcctttcctttcttcttctttctttctttctttctttcttcctttctttctccctttcttccttcctttcttcctttctttcttttgtttctttctgtgtctctctttctttctttcttccttccttcctttcctttcttcttctttctttctttctttctttcttcctttctttctccctttcttccttcctttcttcctttctttcttgtctcactttgtcacccagactggaatgcaatagcatgatgacagctcactgcaggctttaactcctgggctcaagcaatcttcccacttcagccctctgagtagctgggactacaggcataagccaccatgcctggctaaatacaaaaattttttggcgacagagtctctctatgttgcccaggctggtcttaaactcccagcctcaagcaatactcccacttcaggttcccaagtattaggattataggtgtgagccaccatgcctggtgcttttgaagggttttaaataggagagtaatacaatatggttgcttctaaaaatattactttggcatctttgtgagtaaattggaggtggcaagaaaactactaggaggactaaaaaggctactgcagcaggccaggcaacagacaaaagtgacttagaagggcggtggtggcggtgtagagttcttgaatacatccctgcaccatgccaagttttatatacatcttctcctgtactgatgtcccacgcatcaaatctgtgatcaaactcatcatgttgcccctaaattctctctctgcttctctgtttgtgtcttctttttctcaggaactttacccgttagtattcgttttaggctgcaagtgataggaaacccaaaacaacaatagcttaaacaaaacagaagttctgtctgacgccaaagaagtccggaaaggtgtctatagcaggtatgctgctctatggcatcatcagggacgcaggctccttctcccttgttgccctgccatcgttggtacgtggcttcttcctcatacttcaagaaagctgctggagctccagccatcccacctaccttttagccatcaggaaagagaaatggacaaaataaggttgtttctttcttgttaaggacatttcctcgaagtaacacatgtcactttcatttacatccgttggtcattcacatggcgggaaaatgtagtctttattattggtaatcattgctccttcctgggcgctcttactaatgaagaagaggagacgtgctgttgggctgcaaccatctctcaggctcaaatcgttccccatccttatgccactcccagccccatttccagccctctatttaggcaccaagctctatggttcttattctgcggtgtcgcttgaagtcatctcttcctgctacctccctgacacagatccctgtcatcttacaccagtttacagaagtagcttttctggcttccagttaccgttcctactattacccctcaaaaaccttcaattgctccctctagaagattaagtccatatttttaaatttagtgaccaaggccctccatcatgcaattccagtcaacccatgataaaaccggtttggttcaattttagtaacatcagcaacaatggtaataatgatactttgcattcctacatggaaggttttattgctcacagaagggacagcacatggcccctggagtcagaaacgtgcgctcatagcctggcttgacaacggaccagctgtgcgatcctgggcaagtcacctgccctctattaaataagcacctgcgactggctggttcctgataaaccctgagccctttcctttcctgggcctctttcttgggatctgtagataggaagtaagcctggtctacctgcttcccaggggattaggaagttcaaacaagaggagacctgaacagctgggggaaacataaaacactggacatcctcttctgtttttcaccacgaccctatgaagtgagcaggcaggacggggaacccacggtccctatttcgtggatgaggatgtggtggctcaaggaggctcatgatctgccctggccctgacttgtagggcagtggaggaggcctgggcccttgggaccccgatcgcctgtggcagggcttttggggtatgtgttccactggggaggtgtgttacagagtgagtctgtgttgagacaaaaggagaaagaacataagacgcaaagtttttctttcagcttggactgtgcagtcattttctaatttctttgaggtcatgctgtttggtacctaggaaaggaattgtgattggtgttctagaaaaacagtgatttttagggggaagccactgcctattagtaagtacaggcagaagcggctcattgtccttgaatgccatgatgtctgttttcgaggggtggggtggggtctggtgactggctagacttttttggagaaaatgtataacaaacttaataaagtaaacatctatgttgtcaaacttactgagttaagtagatgtgaatatagttaactgagtagtagctttagaattattttgtcaagtttaacatgtgaaattgttcccacttagttaccagtattcttaaattgtcttgtttataatttaaactgtgcattttatttagagagtaaatgtgtctggaggcttttcattatttcagaaattagaggatagattcctgaggtgcccggcctgtccctgaggccacgtgatgcagaactggaggcaggtgagtctgagccgggtgctcggagcctagtcaagggtgaccacaggccgagggaggagaaacttctgacatgcagtgtcctcataggaatgctttgtggtgttatctccatttccctgatggaaaaactgaggccaagagcagtggggtaactcccccaccatagtgtggagttgcttaattgcctcgcccccagcagggggcatgtctgtgtgataatgtctgctacagtgcccagcctctgtaggaggctaggaattgttttttaataaataaggagcactatcttcgttcatggccattcattctacacaggttctcctctgtggcccagcactctgtgaagtaagcagggcaggagcaattttcccattttagaaattaggaaatggaggctttgggaggtaagcgagccagggtctcactgctggcccggggctgctgcccgcagagtcctccacctggagcactcccattctccgaggttcccttgccagctgggcatggctgtccagactgaacatcactccttccttccttcatctgctcagtgcttgaagatcccagagcccaaggtcacttcagctaacaagctgatgtccctatatttgggtgagctgatggtgctaatggcagtgtaaatcttcgttttagaggataattatgttttctgaaagtctgtggagaattgtgccattgcttgagggatatctaataaaaatcacgcactggataaaagcagaccagagttcacctaaggaatcatcatcgtcatcattgtcatcatcttccttatcaacagcctcatctctactcatgacagatttggccaaaaagaaaaaaaataaaggaggcctttcgaggacttaacacccggaggactttcctccatgcctcctctctctgtctgtcttcctaatttcagtgagtcagtttttcctccccatctgtttgctttctggcactttacacaactgtctgggctctttcattttgccttctgtggttgctcaactccatcatttccctctcgatgcttctcctttgttccctggcaggctcctctcatctgccagtttccagtcctatgaagagtcagaggtgggttttagttttcaggcagcatttttgttgcctggcaacgtgtaacaagcatcttctgtggtggctgcttcccttaaaacagagccaggctggggatgcagtggacgaaggagtctctgggagcttctctggggtcatggggaggagtcaggggagggggacagacagacaggttggcttccatggtgactctgagtgttgccattcttactcttttataatagccttggcactggcacgccctctcctgccccatttcaggcaccccaggtgtccagtggtgaaaagccttgggttaggagccatcagaagttctgtgtaacttgagaggcacctgctgcagctccctgaggcatggccagcctggatgaaggctgctaggtggtttccactggtgctgactcttgcttcatcttgtctgcacgggatgccacaggcctcctgtctggaaagacacctggcttttgcctctgcagtcagcccagctgctagttgtcccgagaatgggagtgggagagagaagggggacagaatgtgatccaaaaaaacacctgacttagagctggagggggctttagagcttctttagccaaatcctcatattgtacacacgaggaaaccaaagcccaaagaagggaagcaacttgtccagactcacaccgcgagttgggcgggtctgagctcccagccaagggtctctctcctgggactggactctgccgagctcacacatctgatgccctgtggctagaaagaggcagcatgtggtgagaagtgcaccagatgcccagttctccgctttctggcctccatttgcttatctaaaaagaatgaggtgaactgggctagagggagccccaagactcagtgactctgatggtaaagctgacacagcaggcaggcccctgctgcccaggccttcagccacgtgtccagggctgctctcaccgccccaggaaagctcagaagctgagggggtcctgggcctctgagctgatgctccccaggagaatcccactgtatgcagagaccccgagcacagccacgacacttgtcaccatgaggctgatttagggcaagcctcctgggcatctgtgtcttcaaagatggtctcttcgttaagacctttatcaaggatcacgggctgcagctgcccactcccctacctaaccagctctccatctangtgtgggaaacgtggtaagaaaacattctctgagaattacagctccttagaggtgaatggggccctaatgcacatggacccagccccccacccttcccagatgaagagagggaggcccagagctgtgagagttgatgcgaagggggttttgctctattcccttcagaccccacaggtgagaaggcatctccagatgggtcatctctttatcctgctccttcctttccttaagtaagaatctctcagttcaagaggcagagaaaaggattgctgaaggcaatctgtctcttcatatctctttcattctgctcctggggccgaggaaatgggtgaggaggaactgaggaggcccttgcggacgcaccaggcctggatgcttcccttccagccgctgctctccagagcttgcgggtgcacagcttcgaggctttagaagcttctccagcaagaaaggcccttctgagggaaaagtgtgtgcgactggctgtctccattcctttctccatatagtgttgacttcggaattagctttattcctgacgtgtaccagaattttcagttaatcatgtaaaccaaggctcaggtgacttggctgtgggcagttggggccggaccagcccctgagaaactactcccatcccagacttcgtgacgcttcacttggccagagcccactcccagaaagcagggaaatgtgcctttctgcgtagcccaggcctatggaaagaggcgagaggtcagggacagctgcactccctgggcaggctgcttgtggtccgggagcatcccgtagtctccccaagccccacggccgtggggaccccgggtcagggcattattgtgcatatccctgtcctcaggcccctcatgctcaggccagaccctcacccaggtgcccttgccctcagactcctccccttccagccattgtctctgtctccatccctgtccctctctttctctatcttcctctctctctgattccctgggggctactttgcaacctctgctgagtcagaattcttcccactcgccctgacgtcccaggctcctccttggcaccctgtcttctctgtggcagggaaagacgcccaaccagagctcccacgtcctgccctgggaaccccactgctctgggaaacaaaaacaagaaaattccttcccagggtacttgttctgtgctgttcctctttgttcttggtcacagggtgattcccacgtccttcccacactaaccctgcctaggtgaggctgcagctttgtgtgccttccacaacatttgcttgcctggggagctgcctgcctttaattatctttggaaagcataactgagaagagcaagacacccgtcttttctttagggctcttgccaggagcactgcctatgcagcacttccctccagggggtgccattcacattgaagtcttcgtgactggcactccttggagttgcacagtgcgcaacctatgctgctgaacagggcagccctggctctgtcttactctcctgggaagcatggctcattataacacagatccaggatgagatacctgagagagagagaatccccaccagtctctccactcatctcacctccctttttaggtctccacctcctccaaggtgtaatatggtcaaagacagggctcctccaaggtgcaatatggtcaaagacagggctgtggatgcaggcaagtccaagcacacactcgggccctgccactcaattgatgttttattttgtgcaagtttcctaatctagtaattaatcaagtgatcctcccacctcagcctccagaatagctgggactatagacacgtaccaccatgccctgctaattttattcattttttgtagagacagcatctcactatgttgcccagtctggtcttgaaatcctgggctcaagggatccttctgtctcagcctcccaaagtgcttggattacaggcatgagccactgcacctggtctaattttccaattcagtaaaataggaagtgacagttatgagtcttgttttttgaggattaaattcagtaatgcgcataaagctttggcccacatggcacgtgattggcacttgagaaatgatagtgattattgttatctcttcaaataagattagcatccagtcttacctaccacacagagatagccccagaaataaaatgaaatgagaagtagatcatctctaagatctttgaggaagtattttgcaagaatcccaactactgttgttcttctctctgtatataaaaaacgatgaactgtgaagcccctttgcttccaagtcacgctctgtgactgatggcagatgtcgggaaaggctcaaccaggagagagaaagcttgcaggcgcgggcggcagactgagggccccgggcgggtggagctcaatgaaaaccacagacagacagcagctgtgagagcaagcagagacccagaatggctttaaacagaaagcagaggcccacagcagggagtgagatgagaccaggtttaaacgtcactttcccctaagtccttgttcattcacagcttccttcagtagctctgaccagctttctcagcacctgccgaccgacaaaccaaccaaccaatggaggctggtgctgggggtggagatggccaagagccggtggtgagaagtgagggagaatggggaagaaggggctccacagagggcacttgatccgggacggctttccggaggaggtgatttcctaggcctaaggggctccgggcagaggggccagcatgagggaagctcggaggtgggggagcatggattggaggagagaataagcagttgcttgctggggtgtcataagatgcggcagtgcactcaacgctacaggagcaggcacgggcctttttcaccagcctaaggattttggaatgactcttctatcagccaacagtttccaaccttatttatgtacttgtttctttgattccagcgatgcaggagagatgatattcagacagccgacttctgctgtgggtgtgccccaggttataaatcatttccatcaggctagctggagtcccggcccttcctttccactgaagaaagcaaatcagagtaccagatagcgagagtgatattatcacaggatagccttgaaactgccataacaaaaaaaataaatcgttcacaaatgtcaatccttcaactactattagccccagagagactgtttgtctgccccagtgtgtcgctgtgcagaggctgagaacgtcccctctcctcttcccacacctaggagagggggagccactggtagattgggagcaggggagggtctggagtttcagaaagatttccctggctgcagtgtggaagggggatttgaggggaagacgggacaccagctggggaggctgctgtagtaacagaatgctgcccccaccacccctgggtacagtggtggctgggatgaagagcaagggcagttttgagagagctagaggagccaacctccaccggactgactcactggatgtggagtgatggggaggaagctcaggaacagtgtctggtgtcctagtgtggctggctggatagctggtgggactgcccacgaataggaggtgcaggaggaagagggccggggttgcaggggacctgggcagcagggagagggcaggtaatgagcagagttggggatcggttgagcttagtttacctgccacccctccagagatgtcccacgttggggggacccatgcacctactccagatgttaccctccccactttacagcacaggattctgcctggtgacatttgatgccatctgtatctggccacccagtgggtgcaaaatgcaagtttgctgattaagcaaaatcaacctgaagcaaacaaagactgatgtccccaagggatagccagctccttggaggcagaaaccctttccctctagggcagagcttcctctgtgggtcctcacaggggagggtgggagagagactgaacaagtgaaagggaaaacaagagaggagagatgagagggaggtggagacagtgcttcaaaggagaaaaaaagaaaaagaagcatgaaagagaagaagaaagaacagagaggggcaaaggcaggaaaaatagaggagaaggaggaagaagatggaggggtttggggcaagagtaacagtgcaggccagctgtgcctgtgagttcacggggttctgcttattaaaccccagcactggcaactttgagaagatgctcagagttctttccccgccctgcttctccctccaactcacctcagccttctcctgagcctgccactccacccgcagcactgtcatcccaacccatacctgctcctctgagatagccgtgtgtcccctgcgcagtggccccgtgccccaacttggcatcacttgtctccattgtaacgcggcccttttttgccttggtgttgcttggtgtctgccttcttcctagaactctaagttcccaagtaggcaccaagccaggcacacaggagggggctcattcctattgctgaccaaatgaactcatttactaagttccaaaatttgtgtcaggcactatgcagagttttatatttttcactagtcccgtgcaaggttttactgcttcattttacagaagtgaagcccaagacacagagaggtaagcgccttccctaggccacacagctaacaggtggcagggctgggatccaaacccccgtctgttggactctctgcccatgccatctctgccacgccatctccagataccgtggaagacatgcttcccatgggaacagtgcttcttccaagcatattatttttctccattttcatgcattttattaaacatttccaaatcaggaaacatggaaatatttttttaataagaagaaagaaaacattgcaaattgagaaactgactcagaaggatttgccagatgagccatctggtttttaatttcaaaggaggttgacagtgcttccctctaagaagaaaatggactgtggaaggaatggcagctggcttccctcaaatggtgcatccatttgcaaggtggagaagttgagcaagaccaagagacccaagagaagagaaacacactccaagaaaagcttggccagtgctggtgttgaagcttccccgctgaggcctgcagaggttgcatccagctgtgtgacaccagccagctgtcccacctcttccagagtttctcagaagcttctacaggaaaccactaatggagacagagatgccaccacctcggtgagaaaaagccacaccaaccaaactctcgttttcacagagcaagaacaagctgtggttgtttggcggcaagtcgcatttgtttgttggagccattgtgctctggtggtgctggttttctctccttttaaaaataactggaggccttgcaccatgctgttagttcttagggctggaaataaaagactagatttagagttgccttggaaagatccagggctgttaccttgaattacctggtagaggaaaacgtcgttattttcctaaattcaaagccaactcttgaaaaataggacacagaggtgaagtggatggaggggtggctttatacatgcatgtggtgtcctgggcacgtggtttgataggcttgtgatcagccctgagtcttcaaagccatttattttacattttaagatgtttataagggaaattgtttttgagaaaagaacgaactattttttttttttttttgccttaatgtgaattcacccactggcacaagcagtaatagccctgaagtcaccctaggccatttattcctcagctgcctttgaatttcaatgggattctttcacacgcctcaagcatttctgaaatgctcctaaactaaaggaactcataatacccttaagaaatgatgatttcaccccattttctccataaagctggaatcacatgccctagcatgctgaaggtacttgataattagaagttgattatattggggacctggacaaaggcagagctgggaatgggaataaaacccaggactccatgaaagtctctttcctttcataatagcttctaattcaggcttctaatagcttcgaatgccagtcacatacagagcctcccggccatcacctactggcagtggctgagcgggtattttgccaagctagaatggttcctgcccaggcacacgggtgctgcctccacgccccaccctgtgcccagctcactacaattgccatctttagcagccgaaaaaatacaggtttcagtcccagtcttttcgcttagttgctgtgagaagttagttaggtcagttacgcactggagctttgcactgattcactgtaaaatcaggtaacagctcttatcctgctggtcttgtcccactggcttgtgagaaagacgaagtggagccattcattcattcattcattcattggacaagtatttattgagtactagggatacagcagtaaagaaaacagaaaaagtcctttcctccatgaaccttatattgtaataggggttgtcagtcaataaatacaaaaataggccacatatctattatgtcaggtggtgataagcgctgtggagaagaatgactcgggagaagctggcctgctgggtgtggggcagtagtgcacttggagacagggtgggcgggtaacaccttactgagaagctgacatttgtgcaaaggcctgaaattatctgggataagagccttctaagtagagatgtcccgtgacttatgatgggattacttcacaataaacccacagtaagtggaaaatatcataagttgaaaatgcactgaacgtacctaacctactgagcatcatagcttagcccagcctaccttaaacgtgctgggaacacttatgtcagcctgccgctgagcaaaatcacccggcagcacagtgccctgtagaggaccttgtagagtactcatgatcacctggttaactgcgagctgcccagcatcaggagagagaattgcatcacagatccctaggaaaagatcaacattcagaatttgaagtacgctttccaccgactgtgtattgcttttgcaccattgtaaagtggcaccattgtaagtcagggccatctctgaaaagaacagcaggtgaggggctctgaggcaggagtaaagctggctgggtgaaggagctgcagaaaccccaggtggcagggccaatgggcgaaggtgagatgggctcagagaggcccccaggttgggggccccaggggacttcggctttttttctgagggatacaggaacttttgtcttactttttttagagggcctctctgactactgtaacaggactagcctgaggcaagcgtcgcccaggcagaagcagggaggccagtgaggcaactactgcagtggtccaggtgagagggcggtgctgatccaggtgagagggtggggctggagcaggtaagaggatgggactggagcaggtaagagagtggggctggtccaggtgagaggatggggctggtccaggtgagagggtggggctggacaaggtgagagggtggggctggtccagggtggccacagaccagggatgacaggcgctccgattctggagatattttgaaagcagaggtgacagaatttgatggagataaggggtttaagctgcaagtcaccaaatgaagagaaggggctgcagccacccagaagaacagcgaagattaaaaggagaagctgggaggagtttctgttttcctacacagcagcatctgctgcctgttctttctccacatccgtgcagctgcccttgtcactaggacgaagccccaggtgagaggctcctgcagaggctgtgacatacctctatctgtatcacttgctgaaggctgatggagcccgtgcacattcactcctcaccgcggcctcgcgaggcaggcaggacggcatcattacaccctgcttccccgaagaagcagcaggccctgagtccgtggagtgatctgctcaaggtcacagagccatttggcatgaaaggcagtctctgggctccagatcttgtgttctttctgctatgccaaggctaaccatagacacacgagatgaaaatagcacttttttttagtgcacctatgtgcccggcactgctctaatcattttagacatatcagctcctttaaccctcacagtaactctctgtgaggtggtacaagtattatcctcttttacaggtgggaagactgaggataagttcatgcagacattaaggtgcaaagcccggattcaaacataggtgttctggccctggaacctgtaggttcagctataccccagccagctttgcggcctttctgcaagccagtgtgtgggcagtaggtggatggtgctgatgccacgtgtgggagacacaggcaaagagctggggttggctgggtgggtcaggatgggatttgaagtgggtcctgaagggccagttagaaggcatcagggaggacagggcaggagtgacaggagcaagagagccatgtgtgcaaggcaagcttggagcacagcaaccctgaagcggtggtcagagcatgaagccaaggaggcacagtcgaaggcgggaggaaagcaggccagtgagccgctgcagatgccagaggagggcagtgttccgaggagagaggcaccggtggggtcagaggccgccagggggccaagccaggtacgtgttgttggcttcctcattggagaaattcgcaagcacagggttcacagctcagtgggcaggtctgactgtgtgactctgaagattgaccggaaggcaaggacgaagcagtccatttggctgctttggagttctgcagaggatctggctcaatgcctgcaaatttccaacaaacaaatcagacccaggacaaatggctagagccgtcatatcatgtagatccatgtgaaaagaatccttttttttttttttttacaaaactagttttaaaaagtattcaaattcttttggagaataaggaagaagaggcagtcatttcactttggcttattttctgtcaccctagtgctgtaacagatcacagctagtgtcatgaagctgagttcttattaatagtgagaactgactccaagctcaaggaatttggcagccaccttgacaaaggtttaatctgctgaagagaacagctgaaatcattttaacatgattcactgaattactgaagcaagcctcacttttgtagagggacaggaaaagcagcatgcaggccttagtcagtccacaagtattttagtgagcccctattatgtgctagaccctcagaaggtaccaaggaaaggctacagagaatactgtaatataacttcagggttagacaaatagaccaatggaacagaatagagaaccaagaaatagtaccacttccacatataatttatgagacagagggagcattgaaagctagtaggagaaaggatggtctgcacattaagtgaaactgagataattgcttacccatgtgaaaaaaatgaagttgtatccctgcctcacaccatatgcaaaatcaattccaggcaaattgaagacttagaaaggcaacattttaaaatatgtaaaaatgttacaatctcagggagggaatgatttctgcaaaaaccaaataactgctaattataaattaaaggatgataaagtcacctacagtaaaatttaaaacttctattcatcaaaaatactgtagagaaaaaggcaaggcacacactggaagaagatatttgcaacacacaaactgacaaaattcttattatctagaatatataaataacttttagaatcaatgagaaaaaacaaaaacaagccaatagaaaagtggacaaaagtcatgaatgacacgccacagaagagaaagtatgaatgacaaagaaacatatgaaaggctacttaagcttttatcatggaaacgtaaagtcaagtcttgatgagatcccaattcacccactagtgtggcagagattaaagtcagacaatggcaagtgttaatgaggatatggagaaacaggaactcttatccacctctggtggaagcctaattggcactggcatcttagaaaacaacttgacatttcctaatgaagtgaaatatgtacatatcctacaaaccagcaaacccagtcttaggtatgtgtcctagagaaactcttatgcagtgtaccaggagctatgattaagaatgtttgggctgggtgaggtggctcatgcctgtaatcccaacatttcaggaggtcaaggcaggagaatctcttgagcccaggagtttgaggctacagtaagctatgattgtgccactgcagtccagcctgggcaacagagtaagaccctgtctctaaaaatacaataacaataagtcaataaaaaataatgtttgtagcagtatttctcattagaggaaaaacccgtaagctatcccactgtccatcaacaggtgaatgaataaataaatcatgccatattcatatgatgaaatacaatacaggaataaaaatagactatagctacatatgtcaatataatatatatgttgaacagaaaagaagcaattcatagaagagttcactgtattagttatctgttgctacataacaacttgctccaaaatttagcagctaaaaacagcagacatttaccatctcagggttgctgtgggtcaggaattcaggtgcagcttaaatgggtacctctgcctcaagttctctcatgagattgtcaggctgtcagccagggctgtggtctcacctcaaggcttgacttaaagaacacctgcttctaagctactcatgtggtggttggcaggctgtgtcccttgccatgtggcactccacgggcttgcctcccgacatggcctgtggattctcccagggagagtgatccaaaagataactagtgagagatcacccaagacagaagccatgatcttaccataacctaacttcagaaatgaaagtctatcacttctgccatactctatgtgttagaaaccagttacttggtccagcccacactcaaaaggaaaggattgcaaaagtgtgtgaagacctcaagaggaggggggatatcgaggtcattttagaagcttcctaccatactcttgtggtatgatttcatccttatgaaggtcggaaataggaaaaatgaaattacatattgcttaggtaatcctgcctacatggaagcactatgaagaaaaacgaggaaatgataaacatgacattcagggtaatgatgatcctggggtggggggcactaagaatggagagaacatacaagtagatcccacaggttggagctggatggtgagttcatggtgcttattttctttctgtgtttcttgatgtcatttaatgttgcatgtagttttgttttttctctttggtttggtgttctgttgatatgatcaaagttacatgtgcatacactgtagagtcaatccttccgtggtatttgctgtcttccaccagctcttcccatttactgttctccagaggcagctacttttaccttcttttgctaattaattttagtatttacctccatgtctgtaagtaatatgtgtgtattgctaccttttgatgctttggtttatttaggtattatctattcccttcccactctgggagatgaaaatttagctccctttcctctcctccaactcttcctctcccttcatcttccttttataattacatcataattttggttaaagcagtaatcagtgtttacattactcagtcaacactaatttgactctattcatagttgagccttgtagtaaaaaatatgataacttttcccttcctgcagaacttttcatttttcctggagttgttaatgatcgtgtttgtttgtttgcttagttttctatgtattcgtcattaatgcaagtgcaaactctggcagttgtctaaacctcttttcaggatgttcaggcacattaagtttcctatcaatttcatctccttggaagtgtctcccagagcctcttgacctgctccagcccggacgggttgtcctccgcacctggtgagcacctgtcctatgagggcctccctgtagcatcaccctgagctcgttacctttattccttgtcttcctccttggtttacttctttgttttggtgaagcatacctcctgtgtcttcctgagagagggtgcatgggaggcaaacccgtgacaaccttacgtatctgaaaatgtcttcgttccaccctcagactgaactaatactttggccaattcagatttctggtctctggtttggaattctgatttggaaataattttcctccagaattttgaaggctttattccatggccttctagcttccagtgttgctgtcaaaaagtccgaagctgttgtaatttctggttctttgtatttggcctcttttataccctcccccaaaacccctaaagctctgtaggattgtctcctttcccctggtgttctgaaatttcacaataatgtgccttggtgtgcatctattttcatccactgtgctggggacagtgagcctttgatctagaaactcatgcccttaagttctggggatttttgtttttgaatgatttttaaaataattacttctctccttctttctccttcttttccccccagttgtttctttctgtaacttctactgtttgaattgggagactgattcactaattttctcatattttctttccctctctctccttttaagagatgatgggggtcttgctctgtccccaggctgaagtgcaggggcacaatcatagctcactgcagcctcaacctcctgggcacgagcaatcctcctgcctcagcctccgagcagctgggggatacaggcacacaccacaatgcctaacttcatattttctttcattttcattctttgtctttttctgctttttgggagaattcctcgatttatcatcttccagcccctctaggaagacttttttcatacagcattccattcttgtctcgtgggtccagtatcttattttctctctcttacgttaattataggatttttccttcaagagttctctctgtgaatggtctgtatttgatccagagttccttctttttgtttgtttagttgactggtttgatctgtgtctttcatgttagagactcctgactgtctggggattcctggttgcctgcttatttttaaaagtaggagactaacaactttgagctgtaagggatttgagtgagcaaaagtagacatatgtctctaccatctttgccaagtcatacagtcttttgtatctctcatttatttcatgttaagaagtgaaaaaaaatccatagtccacaccctgaaagataaatcagtaactgtaataactacccttgagctcaaagaaaaattacatcttttcctcctcagcctttaaagaaaaacatggagctatcccccccccccaaattttctattgcaaaaaatagcacaagattagtatgtgagtttgtgacatgtgtaaaccgctctaaaattgtgaataggtttagaaaccttttctccctcctctctactcccacagtcctgaatcaccagcccagccttctggctcatcacttcctgcttggtgagttgcatgtatgtcttatctccatgacgaagctccaagccactggagagcagggtgcatgtccaattcatctcagcatcttccgtagcccccaccagagaagcgatcactgaaggctgacaaacaacgaaggacactctcaagatcttcactcctctcctcagcacacacagttagcacgcacaggagtttattatggtgaatgaaaaaagaaacccacaagaacataatttatatgtaattccactttgatctctaatctctttaccttggcatcctcccacatatgaataggatggtccatgatcctaagggcagccaaacagccagggagcacgagtttaatcctcagggtttgcagggaaaggaggactgtggagacccacgtgcacaagaaaatccatgatgtgcacagagggcaggctacaaattaatcctaacttcatggttcggtattcaaggctctccattgcttctccctggacacctgcaaagcttctagcagcactgcttatctggggcctgacccctttagtcagtctttcatgtagaagaatcattttcagatactaagtatctcatgtcttttctttgtccaagaacttacagttgatttcttttgtgtctgtatcaaatagttctccagcctaaacttcaagacatcttcatgaatgcctcaccactccactgcacgtgtaaatccatgcccctgtatttttctgtctattgtttctcagactgataacacctgcgccctctcagcaacaataatggctgacatttagtgagcacttaatttgggtcactgtgctggtattgcttgtgggttattttacttaatcctcccatcattggataaggaaattgattgacagagagggcacgtcacttgcccacagccatggagctacttaactctggagctggagctccaagccaggcaagcccagcccagcccaagatcactggctcagctcaactcctcactgctaaactgcctcaaccacatttcttcagaccttacccaagacttatcttccaggaaatgtttttcggaagaactgaggaccctggctgtgactgtattacatttatgtgttgcaggcttgtggcgtggagctgcctttacgtcttctcccttctgtgtcccctcccacagtcactgagtcttgctgctttagagaagctaaagtctgattttccaccactgcctcagcacagggcctgaggatagggtctgccaccatccctccagccagaaagcaacctgctgggaagggaggggttgcattgacctgagggcctagcagggcagagtgagcaggccagggagacagctgcctttccaaggccacagcagaactgggagggggctgatgcgctgggtcacggtcaggggtagacgcaatcctgggaatcagagttgggagccaccagcctgtgctactcaaggatagccaggggagcaaaggcaggcccagcccagggaaatgaggcccacgcagccagccaggggcccctagggtggtaacagagcatccctggggagcaagtatagcagatggagtgggcaggcaaggccatctcattagcagagctttggggagggggtatcttttcttcagatgtccccagaagtaccagacacccatgtccttgtgcagacagccacaaaaaggctaatgctgtgccacccactgggtctccagttgctggccaaggactcaagtggggctggagagcccaccattgatgtgctcgcgggaatctgctagggccgggctccggtgggtgagaaaggctgtggcctgcgtctctgtcccagctttgcacacctgtttcttgcctggtcaccccacctctgtgtcctgtctcttcagataccctgctcgccacccgccgaccattcttcccagcaagctgtgttatcttgtcattcctgtgctcaagaacccagaatctcttctaaggcctctaagacaagatccaagcttcttctcccagaattccaggccttcctaaatctgacccctggtctctgaagccccctggtcacctgctactggagcccaggtgctctcctctcactgaagcttcctcattattcccaagacacacgccagtcgcttttgcctctctgatgttgagtgaaacagtgaaaggagcatgggctttgcttcctgtgtgtctctaggcaagtcacccagtgtctccgtgcctcctgctgcttacctgggaaatactttaaagactgttgtgagatgagaatgtttgcgtacaaagtgccagccacacagtaggtgctcaatacatgcacagtatccgtcataccatgctcttgctgctccctgacttgatggccctgtccctttctgactggctgagctcctgtctccttccaggcccatctctagatgcatctacacatgcagcctgccctgcacgcctcacttaaggcgccaagggaaggaaaagcagcatttgcctatcactcgctgggcacagaccctgtgggggcatggagattcctgatgacggcagcgaatccttccagggggcttccttgtactaggcctgtcccggcacgttgtgtgcattaactcacggaagccccaatggtaactgacttccatagattaaggttcctaaatggcttttctgctctatccagcctagtaggtttggtctccctggccctttgttcttagctttccccatccagtggcctccaagtggttaagaggagattttatcaagaggtgaagccctacagtataaaatacagagtctattgtgtgttgttcaggctgatcccattagagaacggtttggaagaggactcaccttcaccagccctgccacccagcctgcaaccagctcccttgctgcactttgtataagccctgggctttcattagggttctctgcccagagcacccgttcctctgggcctgcctggaaaatgcaagccttgctcctctgtggcacctctgtggaccctcatgtgtttgggtcaaggtcattgccctctgcctccatccccagggcaccttgtccaccccctgattgcacccctctgcagatgtctgcctccttggcaaacccctctcttgggctgggtccctgagggcaggggctgtgtggtattcatctctgtatttcagtacttggcacagagcctggcatgcagcaggtcttggtgttggggatgaagggagggaggaaggggatggggtggaataggcatccgggcagaggaaatggtgctgatgtttccagttggttcctcccagggcggggcagctacaagcccctgtctgactcagaaagggaggcctctgtggacaccccagagccccctctagagacagctccacgagagccccaaccaccacagcttccctccagacccccgggagatgccagtctttgagatgcttcaactttcttagaggaaatcgctgaatatgtttggtaatttttttttgacattttccctgttcaggagcttgtgatttcagattaatcacatccacatacatttagactgtcggcttggaagggaaaatttgaattttattactgcatgatttcatccaaagctatcttaccaacactaaaaggatgtctacaatgaggtgcaaatcatgacaaaacattttatctctgggaccaagctcatggcgggaggccaacgggacggggggctgcaggtgggacctgggtgggcacagttgcagccccttcagtagcctaaagagatctgtgtgagccaccgtcactgctgcctcttcctcagcaaaatatctcatttccttccccgctctaggtttgcccacagcccttactcccaggaatggctgttcatcgactaactcctgtcttcccattggcaggtaccatgaccagcaggacgtaactagtaactttctgggtgccatgtggctcatctccatcacattcctttccattggttatggggacatggtgccccacacatactgtgggaaaggtgtctgtctcctcactggcatcatggtgagtacccgcctctccccagtgagtacccgcctctccccattccctacccttaaaatgtggcaaagagctgaactctttcttgcaagcacataggggccttcctagccgcagagcggggggtggctgttagttaaccgacctgcatgtgtgtcccctacacataaaatgtcaggtgggaaatctgcaatggtttctcacttttcagttaacttttctaaggtaagaatgagacctggactcctggcagttaatggtctattcacagctccctcaaaatgggctgggtgaagctggtcctggcccaatgctctgatgcccaccccactgctgtgcagccacccagtttgctcacctccagtgagcactggagcttgcagtttattgtcctccttcctgttgccttggtcccactgaccttggcaccatttctgatcatgtttagctggaactcacagaagcagggactggggaaagagcactgagtcggcctttgggacctgagtcctggacggggctgtccacatggccctgggctggctcttgcctttcccaggcttctgcttccacctctgcctatggaggggctgggctctgagtgccaagtgctttgcagcactggcatttggcaaggctgtgatcccatctccaggtgcccagcaggtgtgccgtgccctttcaaggtgtatctctcctgcccagtgccctaccacccacactcgacactctcgcggaggcacacactctcacctgtcacatggccatcacagtgtggcttatgagagggatgtggggtctgagtttctgctcactgtggaccctgggccaggcactctgcatattggacctgagcatcctccaggggaaagtggagatggagggcctgccctgccctccccattggtttgtgcaaggaccaaatgcaatgatttatgttaaagtgctttgaaaacgagaagcggccacacacaggtcagtgttggtggtgtcctcagtgtccttcagttgcaaattggtgaagtgttccctgggcctcattgcactttgggtccaggacaggcagctgctgctctttggccttcgtcctggaatcctagaacagtgtcagaccagggttggacacttttttcagaggaggaaactgaggctgaaagaggaaagcacatctaagcctgggtagtgttgggggaggtggcggggtgagaagtggtcaggctgcttgtggtgtggctctgggtctccatggctggagaccgcaaccctcccaaggacagccccccgtccacagcccccctcacacctttgtgaaaatccttccttgcagtgatccctcagattccatttgtcacccccgttgcctccagaagagatgaagaccctctttctggaagggcagtgacccctttctgcagtgcaaagggagggccgcaggtcttcctgcagggtctgagtgaacgcctcacagcggctgggggctgcccccactccccaccccactccgtcttgttggcttcctggggctgatattggtggaccagacggtcagacccaggcttggggcagtcagcctgctgagcaggaggggccaggctctctcctcctttctgactccagtccagggcaggtccctattagcaggcaggtcctacgacagcagctaatgacaaaaagcttagcgctggggttgtgataaatcacgggtaagtgcaaggctttagaacaaatacctcccatcggttagtaggagtctgtcttggcatagcaccaactgtcacgaggaaaccggggaaagacgcttcttaccagaaaggaatgaaatgccactgaaggccaaatctttccttcttagagtcactcctggggctttgtgcctcagaaccagctctcagccagggctggcacagagcagggttgccagtaggtggatgggccctgcgggagcctctgttattttaaaataccgaccttttcccctctcagcacatagctgtccccatccaagaagcagcaccccaaagacctggcttcctggttcctggactccgcatctcctggctctactctggcacagctgagcggaacaggcgagaccctggccccacccctgcctctctttggggtccggaggctgtttgtctttcagcacccccttttgctgtctgggtgtgcagtgctcccccagagagagcgttctgttccctgtggattgaggtgtgatcaaagtggaaagaagaaacggacgatgaggagccaattcccaccttccatatgaaaaatacagcccaggcctttcatctctttttgtacaaaaccctgtgcataaatatacacctttctatatacaggaacagggaggtttcctctatttattgtcagtgtttttcacccaaattaaagtcagtcgcctcactctggggtcagccacagtgaggaaccctggtggcatttttctaacaaatgtgatttttctagctgagtcactcctagccagggtttcactttgctgaggatcctttcccctcctcctcccaacctcccaacactatgtatagctcccaattattattgcaagtgcctttactaaaggtagggcttcctgtttggttaccatggacaccaggaaggccaaggcaaggcctgcttgggaagggaaaggaaggatttgtgtgtgtgtggcctgtaaatagtcttaatcattgttttctcttggcaatcccagtaacaatgtaattatcaaccattaagcagggtatataattgtctgaacaacttgccatggctggcacagacctggtgtgtttgagagatttcacccacaaaagcagctacattaaagtccagcatctttccataaggatttttcatgatcatggtgacaacacagtagagagaaagctgtcaatatttagtatccagaattggaaatgacagtgcaacctaaaagatgtgcaatgctgaccttctgattctgtaggcatctggaagaccccaaagcccccaaggctgcttggcataactttgtttcaatctagcctctttctaaagctggactctctctgtagacccttcatcagttatggacaaacaggcaaaagcttctggatatctgcagggacgctgagcttttccccaatggcctcatgagagatgcctctgaactgccaagggaaagtgatgatgaagtaaaaggtagcacaaattgagtcatttcgggaggaggcaaaaagagggctcagcaagacatctgcttaatgtcagttttagaagatgagcttctcccgaaacaccttggtttcaaaccaattgatgttattttagttgttgcatggaatctgttgcagaaacagaatccaactgtaaatcctccaggcttccctcctccatttgtcactttcatttgtgttttattttattttatgcttctttagttaagaacacctcatacttttccccttgggatacttgtttttccagcttctaaggttttccagctggaaaatgtttcttgaaaacaagaggtgggaggactggtgtggaggagtctcggtccagatttgggtccgaatctctagagttaggcgtgttcaccccgtcccagccaccctctctccatgcactcggtgctccctctcgcccacgtgccttgggaagttccagctcatcagaagtggaccccatccactcccctcgccccatggaactggaagttggacagagcacatccagggactccagttgatgtcccctgtggttcaggacttggcatatctgaaagcaaaaggctgagtcatggctcttccccccagtctgaccccagggaagtcatagcagcagctgtttaccctttcccatcctgcttcctccctcctcacacaccccctctacccaccagccatttcaaagattccacagttagccaggccctcggtgatttgtctcttaaaactaacctgcatcactgccatgtgacacagcactgccaggctgccactgtggcctgtcagactattaactcacctaagtgaaagggcccagcatcccaaaggggacccaggggacaggcaatccttataccacttgaagatggacacagcagggtgggatcccttggcacttccttcatgtcctctaaagggccaaaatggaccattgacttctggctcaagccttaggctccttgttcttccttcctctctcaatcccatcagcccatcattttttcttattcttcagcctcctccttctctctttccccccttgacccttgctgtttaggatgcaacgcaacttgttccccatctcattttctgcccagctttacctctccctgcacccaccttctcttctcttctcttctcttttctcctcttctcttctcttttctcctctctcctcccctcccctcctgttctattgtcttctctcccttcttcattttcccgccccgcaccccgcacagtctgcagaggctcagcagtctaggcttcaggattcctccaccactttatgaaggctgctgatgtctggccccatctttattaggttgcctcttaatggaaaagaccaggttaggtgtcattactggtgactgccctaattacatccagtcaatggaaaaatgaagctgagagcatccatttaagttggaattaagggttaagaatgcagcatcctctagaggaatactcacaagggagtcataacatctctatgttgaaagaaactgggaagtgtcatctagtccactgtcctgcctccagagagaaatttatcttcatcatgtgagacaggtggttcattagataaaacactctagcttctcattaaaagccccccctgcaatcagccagctaaaatgtgggccatggcaagcgctgtgaaacaccccatctagaccctggaaatttggaatggtggatgattgattgttgtgattacattcccaaaatagcatggaacagggaagctccctcttcaggcctattggaccccagctttcagggatgatttaagtagagttttgcctgggcctagcgagaggagggagaatggaacctggggagaaccctctccatctgatgttccatttttaacgctatgatatagccctctttttgggctttcagcccaaagtacttttggaactccatataaaggagagggatgatactccgtccggtcgaggggaagggagcacacatcttccctctaggatggcttcttttaagctattttttgcttttggaggcatggctaaattgattacagctacagaccaggctgtgcaactgcccagatcctttgaaaattgggcacagagtctcctgtaagtcacagaagctgaaaaaacacagccgtcctcgaacaaaagaggaaaatgaggtcagaaaaggaaagttcacacagacttggttcttttcactttgtgacaaggccaacaaatgtactgagaaacactagattgttttaatggggacccttgtgggaaacgaggagaaagcattgtgaacttcaaccacattgaaacttcacacaggctagcctttgtcagcctgtgggataaagagagaaatagcttctaaaagagagagtagggaatggatccacccatatgcattccttccaagtcggttatagattatagtacctttgaaaaacattcttttctgcttctcacacattttgtaagacctgatgagccaaaaatgttactgacagattccttccattctgggacctcaactgctagactgggttctgtggcaactagaattactgtttgacatacaggattcggttgttggctttaataagttcatcatctctttccatgagtggtggtcagggcggcgcagggcacagcatgcaggcagagggcgatggtctctgacgggagtccgcttgcagaaggatggagctgactcccgctgcctgccgaagagccaggggagtagtgagtctctgaattccccctatgctcacaagccaaccaagaagcctagcgaagaggattttaaaatgcattgggagaatgttggaatgtgcagggaattccctgcttatttcccagacagtcaagtatgcacccagaggattaggagagagaaagtgagtcccaccattctgggggctcagcagagcctgcttccttgcccaccctcccccgggctcccctggcacggacctaccgagcagactaggatcgctgttccagaaaatcccaagggtctgctgcgggctcacttaaaatcccggttttgatccagcagaagtggtgttgtctttaaaatctctgcatgacggtgaattcatgagcctcctggtgaaggcaggaaggaaccgattccttgtgctgagtcatagcgtaaaccttgaggtgaaaaagcccaagtgtagagcaggcacagtcactgagtgcacgtgttcgtccaacctgggtgccctctgtgaaacaagccctggggaaaggtattgcctcttcattcgattattttcaggaacactctcagccactggaggtgttccatctgcaccccagctgatggcctaccttctttcctcccaggcctgctggtctagagctggcagtgggatggagacctgcctgagggagagagggcccgtgtgtgctggcccctctgtcttccgctgcacagcttggcagctgaccaggtgcttagttgttggttaaaccccccaaagcctcggcgccacccagcatccttctccattgaaactggctagctcagcctcccagaggtcagctgcagagcacaacccaagaggcactgcagacccctctgtgggtcaggacatcagagtcctgacagatttcaacagatttttgtggcttggtcgtgaccagccagagagctcaagttcccactccactcccaggaaattacccccgtggccgccacggtgttgagtctctcatcttgcctcttaatgatatgttctttcccctctggtcctcttgatgtccccccgcagggtcagggtgcaggctgcactgcccttgtggtggccgtggtggcccgaaagctggaactcaccaaagcggagaagcacgttcataacttcatgatggacactcagctcaccaagcgggtaagatgccacacagccatgtcttatgggggacttaaggccacagtggaagccaatcagaaagcaaatggtccaacgggtgcagtggctcacgcctgtaatcccaacactttaggaggctgaggagggtcgatcacaaggtcaggagatcaagaccatcctggctaatacgttgaaaccccatctctactaaaaatacagaaaattagctgggcatggtggcacacacctgtagtcccagctactcaggaggctgaggcaagagaattgcttgaacctgggaggcggaggttgcagtgagccgagatcgcactactgcactccagcctgggtgacagagagagattccatctcaaaaaaaaaaaaaaaagaaggaaggaaggaagcaaatggtcatgtcgtatgggtttgcaccaggcttttaaagggtgtgtttgagggaacccagacacaaaatggaaacagcaccttcatacgccgggttcctgtcttctgttcgatcactgtgcatggttcaggcagccaaataattttcctggtaatttaattaatagcctacaatggtataacctgcccctttgcctgatgataccaaataaatcacggtatgaggcaatgttttttgtttatgctcaaatattttcaggattctcattaggaagggcaaaactatattgaaaatatacctaaaactataaaagtatattgaaaatgtacctaagtctaatcctttaaaaaaaatcatttaaagaatcattctatgctgggagcggcggctcacgctgtaatcccagcactttgggaggccgagggggcggcagtgaggtcaagagatcgagaccatcctggccaacatgtgaaacccgtctctactaaaaatacaaaaattagctgggtgtggtggcagtcacctgtaatcccagctactcaggaggctgaggcaggagaatcacttgaacccaggaagcggaggttgcagtgaaccgagatcgcgccactgcactccagcctgggcgacagagcaagactccatctcaaaaaaaaaaaaaaagaatcattctagtagagcccacatccctaaataaaattgttcatcaaaacatcatcatccaatttttcccttttgggttttccgggtaatgtttctcacttgaaccattatggaagtggttatggaagatgaaaatctgaaaatatgcaggaatgggtagaccatttagctgctgaaagttggacaccccactgaattgtctgagatgaaaagacccatttagaatagacagatacaagccttccagaataacagcaggccaaatgggcaaggcaggagctgtttattcaaggacagcttttatggaaaattctttagaactacagcctgaaggaaggtcagtaagatgatttcctgcaagactgtcctctttctgagacgagacagaattaaaaccctgtgcccgtgtctcggcctccatagtctttttcatttaggactgaagtaggttaagggacccatgagcaaccaaattttgatttgggtttttgaaagctagagaaaatattcagtgattaatgttgcacagcagcaaaaatgtgttagaaatagagacaacggcaggaaggaagaacaaaaagagagagagagagaatgacagagggagctgcgagcgagctcttggggaaggcagtgggagagtgtgcagcggccaaggcctctccagtttctcagcagaattatttatggtgtttgattgtttggtctttgattacatttattggattctgtaaagagccttaacagacattaaaaggaactggtacgggcaaatattcttatgttgttgacattcaagtgtttgtacttgatacatcatggccctgagctatcagctgcaccaaaaaaagccatgatttgtcacatcacgatggcagtgattgaaggctgttatcacagtaaggcctgccgggaaccctgccacttggccactctctttcagccccctctaataatgggtgcaaaagtcatgctcagtattgaggaaattattcaagttattgaaacacctaaatgcaaatccacttgcatctattttcctgaagcaatttactgaggtttcactggattgaaactacgtgccggagtgagggcagggagatgttttgcctccaaagccttctcataagctgtttaccaagagtagagacattagcagtctctctgtttattctggttttcttttttaagccaagaatattctttgtatttggtgttattcctttgtcctctccatttttcaccaagtagatcagacgctagaggaaaataaagctgaggaaagccagctcctttgtatgccaggaaaataaacaatttttctgcaatataattgtagaagatgagactgtggttgctaattttaatctttcaaaaatgattccctaacatcctcctcaattccacttcttgaaaagtaggactgaaaatcaaatcaacaaatatttattgctcacccatgaatctaaggtagctttttaatcgaataacatctcacttttctgagaacacttaaatctgttgaaatgtctctttaatatctaatatcttttctcaaggaaataaacaacacagaagggatggttcttacagagagaaggttttcaaagctggcaggactagaacttctgaaggttcttttacataaccttaattgaaatgaaactggatgtgtgcatccttggcctgctctggtttgagctgactttgacctgctcacaagagaaccccacctctcttcccctggggatgcctggcctgccttctgtcctcttgaaatggtccattgtatcaagctggagtggctcattggtcaagaagatgctaagcagccgggtgcggtggctcacgcctgtaatcccatcactttgggaggccgaggtgggtggatcatgaggtcaggagttcgagactagcctgaccaacatggtgaaaccctgactctactaaaaatacaaaaattagtggggcgtggtggcacacacctgtaatcccagctactcaggaggctgaggcaggagaatcgcttgaatctgggaggcagagtttacagtgagccgagatcccaccactgcactccagcctgggcaacagagcaagactctgtcaaaaaaaagaaaaaaaaaaaaagaaatactcactctcagacatgatccttagaagctcttggccgggcgcggtggctcatgcctgtaatgccagcactctgggaggccgaggcagatggctcaggaggtcaggagattgagaccttcctggctaacacagtgaaacgctgtctctactaaaaaaaaatccaaaaaaattagccgggcgtagtggcacgtgcctgtagccccaggtactcgggagactgaggcaggagaatcgcttcaacctgggaggcgaaagttgcagtgagccgagatcgtgccactgcactccagcctgggcaactgagcgagactccatctcaaaaaaaaaaaaaaaaaaaatgctaagctcagtctattcataacatctcagtgaattctcagagaaagatccaacatgaaggagttgactgtggcataattgcaacctcttcggagtgggcaattagtagatttgacagataaaagcagtctcttaccggtatatgcaaccttgatgcttcaaagacctacgcaaaacgaaaaaaggaattgtagctattaatcatagaaaatactcaaattgttctagtatttattcatcctgtcttgctctaaagactgcagcctagcctttgccatgagagccagcactatttttatttatttgtttgtagggagggaagagggtctgatagcactgggtaagaactcaatttctgcttttcttgagtcccatgcttatcttctttcctcgtatgacttatcaactctggtggcaacgtcatttctgtatttaattcaatcagatcttcccacactgacttcgcagtgtcactgccattgttattctgtaattataacttattgctaatctctgggctactagataatatttaagtacatgattcacagagggactggaagaaagatactagagccccatcttttctgccacttagtgttttcatgtccccatctttctgttttatgtagctaaacagatccatcacagaggccactccctgggtgccacactctgtactctgggggcaccaagatgggtaagaggtggtcctcacctccatccctaacctctggtggctgactgccctcagagagcacttcttcttataagaggtagagtgggccgggtgcggtggctcacgcctgtaatcccagcactttgcgaggccgacgtgggcggatcacttgaggtcaggagttcaagactagcctggcgaacatggtgaaaccccgtctctactaaaaatacaaaaaattagccgggcatggtggtgggtgcctgtaatcccagcttctcgggaggctgaggcaggagaattgcttgaacccaggaggcggaggttacagtgagctgagatcgtgccactgcactccagcctgggtgacagagtgagactccatctcaaaaaaaaaaaaaaaaggaaagaaaaagaaaaaaaaggcagagtgggctgctatggacacacttggcttgggaggcaccatggaccggagatattttctttgcggtacctactctccacatcaagccacagtgagcagaaccttcagacagcacagtgtgctaaggatcctatctccttcttgctgcaggggtttcttgccccaagtagctcacccaagtacacttccccatgaattcaatgaataagaccaaaattaaacccacaacttccctaaactatttccttctcctaacttccctggtgtgctcctgacatcgtgttcttccagacgccaggcctaaagacttagccccatttctgactcctctggaccctggaccccacgagggtctgagcactttctgtgtctgatttcaccttgccgtggctgttcacgcatgcccgcctctccagggcctcggccccgccactcttgaagccgccatcttctgtctcgcactatcacagcagcctgctacctgctctcctcacttcggcgtcccttaccccagtcatcctgcactctgcttccccatggatctccttagactctcaggcttagctctgaacaaattacttcctgctcaaaaacctttaagtagtttccccacctactatctcctgaatgacactgaagaaaacttttctttaattacaagcatatgccaaagtttgatcataatcttgctagaagaaaattttcttcagcaggctaattcaaagattactcttagtagtggtatttcgtaggaaaaacaatggtagtcattgttatgccagattatagaaggtttagctaaagactgctaatggacagctggttgggctcaacagtggatttccagaacaagtcttcaagtctttacaatggatcagataatcaatagggcagttatcaggaatgctaattctccccagaagaggattataaattacatcacgcacaaggttctgtcccagacagattgggtgcaggttttctttagcaatagtcacagaaacaatgtgcgtttaagctggaaggacccttagggaagagccactccaacccacatgagaagacgaaggcccagaaaggggcgagggtgggcccccggcctatgcaagatccactttgctctcagaccatcaggcaggcagctttagggcggtcagttccttggaactcagcatggggttagggtcccagacctgctgaaaagaaaagccagcttaactccaccctaactgagtatcacataaatagcattatagaattatccaccacccattaccatattgctacagggagaacctcaagctccaactctgaacaacggaaatacacctcctctctctctacccaatttcctgccagccagagaggtggagctccagtttctaagtggtcagtgagggcctctgggtgaggcaggcagagaagcctgtaaagggagtgtggaatagaacagggggaggaaaaagagcaggtgcaagcagggtgatgaaagagagggcagccggggaagccagagcaagtctgcagggtggtgatgaggggagagtgggcttggcaaatgggaaagaggaaccagcccccttctctagtcctgtgtgtaatggacaccttcagtcaagggctggcttgcaggttctccgatagtgatctgatcatcactcagcctaatttcaacctgtgtaactccttgaagttacagtcatgcactgcataacaagtttcagtcaatgatggtgcacatataccaaggtggtctcagaaggctataacagagctgaaaaattcctctcccctagtgatttgtgttacagtggcctacagtacaggaatgtgccatacaggcttgtagcctaggagcgataggctataccatacagcctaggtgtgtagtaggctgtcccatctaggtttgtttaagtacactctgtgatgttcacacactgaagaaattgtccaagatgtgtgtatttaaatcacacccaccggccaggcctccctttccccgtctccaacctccaagtagaatacttccctggcaagggttcctggcagcataatgggcatgctagtgatttcttctctggggggctctgctaatgggacccctggaatttcccagggctcctggggctgctggaggcttagggtgcccaagaaaggtgctcctttcatcccccttgtactcctgccccaagcattcttgccgcaaccgacagcccctctgtaatagcaagtagcaggttacctgggcagagaggtggccagagcaagtcattgacatgggatgctgcggccaagagctcaaggaagaggtgtgtgttctgttgtatgttttcttgctggctggggaagttagagggaaggaagctgacatttattggaaggagagaatattaacaaaggtaccatgtattgaggcatatggccaggatctgtgctaatgttttaagtatattctcatttaatcaacacagtaatcccatttcacagatgcaggtagtacttgcatcactctctagccctggaccctgctttgttgttgtggttttttaagcgcttgttacctgatgctatcatacaaactgcataccgtcttctccgcaggattgtaagttccgtaagcgcagcaatgttattgatttgttcactgtggtaccgtcacttgctacaacaatgtctggcccatcataggtgctcattaattgttcctcaaatgtatgaacaaagagagtctcagagagttcagcagtgggtccaaggtggagctgatgatcacgtctatttatcaagtttttctgagggttaatgaaccagtgcagacatatgtgcttagcacaaagcctggcacgtagtaagcactcagtatatgttagctgtcaccataatttgcaaggtcttcattggaccactttcttgcccaggcccattaatcttagagcctttcctaaagtagatcatagagcccattgtctggccccaatcagagtgaaagcaattttttggtagagagtttttgggcttgcagaaaacaatcagccaatttgtttatgggttttggaggcaggacagctggacttccattcacaaagggtcctctcctaaccatccccaaacccatccgattgtggccaaccttgagccactctttctggcttgctgctttcatcttaagccctgccctctcgcactgctgcaccctgagagcatcttttggccctggtgcctctgcccaccaggagaggtcaggtggtacccaagcctccctcaaggaagggtgcatggagccctttggaggctcggcaaatctgaggaagggcacatgacctcatgtgctcccgaccccaacaatgcttagatcaatcagccaggtgaactggagggagaccctggccacaatagcatttactgtccacctgggaaagcacagtgcagttaaaagcctatttctttttctctcgcagatattgatctacttagctttgtgccaggctgtttgctggtaattaatttcagagtcagtgcaagggctggcagttaacatcactttcccgaatgcacggaggcctccctccaaactcataaagatgatgtgactgcctctctcagctacccgggccgtgctgtgacttcagtatcttacatttgggctgacgttaagtgcaggacctggactccgtgttctgtcacattgctaagtgagggccatgatgatttaaaaaaaaaaaaaatccagtgctctttccagttccttgatcctggaaaacaggaaatgattttgtttgtctttccttcagtccacatgaaaaccttctgctcttcctggacgtggctcttgttttgactttgccattagctagctgtgtgattctggctctcacatcccatctctgaagtggtttcctcgtatgttcaatgaggggtttgagctagataatattaactaatatctgtatggtactttacattttatgtagcattcacacccacactgactcagtttgccattaataattgtctagtcttggtctgtgtcttggtttcttcatctgtaaaatgtggataatgttagcacctccctgatggggttgtggtgaggattaaaggagcttagacatatgaagtactcagacctgtggctgcacctggtagatgttaagtgttgcccccagcaccatcatcactgcctcatagcagccctctttatttttcccatcttacagataatgaagcatttgctcctaaactgcttaataattgacagagcagggattcacctgcagactttccagtttccttgaggctttcctaagaggctaagtgcgtagggaaactgaagaaatgacacatccaattgcctcctctccctgcaagaggagggcagtagtattaaatgtgtgctctgcagagagcaaggcttcccttccgtgccgccttttttgccaggaggctgctgttcactctagttccctgagcagaagcccagagaccacagtgtcctctcctggacatccaccgtttccaactttccaccacaacctgcttcctttcaggcaagaaagtactagaggtgggcagttaagtcatttaaaactattttcacagcagatctttactgaatttttaaaaagcaatatttatgtcccttagacatttctgagaagacttagctgttcttttaaaaacatcacttcagcgccaatgaaaaatataatccagccttagtaataaatttttaaaacatacacacacaaaagttatcagcctgcaaaacaatgtttcctaggcttcccacacatctcagtattttaacaacatcccatctgttgatgtcagtctgaagaagcaggtctatattctctaattttattaaaatcctttctggctagtaacctgatttctattaggctggcctacttatttccaggccccaggcctgtggacacatgccagtctgcatggctgacagaaatggggatggttaatcaaaaatctgcttagcatgtgcttaataaggaatgttttctgttgctcttgttactaattgctgaagatgtctgtgtttggattaaaactttgtcccctgccatctggatgccattgatatgtctcagctcagtcatgagcctggtgatatcagtggtttccatgtcaatggatgacagcgtcatatgttgaaacgtgtgattgcagtgcacagtgaaggagccagccctggggaagaggaagctctggtttcacacctaaatatcttcactgattttcagacattgctctgaaattatttcttttttgtgccaattacatttacatgtacaattgcagtgcaaatgtttttggccatttgggaaaggagacaatgggctcgttggtacctatagttccaatcagtgggaaagacattttctcaaagaagtcttttaaaatctccagctgataggaaatctgtttactctctgaacccaagcaatgtaccgtatacacgaagtggcaatctcaggcaaagctcggaagtctgcatgtaagggcagcaatggtatatcgctagctattttccaaggggaccccgggactcaaggtctcgctcatgcagcctgtctaaatatagcatcagcaacagcagtcaagagatagtattgaaataatcaagaaggaagaaagaaagaaggaaggaaggaaggagaaagaaagagagaaagaaagaaaaagaaagaaagaaaggaagaaagaaagagaaagaaagaaagaaagaccctccaacttcaagctctggtctgcagtgtccaacacaagattaagaacagatgaattttaatcacctttttttttcctttttttttttttttttgagatggagtttcactcttgttgccaaggctggagtatggcgtgatctcagctcacagcaacctctgcctcccaggttcaagcgattctcttgcctcagtctccaaagtagctggtactacaggcatgtgccaccatacctggctaagtttgtattttttgtagagacgggtttcaccatgttgtccaggctggtctcgaactcctgacctcaggtgatccacccgcctcggcctcccaaagttctgagattacaggcgggagccaccgtgcccggccttaatcatcttttctaggagttccgtgattttggttaagaaaatagatcattgcaaaatcgtttccttatgaggtagactacagtagcaaccacaaaaatgaacctaagaaaatgaacctgatagcagcctactttatttattcttccttagatcaagaatgctgcagccaatgtccttcgggaaacatggttaatctataaacacacaaagctgctaaagaagattgaccatgccaaagtgaggaaacaccagaggaagttcctccaagctatccaccagtgagtatgccagagcggttcagccatcagatgaccagactgggagtggcgggactcctacaactctgtcagtagcacagaagaaatccattctgttccactcaacaagtggagtggtgaactgggtctgatcactcactgactgcaccagccacatgccaggaattgggcaggctgctatggaaggtaaaaactagagtaagaacctctaagagctttcacattctacacacacacacacacacacacacacacacacacacacacaccatgcattgcaactcaaatcaaaacaaaccgtggctgatgctttctgtgatggaggagtttttaaaagtatagtggaaaagcaaaggatgaaaacattcattctgatggagaggtttggggaatccctgaaaagttgagaataaggcactcaacatggaaggtgcagcccaggcatagaggcagggaaatgatctgggaatagcaagaaaccagtgactgaaggtgagcatgcgtggagacaagagtttgctttctggggggatgtgacaagcccctggaaagtaaaagcctcagttgttccccaggttcacggtccccatgctgggttccaaaatcagaggcagtggtagggctggaggatctgctggtggggctaaacctttgcatggacttgaagggcttgcctgttaccattcttccccacaggttgaggagcgtcaagatggaacagaggaagctgagtgaccaagccaacactctggtggacctttccaaggtgagtggcagtgtctggagacatcccctagaacacgcagacactgagtcttctcaggctcacctgtgagtcctggctgggttcgcactggacagcgcgggaccaggcaagcaaagaaaaatttctgcttggttcaaaaatacctaggctcaagtttgtttcatttgcaatctaccggtatgtcttgtgggcttttgaaacttggtgtttgtttcttaagtgaaatcgctcaggtgtgtctctgcgtgaaattaatgagctgactaaaccttttccgtgtcattttatgagctgcacattgagggactcctgaggttgggcttgagtttgcacggctgtgaagcatgctagcaaggaccagacggtaacgatggccatggtaactgcccaggtcacaccggtttgctgtaatacttggaagttcatttttgtacatcctccagtccttaaccaactagttttgctggcctcaaattggcggcagtggtgtgtgtgggggggtgcatttctttacttctcaagaggcagatagcctacaaggaacatgaagatacccaaaaagagagccctcttttgagagccctagggtgtaaggctcgccatcactctgccactctgtttctggccctgagctgccataaatactgtaaggaaactcctcttgcaaatcacccaggtgagggagccgaaggccacactgctggcagagctgagagtcggtgccactgaagaaagggcctccccctcctcagccccctctcctcattgcctcttgataggaattgtatattaagtgtacagcccagggccaggctggcagaacattccagcagatgtcaattatcataatggaacacattccctgggtaagcaagagaaactccctcaggcacattaagcaccctttgaaaagagtgcaatcagagaaatcactagttgtcgggccacgtgcaggtgccttgtttaataaagggattgaaccaaagaaagggccttctaaacctgtgaggacttcaatcggggagtaagtggcttggcacatttggggagaagcctccaggcccgcgtgcctttggaggagggcgttcacgtggagtgcagggtggttcctaggagcctggggtgggagtggaacgtgggcatgcaggagagaactccctcaggtttttgggtgtgttggttttaatatcagaaaccgctgggactaggtttaaaaatggagaaatctattctaaggatataagggagtctcattccaggcaaaacctcaaaggagacatgtggccagactgcaggaaggaactgactcgaactagacctgggaagcccccacaaccaggaggtctctcaccatttcttctctgtccttctgtttaagtgactgcttcagttctctctccctctccctgtctctctcttcctctccctttccctgtctctctcttcctctccgtctccctgtctctcttcctctccgtctccctgtctctctcttcctctccctttccctgtctctctcttcctctccctttccctgtctctctcttcctctccctctctcttcctctctttctctccctctctgcctcctgtccccgcgacagactgtaacaggctccaattcagagagtacatataatagttttagccacaggtaaagactaattggccccctactagtcttaattctaaattctcagaatagaagaaatgattggccaatttgggccacgtatccaccctgggaccaatcagcattggccaggaagagggtcatatggagcaaacagggctaggggcccacctgtgagcttcaggaatagcccaacaaactgccccaggatgtttcttccatgagtagcagtatttcctgtttctcctctcaccttgcaggacatgctgtgactgatgttccctggggacatgaggcaaaccaaactttcttttttttttttttagttttattattattacactttaagttttagggtacatgtgcacaatgtgcaggtttgttacatatgtatacatgtgccatgttggtgtgctgcacccattaactcgtcatttaacattaggtatatcttctaatgttatccctcccccctccccccaccccacaacagtccctggagtgtgatgttccccttcctgtgtccatgtgttctcattgttcaattcccacctatgagtgagaacatgcggtgtttggttttttgtccttgcgatagtttgctgagaatgatggtttccagtttcatccatgtccctacaaaggacatgaactcatcattttttatggctgcatagtattccatggtgtatatgtgccacattttcttaatccagtctatcattgtcagacatttgggttggttccaagtctttgctattgtgaatagtgccacaataaacatacgtgtgcatgtgtctttacagcagcatgatttataatcctctgggtatatacccagtaatgggatggctgggtcaaatggtgtttctagttctagatccctgaggaatctccacactgacttccacaatggttgaactagtttacagtcccaccaacagtgtaaaagtgttcctatttctccacatcctctccagcacctgttgtttcctgactttttaatgattgccattctaactggtatgagatggtatctcattgtggttttgatttgcatttctctgatggccagtgatcatgagcattttttcatgtgttttttggctgcataaatgtcttcttttgagaagtgtctgttcatatccttcgcccacttttgggcaaaccaaactttcaagcctgcatttctgcagtgccacccacggcctcttggagagatggggcccacggagcagaccgggtgaagcgaacccctcagtgaactggaaagacactcctgtgaattgggtgggggaactaagccgtaaataacccaggagcaagttacctggaaagaaagagtgtgcaggaaagggttaagggaaaaatctgcagaacccccgtggggagatctggggaggagatgaactctgacattcgcccagtctttatcttttcctcccaggagactcacccaaggtcctggcagcagcttagcacacttcacactggtccatattccccctggcatcctgtcaccaagcaacggaacagggggagacaataacgctgtgttctctctcttttctgtctttgtgctgtagcctcccaagtcagcgccttcccactcctgccctttggtcctctctaaattaagaatatggcatgtggcctccacatattacgtctgtattgaattgctgtcctataggctggcagagctgggagggcttggagtctttccccgattgcttcaattacttcaattgaaatataaaaataattcctaccatcggaggctcaggtgatcgaataagatgatatctgtgaaaatgctttgtaaactataaaggttttgcaattggtagttctgattatcaatatagatgaggaaaccaagatccaagggaacaaagtgaccatcccacggtcaggcagttggtgagcaccagcgtgggggccacaacccaggggcctggactctgagtccagagctcatcagggtgcccctgcggtcaaatgaaatgggtgattttgcacattccgggaagaatgtttgcctcgaggaggttctgtcatgttgattaataaagggagtactttcacttctaaagtcaccctgtcctccaagggcatccacgacacggtgtcctgctctggcaacagcagagctcatgggagcggggccatctccatgccaccttgtgacctttccttatgctgccccagtgaatttcctcatggggcctgtagtctgctggggaggcctcactgcattttgtgcccctgctccccttcattcttctctggcttctcacatcttcttttactcttcttttttcctctcaccttacttgctgctgctttggtccctggggcataaatcatgtccatatcttcctagagtaacctgaaatttcacgtgaaataggatcggggtgtcactggcagatcatcagaaacccaaagagccacagtacctcagggatgaccaagcaaccaccggcctggccctctgcattgccgccccaggagcctcactccctgacacgtgggaggctgaagatgcttgtgaatcttgttcccaagtctgatgtacacagccaagatggcatttgctaatttgctgggagaaaaatatctgttgcatagactgggactctgcagaccaacaagggggccacaggatgttggggaaggagcactggtaatcggccggcacccctggaacacggggagtcagtgctgagtgcaggaggggtactggggagctctcaggggagcaccctcaggacccctgccaaggagtgagggaagcaggattggtcagtgggagggtttgaactgtgatacagtcaacaaagacctcagcccttcagagtggccttcagggatgtcccaccctgaggcattgtggatcaggcaggcgaagggccacacctcagcaaggcagcctcctttggctaagcactgtgcctgagagttaattcactttacatcctgtctgctgggttaaaatagaggttgggagatgtgcaataactcctaactgtgtacagttattattaactccaattttataaggcaaccgagattgagagaggccaggcgcctggcagagggcacactgttagtgagctgcagatgtgtacttgagccctggcctactaattatacacccactgcactgtccattccccaccagcgtcttctctggaatcattagatgccagcagccatgtgagctgagaggttgtggccctgtgagaacatgagacagtttagagactcactttatttaagaaaaaaaaaagggccatttttttccccttggtgcatattttctaataaaatgctgtcattaatactcattacttttgtaataagaaaacaaaaatgtgcacacttcagcatccccatccccaggaaagaagcctgtatccttccttgaccagatcagctggtgtggaagtggctcctgtcatactgtggagggcgtttcatttctcccattgcagattcctctgtgatgacctgtcatctccctgtctctcgcctctctctctccacacagatgcagaatgtcatgtatgacttaatcacagaactcaatgaccggagcgaagacctggagaagcagattggcagcctggagtcgaagctggagcatctcaccgccagcttcaactccctgccgctgctcatcgccgacaccctgcgccagcagcagcagcagctcctgtctgccatcatcgaggcccggggtgtcagcgtggcagtgggcaccacccacaccccaatctccgatagccccattggggtcagctccacctccttcccgaccccgtacacaagttcaagcagttgctaaataaatctccccactccagaagcattacccataggtcttaagatgcaaatcaactctctcctggtcgctttgccatcaagaaacattcagaccagggaacggaaagaagagagaccgagctaattaactaactcatgttcattcagcgtgcttggtccgacatgccttgaaaccagaaatctaatctctgtttaggtgcctctacttgggagcgggaagaggagatgacaggaagcgacgcctctggcagggcccttgctgcagagttggtggagaacagaaatccacgctcaatctcaggtcttcacgcggggggtgggggtcagatgcactgaagtagccaacagcgaagccagtccagaagaggggtccgctgggagggagggttgtgtcaggcttgggggatgggctcttcgccatgggggtctttgaacacacctctctcctttccttttgtctacggaagcctctgggtgacaaaagtaaaagagagctgcccacaacttgccaaaacagatatactcgaatcagactgaaaaaaaaaaaaaaagacacagacaaataaaaagccaga

SEQ ID NO: 23618 - DNA, 2784 bp, Homo Sapiens
aaaggttcctgcggtgctctcccgtccagagccctgctgatggggaagtccgaaggccgtggggatggtggagagcgccggccgtgcagggcagaagcgcccggggttcctggagggggggctgctgctgctgctgctgctggtgaccgctgccctggtggccttgggtgtcctctacgccgaccgcagagggaagcagctgccacgccttgctagccggctgtgcttcttacaggaggagaggacctttgtaaaacgaaaaccccgagggatcccagaggcccaagaggtgagcgaggtctgcaccacccctggctgcgtgatagcagccgccaggatcctccagaacatggacccgaccacggaaccgtgtgacgacttctaccagtttgcatgcggaggctggctgcggcgccacgtgatccctgagaccaactcaagatacagcatctttgacgtcctccgcgacgagctggaggtcatcctcaaagcggtgctggagaattcgactgccaaggaccggccggctgtggagaaggccaggacgctgtaccgctcctgcatgaaccagagtgtgatagagaagcgaggctctcagcccctgctggacatcttggaggtggtgggaggctggccggtggcgatggacaggtggaacgagaccgtaggactcgagtgggagctggagcggcagctggcgctgatgaactcacagttcaacaggcgcgtcctcatcgacctcttcatctggaacgacgaccagaactccagccggcacatcatctacatagaccagcccaccttgggcatgccctcccgagagtactacttcaacggcggcagcaaccggaaggtgcgggaagcctacctgcagttcatggtgtcagtggccacgttgctgcgggaggatgcaaacctgcccagggacagctgcctggtgcaggaggacatggtgcaggttctggagctggagacacagctggccaaggccacggtaccccaggaggagagacacgacgtcatcgccttgtaccaccggatgggactggaggagctgcaaagccagtttggcctgaagggatttaactggactctgttcatacaaactgtgctatcctctgtcaaaatcaagctgctgccagatgaggaagtggtggtctatggcatcccctacctgcagaaccttgaaaacatcatcgacacctactcagccaggaccatacagaactacctggtctggcgcctggtgctggaccgcattggtagcctaagccagagattcaaggacacacgagtgaactaccgcaaggcgctgtttggcacaatggtggaggaggtgcgctggcgtgaatgtgtgggctacgtcaacagcaacatggagaacgccgtgggctccctctacgtcagggaggcgttccctggagacagcaagagcatggtcagagaactcattgacaaggtgcggacagtgtttgtggagacgctggacgagctgggctggatggacgaggagtccaagaagaaggcgcaggagaaggccatgagcatccgggagcagatcgggcaccctgactacatcctggaggagatgaacaggcgcctggacgaggagtactccaatctgaacttctcagaggacctgtactttgagaacagtctgcagaacctcaaggtgggcgcccagcggagcctcaggaagcttcgggaaaaggtggacccaaatctctggatcatcggggcggcggtggtcaatgcgttctactccccaaaccgaaaccagattgtattccctgccgggatcctccagccccccttcttcagcaaggagcagccacaggccttgaactttggaggcattgggatggtgatcgggcacgagatcacgcacggctttgacgacaatggccggaacttcgacaagaatggcaacatgatggattggtggagtaacttctccacccagcacttccgggagcagtcagagtgcatgatctaccagtacggcaactactcctgggacctggcagacgaacagaacgtgaacggattcaacacccttggggaaaacattgctgacaacggaggggtgcggcaagcctataaggcctacctcaagtggatggcagagggtggcaaggaccagcagctgcccggcctggatctcacccatgagcagctcttcttcatcaactatgcccaggtgtggtgcgggtcctaccggcccgagttcgccatccaatccatcaagacagacgtccacagtcccctgaagtacagggtactggggtcgctgcagaacctggccgccttcgcagacacgttccactgtgcccggggcacccccatgcaccccaaggagcgatgccgcgtgtggtagccaaggccctgccgcgctgtgcggcccacgcccacccgctgctcggaggcatctgtgcgaaggtgcagctagcggcgacccagtgtacgtcccgccccggccaaccatgccaagcctgcctgccaggcctctgcgcctggcctagggtgcagccacctgcctgacacccagggatgagcagtgtccagtgcagtacctggaccggagcccccttcacagacacccgcggggctcagtgcccccgtcacaactctgtagagacaatcaactgtgtcctgcccacccttcaaggtgcattgtcttccagtatctacagcttcagaacttgagctaagtaaatgctttcaaaaaaaaaaaaaaaaaaaaaaaaaaaaaaaaaaaaaaaaaaaaaaaaaaaaaaaaaaaaa

SEQ ID NO: 23619 - DNA, 11262 bp, Homo Sapiens
ttcctccctctcagggctgcgcgcccaggtctgcaccgcgctccgcctccagccgcgcgcagacttgcgcacgcgtcgtgagagcgaccgcctccgtctctcgctgggctcgctagggctgcgcgttgggccagcgggggcgccgcagctgaagccgccccggagccggtgaaccgaattacctcgagggaggggcgtggggaaggcggcgggaggaggagcgcacgggccggctgccgtgcccaccacggctgaggaacatggttttcgagtcggtggtcgtggacgtgttgaaccggttcttgggggactatgtggtggacttggacacgtcccagctctctctgggcatctggaaaggagctgtggccctcaagaatcttcaaattaaagaaaatgccctgagtcaactggatgtaccatttaaagttaaagttggtcacataggtaatcttaaacttataattccatggaaaaacctttatactcaacctgttgaagccgtattggaagaaatttatttacttatagtgccttcttctagaataaaatatgatcctttaaaagaagagaaacaactcatggaagcaaagcaacaggaactgaaaagaatagaagaagcaaaacaaaaagtagttgatcaagaacaacatctgccggaaaaacaggacacttttgcagaaaaattagttacacagatcataaaaaatcttcaggtgaaaatttccagtatccatattcgttatgaagatgatatcacaaatcgggacaaaccgctgtcatttggtatttcccttcaaaatctgagcatgcagacaactgatcaatactgggttccatgtttacatgatgaaactgagaaactggttcgtaagttaatccgattggataacctgtttgcctattggaatgtgaagtctcagatgttttatcttagtgattatgataactccttggacgacttgaagaatggcattgtcaatgaaaatattgttccagaaggttatgattttgtatttcgtcccatatctgctaatgccaaacttgtgatgaatcgccgatctgattttgacttttctgcccccaaaataaacttggaaattgagttacataacatagcaattgaatttaataaaccacagtatttcagtattatggagcttcttgaatcagttgatatgatggcacaaaatctgccatataggaagttcaaacctgatgtgcctcttcaccaccatgccagagaatggtgggcttatgctatacatggcgttcttgaagtaaatgtttgccccaggttatggatgtggtcatggaagcatattagaaaacataggcaaaaagtgaagcaatataaagaactgtataaaaaaaagttaacaagtaagaagccacctggtgaacttctcgtgtctttggaggagttggaaaaaaccttggatgtctttaatataactatagctagacagacggcagaagttgaggtaaagaaagctggatacaaaatttacaaagaaggagtaaaagatccagaggataataaagggtggtttagctggctatggtcttggtcagaacaaaatactaatgaacagcaaccagatgttcaacctgaaactcttgaagaaatgttgacacctgaagaaaaagctttactctatgaagcaattggctatagtgaaacagcagttgatccaactttactaaaaacatttgaagccttgaagttttttgtccacttgaaaagtatgtctattgttctaagagaaaatcatcaaaaacctgagctggtagatattgtaatagaagaatttagcaccttaattgtgcaaagaccaggagcacaagcaataaaatttgaaactaaaatagattcatttcatattactggcttaccagataattcagaaaaaccccgcctcctgtcttcattggatgatgcaatgtcacttttccaaattacatttgagataaatccattagatgaaactgtttctcagaggtgtatcatagaagctgaacctttagaaatcatatatgatgcaaggacagtgaatagtatagtggaattcttcagacctccaaaagaggtacatctagcacagctcactgcagcaactttgacaaaactggaagaatttcgcagtaagacagcaacaggtctactgtatattattgaaacacagaaagttcttgatctcaaaattaatttgaaggcttcatatattattgtcccacaagatggaatttttagtcctacatcaaatctgcttcttttggaccttggtcatctaaaggtgacgagtaaaagtcgttctgaattaccagatgtgaaacaaggtgaggccaatcttaaagagataatggatagagcttatgattcatttgatattcaacttacaagtgtacagctgctttacagtagagttggtgataattggagagaagcacgaaaactcagtgtatctacccagcatattttggtacccatgcacttcaatttggaactgtctaaggccatggttttcatggatgtaaggatgcccaaattcaagatttatggaaagttacctcttatttctttacgaatctcagataaaaaactacaagggattatggaattgattgaaagcattccaaaacctgaaccagtaactgaagtatctgcccctgtcaaatcattccagattcaaacatctacttctttgggaacatcacagatttcacagaaaataattcctctcttggaacttccatctgtttctgaagatgattcagaggaggaattttttgatgcaccatgtagtcccttggaagaacctcttcagtttccaactggagttaaaagtattcgaaccagaaagttacaaaagcaggattgttcagtaaatatgactacatttaaaataagatttgaagtaccaaaggttttgatcgagttttatcaccttgttggagattgtgaactatctgtggtagaaattcttgttttaggattgggtgcagaaattgagattagaacatacgatttgaaagcaaatgcctttttgaaagagttctgcttaaaatgcccagaatacttggatgaaaacaagaaaccagtttatttggttacaaccctggataacacaatggaagacctgttaacgctggaatatgtaaaggctgaaaagaatgtacccgacttgaaaagtacctataacaatgttttacaattgattaaggtaaatttttcctctttggatattcatttacacactgaagcacttctgaatacaataaattatcttcataatatccttccgcaatcagaggaaaaatcagccccagtgtccactacagagactgaagacaaaggagatgtcattaaaaaattagctttaaaactatccacaaatgaagatatcattactttgcagattttagcagaattatcgtgtttacagatctttattcaagatcagaaatgtaacatttctgaaattaagattgaagggcttgattctgagatgattatgaggccttcagaaactgaaataaacgcaaagctaaggaatataattgttttagattctgatataacagctatatacaaaaaggctgtttatatcactggaaaagaagttttcagcttcaaaatggtttcttacatggatgcaactgctggttctgcatacacagatatgaatgtggttgacattcaggttaatttaatagttggttgcattgaagtagtttttgtcacgaaatttctatattctatattggcttttatagataattttcaggcagctaaacaagccttggctgaggcaactgttcaggcagctggaatggctgctactggtgtaagagaactcgcacaaaggagttccagaatggcactggatattaacatcaaagccccagttgtggtcatcccgcagtctccagtttctgaaaatgtttttgttgctgattttggactaattacaatgacaaatacctttcatatgataacagagagccagagctctcccccacctgttattgatttgataacaataaagctgagtgaaatgcgactatacagatctcgatttattaatgatgcataccaggaagtactggatctactcctgccattaaatcttgaggttgtggttgaacgaaatttatgctgggagtggtaccaggaagttccttgttttaatgtaaatgctcagctgaaaccaatggagttcattcttagtcaagaagatataacaactatttttaaaacattgcatggcaatatatggtatgaaaaagatggtagtgcctcacctgctgtaacaaaagaccaatacagtgccactagtggagttactactaatgcttcacaccattcaggaggagcaactgtggtgacagctgctgtggtagaagtacattcacgtgccttactagttaagacaacactaaacataagcttcaaaactgatgatctcaccatggtgctgtatagtccaggtcctaaacaggcttcctttacagatgttcgtgatccttctctgaaacttgctgaatttaaattggagaatattataagtactttaaaaatgtatacagatggctcaacattttcttccttctcattaaaaaactgtattttagatgataaaagacctcatgtcaagaaagcaactcctcgaatgataggactgacagttggttttgacaaaaaagacatgatggatataaagtacaggaaagtcagagatggttgtgtgactgatgcggtctttcaagaaatgtatatttgtgcaagcgtagaatttctgcagactgttgcaaatgtctttcttgaggcctacaccacaggcactgctgtagaaaccagtgtgcaaacatggactgctaaggaagaagtacctacacaggaatcagtgaagtgggaaattaatgttattattaaaaatcctgaaattgtgtttgtagctgacatgacaaaaaatgatgctcctgctttagtcattacaacacaatgtgaaatttgctataaaggtaaccttgaaaatagtacaatgactgctgccattaaagatctccaagtgagagcctgcccgtttcttccagtcaagagaaaaggcaaaatcactactgttttgcagccctgtgacttgttttatcaaactactcagaaaggtacagatccacaagtgatcgatatgtcagtaaaatccctgacactaaaggtttcaccagttattataaatactatgattaccataacttcagcactgtatacaactaaggaaaccatcccagaagaaacggcttcttctactgcacatttatgggaaaagaaggatacaaagactttaaaaatgtggtttcttgaagaatcaaatgaaactgaaaaaatagctcccacaactgaattggtacccaaaggcgagatgataaaaatgaacattgattctatttttatagttcttgaggctggaattggtcatagaacagtacctatgcttctggcaaagtcacgtttttcaggggaaggcaaaaactggagttccctaataaatctgcactgtcagcttgagctagaagtgcattattataatgaaatgtttggtgtatgggagcctttgcttgaacccttagaaattgatcagactgaggattttagaccatggaatcttggtatcaagatgaaaaagaaagcaaaaatggccattgttgagtcagatcctgaagaagaaaactacaaagtgccagaatataaaactgtcatcagtttccattcaaaagaccaattaaacattacattatccaaatgtggtcttgtaatgttaaacaatttagtcaaggcatttacagaagctgccactggatcttcagctgacttcgtaaaggatctagcaccatttatgattttaaattcccttggacttactatttctgtttcgccaagtgattcttttagtgtactcaacattcctatggcaaaatcatatgtattgaaaaatggagaaagtttaagtatggattatatccgaaccaaggacaatgatcatttcaatgcaatgaccagcctaagcagcaaactcttcttcattcttcttacacctgttaaccattctactgctgataagattcctttaacaaaagtgggacgacgtctgtacactgtaagacacagagagtctggcgttgaaagatctattgtttgtcaaattgatacagtagaaggaagtaagaaggtcacaattcgctccccagtgcagataagaaatcatttttcagtcccactgtctgtttacgaaggggataccttattgggaactgcctcacctgaaaatgaattcaacataccattaggatcttaccgatcattcatttttctgaagccagaagatgagaactatcaaatgtgtgaaggaattgactttgaagagattataaaaaatgatggtgctcttctaaagaagaaatgtagatctaaaaacccttctaaggaatcatttctcattaatattgttccagaaaaagataatttaacatctctatcagtgtattcagaagatggttgggatttaccatacataatgcatttgtggccacctatcctgctccgaaatcttcttccttacaaaattgcttattatatagagggaattgaaaattcggtttttactctaagtgaaggacattcagcccagatttgtactgcacagttgggtaaagccaggctacatttaaaattacttgactatctcaatcacgattggaaaagtgaatatcacataaagcctaatcagcaagacattagttttgtcagttttacttgtgttacagaaatggaaaagactgatttagatattgctgtccatatgacttacaatactggtcagacagttgtggcatttcatagtccttattggatggtcaataaaactggccgcatgttacagtacaaagcagacggaattcatcgaaagcatccacctaattataaaaagccagttctcttttcttttcagccaaatcacttttttaataacaataaggttcaacttatggtaactgatagtgagttgtccaatcagttttcaattgatactgttggtagtcatggagctgttaaatgtaaaggcctgaaaatggactatcaagttggtgtcactatagacctgagcagttttaacattactagaattgtgacatttacccctttttatatgattaaaaacaaaagcaaataccatatatcagtggctgaagaaggaaatgataaatggctctctcttgatttggagcagtgtatccccttttggcctgagtatgcttctagtaaacttcttattcaagtcgaaaggagtgaagatcctcccaaaaggatatattttaacaagcaggaaaattgtattctattgcgtctagataacgagcttggaggtattatagcagaagtgaatttggccgagcattctacagttattacatttttagattatcatgatggagcagctacattcctcttaataaatcacacaaagaatgaacttgttcaatacaatcaaagttctctcagtgaaatagaagattccctccctcctggtaaagccgtgttttatacatgggctgatccggtgggctctagaaggctgaagtggagatgtagaaaaagccatggtgaagtaacacagaaggatgatatgatgatgcctatagatttgggggaaaagacaatatatttagtttcattctttgaaggtttacaacgcattattttattcactgaagatccaagggtatttaaagtaacatatgaaagtgagaaagcagagttagcagagcaagaaattgcagtggcattacaagatgttggaatttctcttgtcaacaattacacgaagcaagaagtagcctatataggcattacaagttctgatgtggtttgggaaacaaagcccaagaagaaggcaagatggaagccaatgagtgtaaagcacactgagaagttagagagagaatttaaggaatatactgaatcttctccttcagaagataaggttattcagttggacactaatgttccggttcgcctaacccctactggtcataacatgaaaattctgcagccgcatgtaatagctctacgaagaaattatcttccagcattaaaagtggaatataacacatctgcacatcaatcatcatttagaattcagatttacagaatacagatccaaaatcagatacatggtgctgtatttccctttgtgttttatcctgttaaacctccaaagtcggtcaccatggattcagcaccaaagccctttacagatgtcagtattgtcatgagatctgcaggacattcccagatatcacgtattaagtatttcaaagtattgattcaagaaatggatctcaggttagatcttgggtttatctatgctttaacagaccttatgacagaagctgaggtgactgaaaatacagaggttgagctttttcataaagatatagaagctttcaaagaagaatataaaacagcctcattagtagatcaatcacaagtcagcctctatgaatattttcatatatctcctatcaagttacatttaagtgtttcactgagttccggcagagaagaagctaaagattcaaaacaaaatggaggactgattccagttcattctttaaatcttttgctgaagagtattggtgccacactgacagatgtacaagatgtagtttttaagcttgcattttttgaactcaactatcagttccatacaacatccgatctacagtctgaagtcataagacactattcaaaacaggccattaagcagatgtatgtactcattcttggacttgatgttttgggaaatccatttggcttaattagagaattttctgaaggtgtagaagcatttttttatgaaccttaccagggagccatccagggtcctgaagagtttgtggaaggaatggcactaggacttaaggcactagttggtggagctgttggtggattggctggtgctgcctccaaaatcaccggtgctatggctaagggggtagcagctatgaccatggatgaagactaccaacagaagagaagagaagccatgaataagcaaccagctggttttagagaaggcatcactcgtggaggaaaaggcttagtttctggatttgttagtggcataacaggaattgttacaaaaccaatcaaaggagctcaaaaaggaggagcagctggtttctttaaaggtgttgggaaaggtttagtaggagcggtagcaaggccaactggaggcatcatagacatggctagcagtacatttcaggggataaaaagagctacagagacttctgaagtggagagtctgcgacctcctcggttcttcaatgaagatggagttatcagaccgtacaggttgagggatgggactggaaatcaaatgttacaggtcatggaaaatggaagatttgcaaaatacaaatattttacccatgtcatgatcaataagacagatatgctaatgataaccagacgtggtgtattgtttgtaacaaagggaacatttggacaactcacgtgtgagtggcagtatagttttgatgaatttaccaaagagccattcattgttcatgggagaagattgcgcattgaagcaaaggaacgagtgaagtctgtatttcatgccagagagtttggaaaaataattaacttcaagaccccagaggatgccaggtggatcctcacaaagctacaagaagcaagagaaccttctccgagcctctgacagagaacactgcctgaagacacacagcaataagtgattacagctcctagactaccttccaaaacctgtttgggaagcatattacagaaatgatttcaagtaccctgtattctggatgctaaaaaacaaaaacaaacaaaaaaacaaaaacaaaaaaacaaaaccagaatcaggtaaaacagctatgtgattaaaatattttaattcttcagcaattacccggttttctaaattgaatcatgcatctatttataattctaattattttgtaaaagaagacaaaattatgaatcttaagtatttgctccatctttttctctgtaatggtggagaggctgcccataattcatctccacatggagccaagtttaatgtttctagttcacattttgtacttctgtcatgcttatttcaaactccctgagtgatgggtaagaaatcaaacattgcctcagtggtatcaagagaactttggtggtggtttcttcagaatcatgaagttcttttgccagataaatattttgatattattttcctttttaatataaaggataggtttgaattgtacttaaaatgcatagcattattaaaaacaatcttttaaaatataatttataacatagattgaagcctccccttaagaaaccttaaagaaataagtatcctactcaaaaaaggaagtctgtttcagaactttagggcctttgaaatatttcctcaagcctatttcatgagatctacttggtttacccaagtcatgtttttaatagactgctaatatcaaaggagaatttttaaagccttaacaatgcctactttccattcactgttaacatggaataaacacaattcccaacatcttagatagtgtattatgcttccaacagacagtccctctcatataaagtttatgtaccctaaaatctaacccaataacctgtcccgttgccaatagattgagaatttctggtttgcttactctacagttattcaaatgagagtcacgcttttaaatttacagctcatcacagaaatcatcagctatacattagtaaaaataaggacatgaggttttctttcttggtttttgtccaagatctttgcaccttaatattaatggactgtttcaggtaaaagagaatgaatgtatgattgtgaactgtgaagagaatgatgcaggatcctatttagttactgaataatacagagtattcaatgcatgttgtatgtgccaccaagttactattaactgtttttggaattgaagactctgtatagtcaatagttgtgaaattcttctcaggctccttaaaccctcgctttgttgtaaaagctaaaataaacagcatgctatattgtaattgtatttcttgctgaccaaatctactaaatgctattgatttctctctgattactaaaacacattgtttattctcagtagtttcccccaaaatgcttttttctttgctgaacttaa

SEQ ID NO: 23620 - DNA, 2472 bp, Homo Sapiens
agtgagctagcttctgagttttcccttctttttatactgttttctgtgctggcttttttgaatcttcctaatttttcatctctttaacaaactcctatgaagttgaaaccgggaagtttgctctaacatttccagagaaggtattaagtcatgatgcaggaatctgcgacagagacaataagcaacagttcaatgaatcaaaatggaatgagcactctaagcagccaattagatgctggcagcagagatggaagatcaagtggtgacaccagctctgaagtaagcacagtagaactgctgcatctgcaacaacagcaggctctccaggcagcaagacaacttcttttacagcagcaaacaagtggattgaaatctcctaagagcagtgataaacagagaccactgcaggtgcctgtgtcagtggccatgatgactccccaggtgatcacccctcagcaaatgcagcagatccttcagcaacaagtcctgtctcctcagcagctacaagcccttctccaacaacagcaggctgtcatgctgcagcagcaacaactacaagagttttacaagaaacagcaagagcagttacatcttcagcttttgcagcagcagcagcaacagcagcagcagcaacaacagcagcaacaacagcagcagcaacaacaacaacaacagcagcaacaacagcagcagcagcagcaacagcagcagcagcagcaacagcatcctggaaagcaagcgaaagagcagcagcagcagcagcagcagcaacagcaattggcagcccagcagcttgtcttccagcagcagcttctccagatgcaacaactccagcagcagcagcatctgctcagccttcagcgtcagggactcatctccattccacctggccaggcagcacttcctgtccaatcgctgcctcaagctggcttaagtcctgctgagattcagcagttatggaaagaagtgactggagttcacagtatggaagacaatggcattaaacatggagggctagacctcactactaacaattcctcctcgactacctcctccaacacttccaaagcatcaccaccaataactcatcattccatagtgaatggacagtcttcagttctaagtgcaagacgagacagctcgtcacatgaggagactggggcctctcacactctctatggccatggagtttgcaaatggccaggctgtgaaagcatttgtgaagattttggacagtttttaaagcaccttaacaatgaacacgcattggatgaccgaagcactgctcagtgtcgagtgcaaatgcaggtggtgcaacagttagaaatacagctttctaaagaacgcgaacgtcttcaagcaatgatgacccacttgcacatgcgaccctcagagcccaaaccatctcccaaacctctaaatctggtgtctagtgtcaccatgtcgaagaatatgttggagacatccccacagagcttacctcaaacccctaccacaccaacggccccagtcaccccgattacccagggaccctcagtaatcaccccagccagtgtgcccaatgtgggagccatacgaaggcgacattcagacaaatacaacattcccatgtcatcagaaattgccccaaactatgaattttataaaaatgcagatgtcagacctccatttacttatgcaactctcataaggcaggctatcatggagtcatctgacaggcagttaacacttaatgaaatttacagctggtttacacggacatttgcttacttcaggcgtaatgcagcaacttggaagaatgcagtacgtcataatcttagcctgcacaagtgttttgttcgagtagaaaatgttaaaggagcagtatggactgtggatgaagtagaataccagaagcgaaggtcacaaaagataacaggaagtccaaccttagtaaaaaatatacctaccagtttaggctatggagcagctcttaatgccagtttgcaggctgccttggcagagagcagtttacctttgctaagtaatcctggactgataaataatgcatccagtggcctactgcaggccgtccacgaagacctcaatggttctctggatcacattgacagcaatggaaacagtagtccgggctgctcacctcagccgcacatacattcaatccacgtcaaggaagagccagtgattgcagaggatgaagactgcccaatgtccttagtgacaacagctaatcacagtccagaattagaagacgacagagagattgaagaagagcctttatctgaagatctggaatgagaactgacttgtgaaacctcagcgtgaagggacatatcactgaccttcataaccactccacaaccatgaatatttgacaaatttttactgtgactatttattaagcatggataaaggagacagccctaaaggaacttactaagccagccctttgggattcagtaccaacaggca

SEQ ID NO: 23621 - DNA, 4110 bp, Homo Sapiens
gtataacaagagggtcgggatgggcagcgtaggcctgtgaggcctgcgggtgcccctgtcccccagctccccccgcagccggctccgcagtggtccactccggttgccgggtgcggattcgggttccggaccgaaggctgtgtgttctccgccgtttattgtggccccgacaggccggggttactgtggcgaccacgagagcagctttggcgctatggaggagcccggggctacccctcaaccgtatttggggctgctcctggaggagctacgcagggttgtggcagcactgcctgaaggtatgagaccagattctaatctttatggttttccatgggaattggtgatatgtgcagctgttgttggattttttgctgttctcttttttttgtggagaagttttagatcggttaggagtcggctttatgtgggacgagagaaaaagcttgctctaatgctttctggactaattgaagaaaaaagtaaactacttgaaaaatttagccttgttcaaaaagagtatgaaggctatgaagtagagtcatctttaaaggatgccagctttgagaaggaggcaacagaagcacaaagtttggaggcaacctgtgaaaagctgaacaggtccaattctgaacttgaggatgaaatactctgtctagaaaaagagttaaaagaagagaaatccaaacattctgaacaagatgaattgatggcggatatttcaaaaaggatacagtctctagaagatgagtcaaaatccctcaaatcacaagtagctgaagccaaaatgaccttcaagatatttcaaatgaatgaagaacgactgaagatagcaataaaagatgctttgaatgaaaattctcaacttcaggaaagccagaaacagcttttgcaagaagctgaagtatggaaagaacaagtgagtgaacttaataaacagaaagtaacatttgaagactccaaagtacatgcagaacaagttctaaatgataaagaaagtcacatcaagactctgactgaacgcttgttaaagatgaaagattgggctgctatgcttggagaagacataacggatgatgataacttggaattagaaatgaacagtgaatcggaaaatggtgcttacttagataatcctccaaaaggagctttgaagaaactgattcatgctgctaagttaaatgcttctttaaaaaccttagaaggagaaagaaaccaaatttatattcagttgtctgaagttgataaaacaaaggaagagcttacagagcatattaaaaatcttcagactcaacaagcatctttgcagtcagaaaacacacattttgaaaatgagaatcagaagcttcaacagaaacttaaagtaatgactgaattatatcaagaaaatgaaatgaaactccacaggaaattaacagtagaggaaaattatcggttagagaaagaagagaaactttctaaagtagatgaaaagatcagccatgccactgaagagctggagacctatagaaagcgagccaaagatcttgaagaagaattggagagaactattcattcttatcaagggcagattatttcccatgagaaaaaagcacatgataattggttggcagctcggaatgctgaaagaaacctcaatgatttaaggaaagaaaatgctcacaacagacaaaaattaactgaaacagagcttaaatttgaacttttagaaaaagatccttatgcactcgatgttccaaatacagcatttggcagagagcattccccatatggtccctcaccattgggttggccttcatctgaaacaagagcttttctctctcctccaactttgttggagggtccactcagactctcacctttgcttccagggggaggaggaagaggctcacgaggcccagggaatcctctggaccatcagattaccaatgaaagaggagaatcaagctgtgataggttaaccgatcctcatagggctccctctgacactgggtctctgtcacctccatgggaccaggaccgtaggatgatgtttcctccgccaggacaatcatatcctgattcagcccttcctccacaaaggcaagacagattttgttctaattctggtagactgtctggaccagcagaactcagaagttttaatatgccttctttggataaaatggatgggtcaatgccttcagaaatggaatccagtagaaatgataccaaagatgatcttggtaatttaaatgtgcctgattcatctctccctgctgaaaatgaagccactggccctggctttgttcctccacctcttgctccaatcagaggtccattgtttccagtggatgcaagaggcccattcttgagaagaggacctcctttccccccacctcctccaggagccatgtttggagcttctcgagattattttccaccaggggatttcccaggtccaccacctgctccatttgcaagcgcacgctctccgcccggggcaggagccccggcttcaggtaggggcctaggagggccccagaaatgaagccgaagcattggcggatgagactaacgagatctgtgacgactcgtatctgttcaagtggaacagaagccagaaggccctacagtgccgggtagctggcggcgggtaatcaaattgaagccttggcctaactgtctcggaggctgccatcttgcttggtgctcaacggaagccgactttcaagccttattgtttaaggaatacattttataagactatagctaccatagatagtatttcatctgatggatttgggaaaagtaaagtgaaaacctcaaaaggattcacccttctagatgccattcagagtatttgtgattcatgggaggagattaaagtatcaacattaactggactttgtaaggagtggattccatgtttaaggagtccattccatggaatccatggaatgattttgaggggtctaagacatcaggggaagaggtcaccgcatatgtggtggaagtagcaagagaactagaatcagaagtggagcctgacaatgtgactaaagtgctgctgcaatctcatgataaaacttgaacaaatgaggaattgcttctatggatcagtaaaaaaagtgtgtttttgagatggaatttactcctggtgaagatgctgtgaacattgttgaaataacacaatacttcaaatattccatacacttagtagataaagctgccgcagagttcgagaggattgagtccaattttgaaagaagttctgtggggaaaaagctataaaacatcatggcatactacagagaaaatgtccacaaaaagaaggaatggatgcggcagatttcactgttgtctcatttaagaaattgccagagccacccagccttcatcaaccaccactgccatcagtcagcagctatcaacatggaggtgatatcctccaccaggaaaaagattatgactcgctgaaggctcagattattattagcattttttaccaatattttaaaagttaaggtctgtacattttttagacataatgctattgtacacctaatacatttcagtataaacataacttttatgtgcattgtgaaaccaaaaagtttgtgtgacttgctatattgcattattctctttattgtagtggtctggaactgaacctgcaatatctccaaggtagggctgtaccataatgccgagttcccccatctgctaatcatttattgccttatggaaaaacaattgttttcatcagaaattagaatttaactttggtcaatatacaaagctgttgataaagtaaggcatacccatgtagagtatttattgacagctatccaaacaatcttacattttttccttcatgtttttcttttcaaagaggcagttttattttgctgcattgttactgtaatttcaaactttatagtttaaacctgttttttcatgtctttccatatccctttaagtctttaattttatgtccttacctgatttccctctgaaaaatgttttccagagatgtagtgatattgtgatattaatgctaacccaaatgttaatatgccattcatttgagaaatatatttgagagtcttcaaaaaaaaaaaaaaaaaa

SEQ ID NO: 23622 - DNA, 3730 bp, Homo Sapiens
cgatcccgctgacccgaatcctggagtcagaggtttcctatccccctcaagcccccacaggagtcaccaacccagggccggcttatgggtgagggggcaccccctggggcctgagctgccccgcacaggatgccccgtgccccccacttcatgcccttgctgctactgctgctgctgctctcacttccccatactcaggccgcctttccccaggaccccctccctctgttgatctctgaccttcaaggtacttccccattatcctggtttcggggcctggaggatgatgctgtggctgcagaacttgggctggactttcagagattcctgaccttgaaccggaccttgctagtggctgcccgggatcacgttttctccttcgatcttcaagccgaagaagaaggggaggggctggtgcccaacaagtatctaacatggagaagccaagatgtggagaactgtgctgtacggggaaagctgacggatgagtgctacaactatattcgtgttcttgttccctgggactcccagacgctccttgcctgtggaacgaactcattcagccctgtgtgccgcagctatgggataacttcgctgcagcaggagggtgaggaactgagtgggcaggctcgatgcccctttgatgccacccagtccaacgtggccatctttgcagagggcagcctgtactcagccacagctgcggatttccaggccagtgatgctgtagtttacagaagccttgggccccagcccccactccgctccgccaagtatgactccaagtggctccgagagccacactttgtccaggccttggagcatggagaccatgtctacttcttcttccgcgaggtctctgtggaggatgctcggctggggagggtgcagttctcccgcgtagcccgagtatgtaaacgtgacatgggcggctcgcctcgggccttggaccgccactggacatccttcctgaagcttcggctcaactgctctgtccctggggactctactttctattttgatgttttacaggccttgactgggcctgtgaacctgcatggccgctctgctctctttggggtcttcaccacccagaccaatagcatccctggctctgccgtctgcgccttctacctggatgagattgagcgtgggtttgagggcaagttcaaggagcagaggagtctggatggggcctggactcctgtgtctgaggacagagttccctcacccaggccaggatcctgtgcaggagtagggggagctgccttgttctcctcttcccgagacctccctgatgatgtcctgaccttcatcaaggctcacccgctgctggaccccgctgtaccacctgtcacccatcagcctctactcactctcactagcagggccctactgacccaagtagctgtggatggcatggctggtccccacagtaacatcacagtcatgttccttggctccaatgatgggacagtgctgaaggtgctgcccccaggtgggcgatccgggggacctgagcccatcctcctggaagagattgatgcctacagccctgcccggtgcagtgggaagcggacagcccaaacagcacgacggatcatagggctggagctggacactgagggtcacaggctttttgtggctttttctggctgtattgtctacctccccctcagccggtgtgcccggcatggggcctgtcagaggagctgtttggcttctcaggacccatactgtggatggcatagctccaggggctgtgtggatatcaggggatctggtgggactgatgtggatcaggctgggaaccaggaatccatggagcatggtgactgccaagatggagctactgggagtcagtctggccctggggattctgcttatggcgtgcgccgggacctgcccccagcctcggcctcccgctccgtccccatcccactcctcctggccagtgtggccgcagcttttgccctgggcgcctcagtctctggcctcctggtctcctgtgcttgtcgccgcgcccaccgacgtcggggcaaggacatcgagactcccgggctcccgcgccctctctccctccgcagtttggcccggctccacggtgggggcccagagcccccgccgccctccaaggacggggacgcggtgcagacgccgcagctctacaccaccttcctgccgcctccggagggcgtgcccccgccggagctggcctgcctgcccacccccgagtccacgccggagctgccggtcaagcacctccgcgccgccggggacccctgggagtggaaccagaacaggaacaacgccaaggagggtccgggccgctcacggggcgggcacgcggcgggcgggcccgcgccccgcgtgctggtgaggccaccgccgcccggctgtcccgggcaggccgtggaagtcaccaccctggaggaactgctgcgctacctgcacggcccgcagccgcccagaaagggggccgagccccccgcccctttaacctcgcgggcgctcccgccggagcccgcccccgccctcttgggcggccccagccccaggccccacgagtgcgcctcgccgctgaggctggacgtgccccccgagggcaggtgcgcctctgcccccgcccggcccgcgctctccgcccccgctccccggctgggcgtcggcggaggccggaggttgcctttctccggccaccgggccccccctgccctgctcactcgagtcccctcgggaggtccctccaggtactccgggggtcccgggaagcacctcctgtacctgggccggcccgagggctaccggggccgcgccctgaaaagggtggacgtcgagaagccccagttgtccctgaagcctcccctcgtcgggccctcctcccgccaggccgtcccgaacggcggccgtttcaacttttaaagggagcggtccacggcctccagcgtggggagcgcccgagtcctctcggccacgagctggacgctcttcaggacgtttcaccgccccctcgccccgcacctccagccttcccgactcgcagagtctcccgaggccccttttcgcctcgggtttatttattgactgtctttccccctgtcctcgacagaagagtgggaggtgagaagcccgtctcctcagtgagccagcatttcagggggagctggcggactcccactccccgctcccttccagccaagctgccttaactcgcccctcggggctcccccagagactgtgccccgggcgggccgcgcgcgctgtgtccagagtcctcgggcctcctgggtctgggacgtgcctctcctactgtgtaggagcctccgcttcccaatacagccgtgtctgcagccactgcctgacttcactcgggcgggggagggcggcagtcggtcggctcgctctgggcgccctcgctctctgccttcatctgggccctgggctctcccgggtaatgggatggctgcggtcccgccggggggcagtctggaaaggtttcctaaaggagacgagcgaattaacggtgtcgaggtgagccagggccagggggaccccggtaaagtttagttgaggctggggaaggccctcggagctcgtttccagatcgaggtaagagggactttcttaaaggcctagtctatgggatggggcggcggagggaattttttgagaaataaaatgaagctgcagtgtacgttacttgaagttccacatcagaaaaaaaaaaaaa

SEQ ID NO: 23623 - DNA, 2069 bp, Homo Sapiens
aaatttttttaatgccaattattagagcttctggggaaaaagtatagttcacggaaataaaactatgttctttcagggttgggtggataggtggctgctagggtgtctggctcctggcggctttgccatccatgaggcaagggctgggaacacagtgtctttgcctatggtagatccatgtgaatgtcaggaagccagctcttcagtcttggagatgatttctgctacaattctgtagaaagattaaggatggcagagtaaaaggttaccaagaatgccaggatgtttttcttgggcgtaggaggtccagattactttcctttttgatgaaagagtttggaagactgtcccatctctctggcttgagaaatctctgccattttaaacatcactgtgaaatagcaattattatcatctgtatttagttttaacattacccacaacatagaaataataggtaaaaatcgtcttgcctactcattccaaagatgatcaagtcattaatctagcaaagtattcatgtatcagattttgtatattttgaatcaaagctaactaggaatgttagatataagaatgtaatgatattcatgcactgaattctaagccaatatgaacaaaaatgctgcatgaatggcacatataggtcaccaaagttcattcacaggtagaaaaaacttgtgctttcttttccatctaaaaacaaaaggagactttctttatctcatttaaagaacagctctttgaaattgaaattgaccctttttgcttgaccttaaggagattagcttccagtagatgagtttgcaaaatacttttcctgttcttttgttttgctggtattgaaaacatcccactaaatcagatgaagaggcatgggaggaaaaatatccaaattaattactaaaatcgagaagagaaggcaaactcttgaaaagtaaaaaggtgtttgtgaccttcagtatttattgaacagaggaaataactgacaagggcaatacaattcaatgttcatgtagtaacattcatgtcacttgttgaatttggttctcatatgtatattgcatacacataaattcaaactataagtcgtcatttttgagccatcatcttacattcatgtaatgaaattatggaagagagtaaaaactagctcttaacttagtaaatataatatggtatttaaaatcaggtcactacagtaaggttctaagtattgccaattgaaaagctagaaatggtattactgttgcaaagtgttgtcaataattgactccaatagcattgtaaatacttgtatcccacaactattttaaacccaagcaataaaatggattttctaattcacttcaattctttatttctcttacctatctatgtcttggtacataagaaaagtgtttccatcactgcattggtagaattatttcagtgttattatttttgtgatttcgtatgtctacacaaaaatgaattagtttaatttatattgtgatacagttgtttgagaaatatttttaattctgtttcaactttatttctccaagtgtataatataaaaattacttctgttattgttctctaccaataggggaaaaaattaaaacattagatccattgagaaagagatgatgtaataaataattaagattagtaataatattatcaggggtgattatgaccagttgaataatctctttcccttgaattatttagctaacaaattaactctcccaaatatttaaaataatgtaaaatcatattttactgcccattattaactaaaatatttttgtttgactttgagcaccaactggtaatactaataaatacccatgtcatgcagatggctgggcgaataagagatgtctaaaaatatgcactggtcttggaaaacatggcacaagtaaggatatcatatatgatgtctgtttattttatgtctgatttcttttgaatgagtagttggggactccatttctaaggagactaggtaaataaaatgacctttgacatttcaaaaaaaaaaaaaaaaaaaaaaaaaaaaaaaaaaaaaaaaaaaaaaaaaa

SEQ ID NO: 23624 - DNA, 1560 bp, Homo Sapiens
ggccaagaattcggcacgagtaaataccccatggtgtgtggttctggcactgaaatggggctgtttcctaaggctctgtccatggccacctctgtctatttctgcattctgtcttgcattgcttctgttgcctatatcctggtcagcacagtttatggtgaatcattgcttattgaaatagagacggcaataatgaagccagctattataaattagagcaaatatacacatccaatacgttttaaacgcatgtgatctctggagtagtatcactaggtagcttccatttcagttcgcctttggtatattactgtactccaaagaatatcatttttccctctgtaaaattttcctcatgaaaatggtcaccataggtctgatttactttttggatcagtaacaggtcacagcataaatcccattcctgcatcaaggcggaacaagaccctcacactttggagggagctgagttcctgtttagaagaacatgcacagttagataaatctgttcacacggcttagatgatcagagccaacatctgatgactatgagcaaggcacttttctaaacatttttagtattttctgaacagttttgttgaggtatactttacagataacattcacctcttgagctgcagttcaatgagttctcgtaaactgagttgtgcagccatcaccacgttccagttttagcacatttccatcaccccaaaagttcctttctgcctgtttgcagccaatccctgctccctggccagccacaggcaagcgctgtcaatgtttggacagtgttggattacctaatggactcttcaagacagtcctttggggtgttactgtcattctctgttttacacggtgaagaagtgaggcactgagggcactcagggtggtttcaaatgaccgaggccaggtgctcagggcccagaaccctcttaccccctccaacttcagtgagcttcaaaatcacctgctgagcttgtttgaccacagacttgtgggctccacccttgaattcctgacgccctaggtctgggatggggcttgacaatttgcatttgtaaaaagttcctgaatgctgctgctgctgctggtcagggaaccctgctttaagacctcctggtttatgcaatttcaaacattgtaagaaatagtcactcatgtgattggtttgtgtgcttggtgtagactgtacgaggatttttcaaaagtaagtattgttcattctaaaggaaggaaatgtatgttatgagatagaattatataataaacagaaccattaaatgccatctgaaaagtggtgttttcaatggcaggaagtagcattgctgcgtattttgtgtgtgtgcgcaactcagctttgtgtcattgtgtaactttaatttgaaagaacatcacggtgactgctgttttcatttctgccttttaaaaagcagacagctattcagaacagcaagaagcagacccaaactttgtttgtatgcccctagtcataggcaaaaatggaaagggtaatttcccaaaaaaaaaaaaaaaaaaaaaaaaaaaaaaaaaaaa

SEQ ID NO: 23625 - DNA, 1516 bp, Homo Sapiens
aagaattcggcacgaggtgaccataaatatttttattaaatgtgaaaatacacgggcataaaaatagtacccatatttgtagacatgtctgagacccatttcaaatattaggttccttttttattaaaacactacattgagatggattaagttacttagtcttttctcattcaaaacaaactaaaacctcacagcaagagtaatattttcacaaacatctccaatgtttacctcctccttgctcggctttccactgcaggtaagtgtttcagccacagacaagtgcaacaaaaccggttactatacacaaagccacgcagtggctaattttactcttaaatcaatcattcagcaaatgagatcatctgtaaacaaacaaaaaaaacccccaaataatcccacctcttaacgtcatttgaaattacaggataaactgccactaacaaaaaaggaatgatctgatttagaaaaaggatattcgttgttggcaaattaacatttgccttcttccttcctttataaatttggaaaagtcaactacattcaacaaagttgcgtgaacttctctaggtgataccattgctgtgtgctcagtgaaaactttgcaacgcccatcaccagggccgtgtctgtaacctcaccagggagccattttatgtagttttttcatggtaaatgtcaaagacaacttctgacccatttaaaggtgaaatttttcatcatccattgtgagtagaaaatggtatcaatttcaaattgtggttttattggctaccttttttaccaagttatgttttctcttaaactgtgggtagttttaaaattccattatcagggcaacaaaaatttgttttcataccaatactttaaaaaagatttttaatactgactaaagagaaaggcattgtagaattagtagtacgttacatctgattcacattagtaaactgtcaagatttttttcaagttttcatctattcatggtaagaaagcacaaactttcagaactgaggaatgaattaaattttgtctcccgttttggaaccttttcacaatgcttctagactgatgtgtctaatacttcctgctgggcaaaatatccacaaagtacagaccactgataactccacccatgaagctcaccaaaaaggaaagaagagcagaatacaacagctgtggctagggtacgcctctctgatttcacttttcctgaaagagccataaaggttacctgatggccaggcgcagtggctcacgcctgtaatcccaacactttggaaggccaaggcgggcagatcacaaggtcaggagatcaagaccatcctggctaacacagtgaaaccccatttctactaaaaatacaaaaattagccaggcatggtggtgcgtgcctatagtcccagctacttggaggctgaggcaggagaactgcttgaacccgggaggtgtccctgcactccagcctgggcaacagagcaagattctgtctcaaaaaaaaaaaaaaaaaaaaaaaaaa

SEQ ID NO: 23626 - DNA, 2022 bp, Homo Sapiens
ccacgcgtccgaaagttgaaaaaaactgatgacagacaacaagcatgaagatggcatatttgatgtcactttggttctttttcccagaaggcttatacagtgactcagtcgggaagctttccagcttccagcccttgaatgtgaagtgtcattggcatgtctggcagtagtctctcattcactcctcaataaacaacattgaatacaaaagaggcttgtgtaaaaactcagtactgtctggcttggattcatttcatgtttttaatattagatcattcttatatttttttaaagtaatagctatcagtaatagctgagtgttttttcccctaatattttccttgtgcaattcagacttaagcatcgagtttttaccatcttccactttaagctaagttatgatacctattccattcacaattggtgttctttttaaggtttgcaaatttcagccaattttgtagctaagattgttctgatcagctcaaaaagatttggcttagtgttttcattgcaaattataattgctgtagagccacacacaacttttgaacttttaattataagtgttatggctaaagttatttactgaaaatttcagtaaaatgtgtgaatgtttctttatgtattaacctcatagcagtaaatgacttgctgttgtttaatttttctaaggcatcttaatagacttctgttgaaaacttcagtgttaacatttttatagtttgtactaaatttaaccgtgatataaaaatgaattttatgcatagatcagaattttaaattaaaggttttttctttaaatgatttgtattactttattaaaactaaatctgaaatggaatagaaaatagaatggattacatacagatggtttccttgttagcagatgcccttcaaatatattttacgtttgcagcacaacaccattgcccggaggcttccgaatctagcaaagcagcatattaaatgactccacctgcgcagtccttgtgttcagtggatgaatacctgtgggctcttgtaatgtgtggtaatatttggagctttatagcctgtattccttgggagaaaaaaatgggaattggagtaaaaagtgtgtcaagacaacccctttctgctttcttatgtagcatctgcaaagccgattcatgtactgatgccaatcagctagagcaatgtaggctttttttaatttaaattattactacactttattactacacttgcagaaaagaaacatgttaaaatcatggcacacctgcagaatttcagatgacagtgtggtcagaagatgttttttgggagaacctagtgtttgctgggcactatgctaagcactttgggagcaagaacctcctaccttccagtttaaacactagtggtattgtcagatgccgttagtatctgagatgtacttacggcagggttctaagagctctgaaagaagcgctctgttagatgcagactggcagcatcctccttgataaaagcagaaaagcaaagaggtaattggagttgaatcaagttaatagggaaggttggtagtaaatgctgttagtgtgacatgattctgaaacccagagctcagaactaactgtgagatgtaccatgaactaacaattctttgaaaggacctgcagaagcatttttaatacctcattctgtctatgcaagatgaaaatccatggagttttttcttggcttttgtaccaaatttaggggtcttgcatgtcagcaagtgatatatattgtttataaatgcaagctatttctggaggggaaaaatgtgtgtggctcttacgttttctgggaattttgtaacaagttacacgcacaagtgttagaaactttggcataactcaatttggagtattttttaaatgctgtatctttaaagaaaagtaaaattgtcttaaatctaattgacacttctgtaatgagaggcaaccttataactctggagttgtagtttgacagaaccatcagtaaagacataagcaaataaaaaaaaaaaaaaaa

SEQ ID NO: 23627 - DNA, 235 bp, Homo Sapiens
gtgaacaccttacagctttcattttgctttaatgtttcaattcaagccggtgtaaaaataatttccaaggcatttctgtttattctttagtaatctcactactggctatgtcagcaatatctttttcaatctggttccttttgtatatgatgtcactgtgacctctttgaaatatagtgatggcttttacctactttgaaaagaattttcacatagagtcagaaaaaaaaaaaaa

SEQ ID NO: 23628 - DNA, 2831 bp, Homo Sapiens
ggcacgagcgggagttggaggcgataacgatttgtgttgtgagaggcgcaacgtgcgatttctgctgaacttggaggcatttctacgacttttctctcagctgaggcttttcctccgaccctgatgctcttcaattcggtgctccgccagccccagcttggcgtcctgagaaatggatggtcttcacaataccctcttcaatcccttctgactggttatcagtgcagtggtaatgatgaacacacttcttatggagaaacaggagtcccagttcctccttttggatgtaccttctcttctgctcccaatatggaacatgtactagcagttgccaatgaagaaggctttgttcgattgtataacacagaatcacaaagtttcagaaagaagtgcttcaaagaatggatggctcactggaatgccgtctttgacctggcctgggttcctggtgaacttaaacttgttacagcagcaggtgatcaaacagccaaattttgggacgtaaaagctggtgagctgattggaacatgcaaaggtcatcaatgcagcctcaagtcagttgccttttctaagtttgagaaagctgtattctgtacgggtggaagagatggcaacattatggtctgggataccaggtgcaacaaaaaagatgggttttataggcaagtgaatcaaatcagtggagctcacaatacctcagacaagcaaaccccttcaaaacccaagaagaaacagaattcaaaaggacttgctccttctgtggatttccagcaaagtgttactgtggtcctctttcaagacgagaataccttagtctcagcaggagctgtggatgggataatcaaagtatgggatttacgtaagaattatactgcttatcgacaagaacccatagcatccaagtctttcctgtacccaggtagcagcactcgaaaacttggatattcaagtctgattttggattccactggctctactttatttgctaattgcacagacgataacatctacatgtttaatatgactgggttgaagacttctccagtggctattttcaatggacaccagaactctaccttttatgtaaaatccagccttagtccagatgaccagtttttagtcagtggctcaagtgatgaagctgcctacatatggaaggtctccacaccctggcaacctcctactgtgctcctgggtcattctcaagaggtcacgtctgtgtgctggtgtccatctgacttcacaaagattgctacctgttctgatgacaatacactaaaaatctggcgcttgaatagaggcttagaggagaaaccaggaggtgataaactttccacggtgggttgggcctctcagaagaaaaaagagtcaagacctggcctagtaacagtaacgagtagccagagtactcctgccaaagcccccagggtaaagtgcaatccatccaattcttccccgtcatccgcagcttgtgccccaagctgtgctggagacctccctcttccttcaaatactcctacgttctctattaaaacctctcctgccaaggcccggtctcccatcaacagaagaggctctgtctcctccgtctctcccaagccaccttcatctttcaagatgtcgattagaaactgggtgacccgaacaccttcctcatcaccacccatcactccacctgcttcggagaccaagatcatgtctccgagaaaagcccttattcctgtgagccagaagtcatcccaagcagaggcttgctctgagtctagaaatagagtaaagaggaggctagactcaagctgtctggagagtgtgaaacaaaagtgtgtgaagagttgtaactgtgtgactgagcttgatggccaagttgaaaatcttcatttggatctgtgctgccttgctggtaaccaggaagaccttagtaaggactctctaggtcctaccaaatcaagcaaaattgaaggagctggtaccagtatctcagagcctccgtctcctatcagtccgtatgcttcagaaagctgtggaacgctacctcttcctttgagaccttgtggagaagggtctgaaatggtaggcaaagagaatagttccccagagaataaaaactggttgttggccatggcagccaaacggaaggctgagaatccatctccacgaagtccgtcatcccagacacccaattccaggagacagagcggaaagacattgccaagcccggtcaccatcacgcccagctccatgaggaaaatctgcacatacttccatagaaagtcccaggaggacttctgtggtcctgaacactcaacagaattatagattctaatctgagtgagttactgagctttggtccactaaaacaagctgagctttggtccactaaaacaagatgaaaaatacaagagtgactctataactctggtctttaagaaagctgccttttcatttttagacaaaatcttttcaacgctgaaatgtacctaatctggttctactaccataatgtatatgcagcttcccgaggatgaatgctgtgtttaaatttcataaagtaaatttgtcactctagcattttgaatgaatagtcttcactttttaaattattcatcttctctataataatgacatcccagttcatggaggcaaaaaacaagtttcttgttatcctgaaactttctatgctcagtggaaagtatctgccagccacagcatgaggcctgtgaaggctgactgagaaatcctctgctgaagacccctggttctgttctgcctccaacatgtataattttatttgaaatacataatcttttcactatgaaaaaaaaaaaaaaaaa

SEQ ID NO: 23629 - DNA, 14248 bp, Homo Sapiens
tgcaacggaaacttttagctccacgaacagaaaagcaagagcaaaaactcagttaaatgcgttcttcctccatctttgcctagtccaaaaggaaaaaaaaaaaaaaagaaacagaaaaaagaaaaactgtttggaagagtagcgttgaggtttgctttttacctgtttttcctctagaacagccaggtggattcacatgatccaattttttaattgtcttctatgtcccactccgaataacccggatgccccagcacaatcagagagatcgttttttttaaaaaaaatttcagcctccaaaggtaggaggggagtgttaggggagaaagtactttaattaaaaatcaataactcgaggtttttgggatacggtttgccatttcctaattaagaaatgggtttgacagtccctttgtacacactgctatgcaaaccccaaagggttggcggctgtccgggcgatgacactccggtcccctgcgagaccccgggccagccaggcccctccgccgccggcctctggggtccgtccccggaagcaaggctcgcgcagacctctcgcttctctcggctctgtctcctgcgctcagctctgctcggggccggccgcctcaggctcgccgccaccaggtcgttgcaaataccttttccctccccggggccccagcgcgcggccacctcccagcctccccccctcccaccctggcagcggggccctttcccggctcaggaacagcagcagcccgggccgcgccggcaggaagcgaggcccatgttgctgctgttccctggcgcgcctccccgccctccgggggccgccacggctcttccgcgctcccgggcacccccctccgcgcctgcgctgtgccccacgggggcggggctcagattcctgtcagcggcggcggcggtggcggcgaccgtcagttttcgctgaggagaaacacgaaacggaccctttggctctcccccttccccttccccgtcctgaacccctctcctggtcaccgagaatcagtccccgtggagttccccctccacctcgccatcgtttcctcggtcctcggcccagtggaagtcactaccctcgaggaggaggcagcggcagccgccctcgcgtcgccgcccccggttcggtgcccgcggtcccggagaggaggtgccgccgccaccgccgctccccccctcccgctgccctcgggccgggctgggtcgagctgcgatgccctcggacttcatctcattgctcagcgcggacctagacctggaatcgcccaagtccctctactcgcgagattctctgaagttacacccatcacagaattttcatagagctggactattggaagaatctgtctatgatcttctcccaaaggagttacagttacctccatctagagaaacatctgtagcatcaatgagtcagacaagcggtggtgaggcaggctcgcctcctccagctgttgttgctgctggatttgcctctgaagcagggagtgtctgcattaaaaatgacctgtagttctctgcttcatagatgcttcttcagctccctcctcttcctccatgggcggtgcttgcagctcctttaccacctcttccagccctaccatttattctacctcagtcaccgacagcaaggctatgcaagtggagagctgctcctcagccgtgggggtaagtaacagaggggtaagtgaaaagcagttaaccagtaacacagttcagcagcatccatcaacaccgaagaggcacacagtcttgtacatctcaccaccacctgaggacttgctggataacagtcggatgtcctgccaggatgaggggtgtggattggaatctgagcagagctgcagtatgtggatggaggattccccctccaacttcagtaacatgagcaccagttcctacaatgataacactgaggtacctcgtaaatcacgaaaacgaaatccaaagcagaggccgggggtcaaacgacgagattgtgaagaatctaatatggatatatttgatgccgacagtgccaaagcacctcactatgtgctttctcagcttaccacggacaacaaaggcaactcaaaagcgggaaatggaacattggaaaaccaaaaaggaactggagtaaagaagagccctatgttgtgtggacaatatcctgttaaaagtgagggaaaggagctgaagatagttgtacaacctgagacacagcaccgagctcggtacctgactgagggcagccgtggctcagtgaaagatagaacacagcaaggctttcctacagtaaagctggaaggccataatgaacctgtagtgttgcaagtgtttgtgggcaacgactctggacgagtgaaaccacatggattttatcaggcctgcagagtaactggacgaaatacaactccttgcaaagaagtggacattgaaggcactactgttatagaagtcggccttgatcctagcaacaacatgacactggcggtggactgcgtagggatattgaaattgaggaatgctgatgtcgaagccagaataggaattgctggttccaagaagaaaagcactcgtgccagattggtttttcgagttaatatcatgaggaaagatggctccactttgacactgcaaacaccctcttctccaattttgtgtactcagccagcaggagtgccagaaatcttaaagaaaagcttgcatagctgttcagtgaaaggagaagaagaagtgtttttaatcggcaagaactttctgaaaggaactaaagttattttccaagaaaatgtttctgatgaaaactcttggaagtcagaagctgaaattgatatggaactatttcatcagaatcatcttattgtgaaggttcctccctatcatgaccaacatataactttgcctgtgtcagtgggaatatatgtagtgacaaatgctggaagatctcatgatgttcaaccattcacttacactccagacccagcagcagctggtgctttgaatgtaaatgtgaagaaggaaatatctagtccagcaagaccttgctcttttgaagaggccatgaaagcaatgaaaactactggatgtaatttagataaggtaaatattatccctaatgccctgatgactccactcataccaagcagtatgattaagagtgaagatgttactccaatggaggtaacagcagaaaaaagatcttccactatttttaagactacaaagtctgttggatcaactcagcaaacattagaaaacatctcaaacatagcaggaaatggctctttttcatcaccatcatcttcccacctaccttctgaaaatgaaaaacagcagcagattcacgccaaggcatacaacccagagaccctgacaactattcaaacccaggacatctcacagcctggtacttttccagcagtttctgcttctagtcagctgcccaacagcgatgcactattgcagcaggctacacagtttcagacaagagaaactcagtctagagagatattacagtcagatggtacagtggttaatttgtcacaactgactgaggcatcacaacaacagcagcagtcaccactacaagaacaagcacagactttacagcagcagatttcatcaaatatttttccatcaccaaatagtgtgagtcagcttcagaatactattcagcagctgcaagcagggagtttcacaggcagtactgctagtggcagcagtggaagtgttgacttggtccaacaagttttagaggcacagcagcagttatcttcagttttattttctgctccagatggtaatgagaatgttcaagagcagcttagtgcagatatttttcaacaagtcagtcaaattcagagtggtgtaagccctggaatgttttcctcaacagagccaacagtccataccagaccagataatttattacctggaagagctgaaagtgttcatccacagtctgaaaacacgttatctaatcaacagcagcagcagcagcagcaacagcaagtgatggaatcttcagccgcaatggtgatggagatgcaacagagtatctgccaggcagctgcccagattcagtcagagttattcccttcaactgcttcagcaaatggaaaccttcagcaatcgccagtttaccagcagacttctcacatgatgagtgcattgtctaccaatgaggatatgcaaatgcagtgtgaattgttttcttctcctcctgcagtttctggaaatgaaacttctacaactaccacacagcaggttgcaacccctggcactaccatgtttcagacatcaagttcaggagatggagaagaaactggaacacaagcaaaacagattcagaacagtgtctttcagaccatggtccaaatgcaacatagtggggacaatcaacctcaagttaaccttttttcatccacaaaaagtatgatgagtgttcagaatagtggtacccaacaacaaggtaatggtttattccagcaagggaatgagatgatgtcacttcaatctggaaattttttgcagcagtcttctcattcacaggcccaactttttcatcctcaaaatcctattgccgatgctcagaacctttcccaggaaactcaaggttctctctttcatagtccaaatcctattgtccacagtcagacttctacaacctcctctgaacaaatgcagcctccaatgtttcactctcaaagtaccattgctgtgttacagggctcttcagttcctcaagaccagcagtcaaccaacatatttctttcccagagtcccatgaataatcttcagactaacacagtagcccaagaagcattttttgcagcaccgaactcaatttctccacttcagtcaacatcaaacagtgaacaacaagctgctttccaacagcaagctccaatatcacacatccagactcctatgctttcccaagaacaggcacaacccccgcagcagggtttatttcagcctcaggtggccctgggctcccttccacctaatccaatgcctcaaagccaacaaggaaccatgttccagtcacagcactcaatagttgccatgcagagtaactctccatcccaggaacagcagcagcagcagcaacagcagcagcaacagcagcagcaacaacaacagagcattttattcagtaatcagaataccatggctacaatggcgtctccaaagcaaccaccaccaaacatgatattcaacccaaatcaaaatccaatggctaatcaggagcaacagaaccagtcaatttttcaccaacaaagtaacatggccccaatgaatcaagagcaacagcccatgcaatttcagagtcagtccacagtttcctcacttcagaacccaggtcctacccagtcggaatcatcacagacccccttgttccatagctctcctcagattcagttggtacaagggtcacctagttctcaagagcagcaagtaactctcttcttatctccagcatccatgtctgccttgcagaccagtataaatcaacaagatatgcaacagtctcctctttattcccctcagaacaacatgcctggaattcaaggagccacatcttcgcctcaaccacaggctactttatttcacaacacagcaggaggcacaatgaaccaactgcagaattctcctggctcatctcagcagacatcaggaatgttcttatttggcattcaaaataactgtagtcagcttttaacctctggaccagctacattgcctgatcagttgatggccataagtcagccaggccaaccacaaaacgagggccagccacctgtgacaacacttctttctcagcaaatgccagagaattctccactggcatcctctataaacaccaaccagaacatcgaaaagattgatttgcttgtttcattgcaaaaccaagggaacaacttgactggctccttttaactggatataaattccacgaagaaaatcctgattccaagatgtcctgagatcttgtggttccatgagaattattactttaaaaacaaaacaaaatataaaaaactgtgtttgagtaaactgatagattttactctgactgcaaaagagcacacctatgctgcttgttgcagtgactaaccaccaatgttaacatcttcatattttatattcctaataacagtgatgactgagaatctatttgagtttccagctggcagaattaattgttattattttcctaggcgcaatttccttaaacgtacagtttaaattcaaggctggaccactcagttattattgctattagaaaataatatatcatgtttacttttgttcttcattattttctttcctgcattgttttagtcaagtaatggcttttgaaaaagtaaagttcaataataactaaggctgtgatttttttcaatataaaaggcacagctgttggccaaagtgaaggaatcttttttcagttttattggagaaactgaagggtaacattctaacaagtaaactgtatgtgcagatagaagtactcttgatttaacacaaaggcagatgatacacttataaaactgggaacagctggaatgcttcttgattttattttttcagagagttgttagttctctgggtttctactaaggggtttagccataactgtgcatagaaaaataattatctgtaaaaaatgaaggggataatatatgataaattatgttctgatatcctcctacagtagtttaaattgacagaaaaatttgaatgttttcttcttaacccagtcttaggctggtattccctttttatatatatctatattacttttcacctctttttcactttactttagagaactattaatatactactggcttcatgaccctgtagcatctttggccactttaatctagggtgacctagcaatcctgcagcacagggcagagagtactgtcttaggaattattaggagttgattcctgagaaacaacacatttttccccatgaacggtgctgttctgaagtcttcaaatttttccctctaataggaaacagtataaattttaattaaaaaaaaaaggcaaactaaaatttcttgaaatatcacttctccctgatctgcagtgagtataaattcacttgtcacctcagtgctttacagtttgaagtggtcacttacctgatggttcccacaagccttaggctttacagggttgtatcattgacttaaaatgaagaattaacttgtgttacatctataaagagcaaaataacacactccagaacttggcagttgtagcattagttatacagttttgggtgttcttgccacccgtgggatgcctgcttctcactaccacctgtgtctggacacatgcttatgtctcattttccttttggcatgtggaaagctgtcaatgcagtgtaaggccaacgtgtgtgtggcttctatgtgttgagataatgttttggtatccttgtccgtttcatttattttttaagtgtacaaaaaataacctgttaattgttgaaggctacttttctgttcttttttttttttttttctatcctgtacatttagttgaactgtgcggaattgtggtgttggttttgtttacacagccagatttttccttctttttgttttgggatgatcttcctttgttctttgaatgggctcttttgctttttctcttttttctcatgttttcttccctccacctccacccctttctttctttctctctctgattgagaggcattgaattacgttttcagtagtacaggcttcttgccgatatgaagggaacttttcagaaagagacctactctgggtcatttaattttgaatacagttttcaatcgttcaagttttggatggtttatatctaatgtgtgtttcatttttttggaaagctatattttgtatttaggaaatggtatactattttgctatttgtactgagtgagtacattggcataaatatagaaatttatatatatacatatatataaactattcttttttgccacacatttttgtggtaaatttgtgagtttgtctgatgttctaccacaacgtggcgtctgataacagtgagggggggtggggtttgttatgtctttattgagtatttaagtatcttttgaaacaaatgacctgttcatctgtggccattccatcaggcagttagttccttgatgtcagtagtgggctaaaggcagcttactgtgtgtttgctggagctttcactcagccaagtgttagggtcaggaaacccattgaggcaatggcgtcaaatggtgtttcacaagaatgagccattcagtctttgctcactatatatttaatattttattattgttgttattgttattattaattggcctttctgtattctatgccttttatttataaagacactaagaaaacccatgtttgtaattttaataacatttttcccatcttgtaatatccagagctactttataaattctctgaaccaaaagtattttcctcagtgtatctcttctcccccagcccctattgggaaaaattacccagtatagttcaggttatgaggaggatcagccacacaatccagtgcttcagtttgaaaatgtaaaattctaaccctaaagtagggttggttgaaatttcagacaaagcaaacccagcaggtataaaaagtagtataaatacaaatctgtaagttatttttgaattttctgaacttttttctaagagattacataggagactaaagaaatctatctgttcaagttctaattaggatgattgttaatactgcactgtggatgaagtggcgactggcttgtgtgctgacttctgtggtttagcaagaggtttattgttatcaaatgctaattggcaatgccaagtcactgggaccaattttctgttttataatatctaagtttagaacagaatatatacctgaactgtagtggtttgatcggatggagacagaaaacccgatttttattctcataaattttgtggttatttatacaagggctgtgctatgctaccatattcttgttcaataataataggtttgttgttttttttacattgttaaatgttccttacccctaaaggtcaatgttaagtacaacattctgaaaatacaatttggctacaaagagtattcatcttctttgaagctcagtggttgatatttgtgctaataatgcaatttcctgattactgttacaagttatagctacatatgggagagactcaggtgagccagcaaaggccatagaaacaacaatttattaaatgtatttatggcagaaggacctaaataaactgtgagccaccttttcttctttatattgttacatttaagtgttctcgtttcaagcaactcacattaatgcttggagcttatctctttctctctctctctctctctctgtgtgtgtgtgtgtatgtgtgtgtgtgtgtgtgtgtgtttccttattgtcattccattatatatccacaccaacatgggtgacgataattcaaagtcatattttgcctctaagcttgatcatgttacctttatgattaaagtatcatgttatttagccaatgcaaatctgttttaaaacaaatagtttaaaaaaagaacaagtttttaagggctttattatagaagaagtattaatgaaggactttccttcctccctccctttcctcccctccctgcctcccttcttcccttccatctccccctcctccctgccttctttgtttctccttcccttattcctccctccctcctttctcccttccttcctttcttccattcatccttccttgccttttatttttattttttgtaatatcacatgtgctgtagtttggaattttattctagtgcatttcttgctcatcagaacctcagctaatctacctaggaaaaatagtatcaaaggaaatgagaaagttgtatctgagtccctccagaactaagataattctttttgaccatttaagcctttataaatgcgttttgaccatttaagcctttataaatgcttgttttaggaaagtgaatctgttagatgcatcaacaaataatgaccaggacaaaacgatttaataattaaagtctcaaatcaccatggttatacattttcaccagaaatagtaatcttacaatttttcatttttctgatgaagatttctgttacaatatctgtttcctaatagattttttaaattaattagctttcctctgctttatgaccataggttttatccctaaccgagacagctgtcttatatctgcatgccttagactgtgtggagggactccatgaagaaagaccataggttagaaaaataactcatagtatataccctagtaagtgggttagtagaatctcataacatgtattaaaaagaggttttcttctctgcttgtttgtgtcactagagcaaaattgtagagataatgctcataatgcagtaaatatcagaataatatctacaatatcatttgtggatggtcccaggtcccagtgctctagttactttacttcttttttttttttgagatggagtcttgctctgtctctcaggctagagcagtgtgcgatctcagctcactgcagcctccacctcccaggttcaagcgattctcctgcctcagcctcccaagtagccaggattacaggcaccctccactaggcccggctaattttttttgtatttttttagtagagatggggttttgccatgttggccaggctggtttcgaactcctaacctccagtgatccacctgcctcggcgtcccaaagtgctaggattacaggcatgagccaccacatccggtctaattacttctttaatccccatttatttttatgccattctagcctcatttattaataaaattatgtttttactttctctttcaggaaattttttaaattaatattttatatctagatcaaatgctatggaaaagtgcctttttatcatttataatttcatttttcactatttccaaaaacacataaacaaatagtttcagtaggtcccagcttttactttttccatttaaaccttcttttctccatttcttccctttggcttaagaataaaagaaaaggtacattgctagaattgtttctttgggagagggtaaaagattacagaattagactgttcagcctttatataaactaaatttgtcttcatctcaaccagctaatggtaggtcttatctgaatactcatgagaattttagcatctgtgaaactccatgcaccagatgtgtgtaaatttcaggaagaaagtgttgaaagcattttctctgatgttaattagatggaaataaatcactaaaacatagtttaggtaaagcctgattatgccacttttttttaactagacagggcaaagttgtttatgttagtgtacttcttgtctatcctcagttaatttacctagacaaaaagtgtcaaaggaaatgagaaaaaggttatatctgactccctccagacctaagataattccttttgatcagatacagtcagatggagtgccttggtttttgttaattttgcctctattccagctccttaccacagcggtggtgcttaaagaaaggatcatcagcaacaggtcaggatagttctacctttgggatagggctgctttccccgtgctagtatttctgtgactgttagtggcactgaggactgcaaacttttatgcaatattcttaataccctattgatattatgcactttaatcattccaaagaagccaagaatgctgtatagtgatgattccttcctaatgaattcatcttaactatttagaatgttatgtcccttttcttttggatagccaacttggtataaatgttatatggatttttctaaaatgactatataggacttaagactttgaaatgtaatttacttataaggggaaataattatgctttagcacatcattttagaaacgtcacattttagaacattcagcttgctaacctacatgtttgggaattcatttaaaaccaagtgtctatatattttgtgccatgtatataagaacattacaatatatctttttctacatatgtagtatgtgcaaccagtggttctcagagtatggttctcagcccaccagctagtatcagtatcacctgggaactagttagaaatgtaaattctttggccccatcccagacatactgagtcagaaactctggaatagggcccccgcaatctgttttcacaagccctccaggtgattctgatgcacactttaaagtttaggaaccactgggctaagactctgttgagatatagagtttttcttccactcagactgatatagttatacattgttcttcatgtaaattcagcttaacctggttatctataatcttttattggcaaaagttaattctcagtactgcctatagagatacagtgtattttatgtacatacacaattagtctaattcttgataattcagttaatttagtttggcattttcctaccacttactaaaaggtttacattaaatgactgatttaaatatataggtgcaatgttctatgtttattttaattgttatgacatttaagtagctaatataattgaccggtgctaaagtctcctgtttatccataaaatgggtacattatgggcagtgtaatacaagctttcttttcattgcctagtactttaccagcagaccacagttttgcctggctagaccaaccctcagaacaaaatcatcattccttgtatttatatttgtatctgagatagtaaacaagatggctggccaggtcaacatggcaccttaacttatttttttaataggtaaaacttcttcaaaagtagcttgctttgtataagaactaagctatcagtatagatatagctatccttggagcttatgtttcagacaagaattatttactaaaataaataataaacaagataatgcattatacatttgggcatttctcgtttctcaagtgtatgcatcatggtaaatataaactaaccacaagataggtagattgattcatttcattttaatctccttgtgtaattcagtacctccataattgttctaatcttcttcccactgtttacaaattaccagttaattaactcgtgaaagaaaaattcacatatcagaataaaaataaatgtatactcactttataaaaatcaccactgctgtctttccttaatactagcagtggaaatgtaagtggcttactctacaaattttggtgctggcaaatacataggcaaactgttgggagctgctctagttacattcctcccttcttattccctttttctcttcctcactttattgcataacatattcctgtacccaaagcattctaccacagttctatttgactcccacttgtaataactcctttaaaaaattccatgtttaaccatatgaccctgcttgcttactcatattctccctccctctccccttcctttctctctcttccagaagtcatttgcctggtttgaaatattttgtagggattgcttattatattattttagctgatgaacctcaggacaacgtctacacacacacacatacatacacgcacacaaaatctcagctgttgaagagtgggcttggaatcagacttctgtgtccagtaaaaaactcctgcactgaagtcattgtgacttgagtagttacagactgattccagtgaacttgatctaatttcttttgatctaatgaatgtgtctgcttaccttgtttccttttaattgataagctccaagtagttgctaattttttgacaactttaaatgagtttcattcacttcttttacttaatgttttaagtatagtaccaataatttcattaacctgttctcaagtggtttagctaccattctgccatttttaatttttatttaattttatttgcttgagcacactgatcaaccactgaactgccttcttccattgtcctgcaatgatataagggttacatttttgtgtatatggctttcatagttgggatttcagagcactgataccagatattttcagtttgttctctgggggaatttcatttgcatctatgtttttagctatctgtgataacttgttaaatattaaaaagatattttgcttctattggaacatttgtatactcgcaactatatttctgtaaacagctgcagtcaaaaataaaacactgaaagttaaaaaaaaaaaaaaaaaaaa

SEQ ID NO: 23630 - DNA, 7226 bp, Homo Sapiens
cgggcgcgggcgcgtccctgtggccagtcacccggaggagttggtcgcacaattatgaaagactcggcttctgctgctagcgccggagctgagttagttctgagaaggtttccctgggcgttccttgtccggcggcctctgctgccgcctccggagacgcttcccgatagatggctacaggccgcggaggaggaggaggtggagttgctgcccttccggagtccgccccgtgaggagaatgtcccagaaatcctggatagaaagcactttgaccaagagggaatgtgtatatattataccaagttccaaggaccctcacagatgccttccaggatgtcaaatttgtcagcaactcgtcaggtgtttttgtggtcgcttggtcaagcaacatgcttgttttactgcaagtcttgccatgaaatactcagatgtgaaattgggtgaccattttaatcaggcaatagaagaatggtctgtggaaaagcatacagaacagagcccaacggatgcttatggagtcataaattttcaagggggttctcattcctacagagctaagtatgtgaggctatcatatgacaccaaacctgaagtcattctgcaacttctgcttaaagaatggcaaatggagttacccaaacttgttatctctgtacatgggggcatgcagaaatttgagcttcacccacgaatcaagcagttgcttggaaaaggtcttattaaagctgcagttacaactggagcctggattttaactggaggagtaaacacaggtgtggcaaaacatgttggagatgccctcaaagaacatgcttccagatcatctcgaaagatttgcactatcggaatagctccatggggagtgattgaaaacagaaatgatcttgttgggagagatgtggttgctccttatcaaaccttattgaaccccctgagcaaattgaatgttttgaataatctgcattcccatttcatattggtggatgatggcactgttggaaagtatggggcggaagtcagactgagaagagaacttgaaaaaactattaatcagcaaagaattcatgctaggattggccagggtgtccctgtggtggcacttatatttgagggtgggccaaatgttatcctcacagttcttgaataccttcaggaaagcccccctgttccagtagttgtgtgtgaaggaacaggcagagctgcagatctgctagcgtatattcataaacaaacagaagaaggagggaatcttcctgatgcagcagagcccgatattatttccactatcaaaaaaacatttaactttggccagaatgaagcacttcatttatttcaaacactgatggagtgcatgaaaagaaaggagcttatcactgttttccatattgggtcagatgaacatcaagatatagatgtagcaatacttactgcactgctaaaaggtactaatgcatctgcatttgaccagcttatccttacattggcatgggatagagttgacattgccaaaaatcatgtatttgtttatggacagcagtggctggttggatccttggaacaagctatgcttgatgctcttgtaatggatagagttgcatttgtaaaacttcttattgaaaatggagtaagcatgcataaattccttaccattccgagactggaagaactttacaacactaaacaaggtccaactaatccaatgctgtttcatcttgttcgagacgtcaaacagggaaatcttcctccaggatataagatcactctgattgatataggacttgttattgaatatctcatgggaggaacctacagatgcacctatactaggaaacgttttcgattaatatataatagtcttggtggaaataatcggaggtctggccgaaatacctccagcagcactcctcagttgcgaaagagtcatgaatcttttggcaatagggcagataaaaaggaaaaaatgaggcataaccatttcattaagacagcacagccctaccgaccaaagattgatacagttatggaagaaggaaagaagaaaagaaccaaagatgaaattgtagacattgatgatccagaaaccaagcgctttccttatccacttaatgaacttttaatttgggcttgccttatgaagaggcaggtcatggcccgttttttatggcaacatggtgaagaatcaatggctaaagcattagttgcctgtaagatctatcgttcaatggcatatgaagcaaagcagagtgacctggtagatgatacttcagaagaactaaaacagtattccaatgattttggtcagttggccgttgaattattagaacagtccttcagacaagatgaaaccatggctatgaaattgctcacttatgaactgaagaactggagtaattcaacctgccttaagttagcagtttcttcaagacttagaccttttgtagctcacacctgtacacaaatgttgttatctgatatgtggatgggaaggctgaatatgaggaaaaattcctggtacaaggtcatactaagcattttagttccacctgccatattgctgttagagtataaaactaaggctgaaatgtcccatatcccacaatctcaagatgctcatcagatgacaatggatgacagcgaaaacaactttcagaacataacagaagagatccccatggaagtgtttaaagaagtacggattttggatagtaatgaaggaaagaatgagatggagatacaaatgaaatcaaaaaagcttccaattacgcgaaagttttatgccttttatcatgcaccaattgtaaaattctggtttaacacgttggcatatttaggatttctgatgctttatacatttgtggttcttgtacaaatggaacagttaccttcagttcaagaatggattgttattgcttatatttttacttatgccattgagaaagtccgtgagatctttatgtctgaagctgggaaagtaaaccagaagattaaagtatggtttagtgattacttcaacatcagtgatacaattgccataatttctttcttcattggatttggactaagatttggagcaaaatggaactttgcaaatgcatatgataatcatgtttttgtggctggaagattaatttactgtcttaacataatattttggtatgtgcgtttgctagattttctagctgtaaatcaacaggcaggaccttatgtaatgatgattggaaaaatggtggccaatatgttctacattgtagtgattatggctcttgtattacttagttttggtgttcccagaaaggcaatactttatcctcatgaagcaccatcttggactcttgctaaagatatagtttttcacccatactggatgatttttggtgaagtttatgcatacgaaattgatgtgtgtgcaaatgattctgttatccctcaaatctgtggtcctgggacgtggttgactccatttcttcaagcagtctacctctttgtacagtatatcattatggttaatcttcttattgcatttttcaacaatgtgtatttacaagtgaaggcaatttccaatattgtatggaagtaccagcgttatcattttattatggcttatcatgagaaaccagttctgcctcctccacttatcattcttagccatatagtttctctgttttgctgcatatgtaagagaagaaagaaagataagacttccgatggaccaaaacttttcttaacagaagaagatcaaaagaaacttcatgattttgaagagcagtgtgttgaaatgtatttcaatgaaaaagatgacaaatttcattctgggagtgaagagagaattcgtgtcacttttgaaagagtggaacagatgtgcattcagattaaagaagttggagatcgtgtcaactacataaaaagatcattacaatcattagattctcaaattggccatttgcaagatctttcagccctgacggtagatacattaaaaacactcactgcccagaaagcgtcggaagctagcaaagttcataatgaaatcacacgagaactgagcatttccaaacacttggctcaaaaccttattgatgatggtcctgtaagaccttctgtatggaaaaagcatggtgttgtaaatacacttagctcctctcttcctcaaggtgatcttgaaagtaataatccttttcattgtaatattttaatgaaagatgacaaagatccccagtgtaatatatttggtcaagacttacctgcagtaccccagagaaaagaatttaattttccagaggctggttcctcttctggtgccttattcccaagtgctgtttcccctccagaactgcgacagagactacatggggtagaactcttaaaaatatttaataaaaatcaaaaattaggcagttcatctactagcataccacatctgtcatccccaccaaccaaattttttgttagtacaccatctcagccaagttgcaaaagccacttggaaactggaaccaaagatcaagaaactgtttgctctaaagctacagaaggagataatacagaatttggagcatttgtaggacacagagatagcatggatttacagaggtttaaagaaacatcaaacaagataaaaatactatccaataacaatacttctgaaaacactttgaaacgagtgagttctcttgctggatttactgactgtcacagaacttccattcctgttcattcaaaacaagaaaaaatcagtagaaggccatctaccgaagacactcatgaagtagattccaaagcagctttaataccggtttggttacaagatagaccatcaaacagagaaatgccatctgaagaaggaacattaaatggtctcacttctccatttaagccagctatggatacaaattactattattcagctgtggaaagaaataacttgatgaggttatcacagagcattccatttacacctgtgcctccaagaggggagcctgtcacagtgtatcgtttggaagagagttcacccaacatactaaataacagcatgtcttcttggtcacaactaggcctctgtgccaaaatagagtttttaagcaaagaggagatgggaggaggtttacgaagagctgtcaaagtacagtgtacctggtcagaacatgatatcctcaaatcagggcatctttatattatcaaatcttttcttccagaggtggttaatacatggtcaagtatttacaaagaagatacagttctgcatctctgtctgagagaaattcaacaacagagagcagcacaaaagcttacgtttgcctttaatcaaatgaaacccaaatccataccatattctccaaggttccttgaagttttcctgctgtattgccattcagcaggacagtggtttgctgtggaagaatgtatgactggagaatttagaaaatacaacaataataatggagatgagattattccaactaatactctggaagagatcatgctagcctttagccactggacttacgaatatacaagaggggagttactggtacttgatttgcaaggtgttggtgaaaatttgactgacccatctgtgataaaagcagaagaaaagagatcctgtgatatggtttttggcccagcaaatctaggagaagatgcaattaaaaacttcagagcaaaacatcactgtaattcttgctgtagaaagcttaaacttccagatctgaagaggaatgattatacgcctgataaaattatatttcctcaggatgagccttcagatttgaatcttcagcctggaaattccaccaaagaatcagaatcaactaattctgttcgtctgatgttataatattaatattactgaatcattggttttgcctgcacctcacagaaatgttactgtgtcacttttccctcgggaggaaattgtttggtaatatagaaaggtgtatgcaagttgaatttgctgactccagcacagttaaaaggtcaatattcttttgacctgattaatcagtcagaaagtccctataggatagagctggcagctgagaaattttaaaggtaattgataattagtatttataactttttaaagggctctttgtatagcagaggatctcatttgactttgttttgatgagggtgatgccctctcttatgtggtacaataccattaaccaaaggtaggtgtccatgcagattttattggcagctgttttattgccattcaactagggaaatgaagaaatcacgcagccttttggttaaatggcagtcaaaattttcctcagtgtatttagtgtgttcagtgatgatatcactggttcccaactagatgcttgttggccacgggaagggaaatgacttgttctaattctaggttcacagaggtatgagaagcctgaactgaagaccattttcaagagggacggtatttatgaatcagggttaggctccatatttaaagatagagccagtttttttttttaaatagaacccaaattgtgtaaaaatgttaattgggttttttaaacattgttttatcaagtcactgttaagtagaagaaagccatggtaaactgatacataacctaaattataaaagcagaaacctaactcactcgtcaagggaagttaccttttgaggaaagttaaagtacttttttccctatctgtatctatagcaacaacccagaacttacaaacttctccaaagattttattgattgttatatcaaatcagaatgtaaacatgaactcttgcatatatttaaaattgtgttggaacatttgaacatgaatgctgtttgtggtacttaagaaattaattcagttggattatcattatgtgatactggcagattgcagtgcaaccttatgccaataaaatgtaatttaacagccccagatattgttgaatattcaacaataacaagaaaagcttttcatctaagttttatgctttaattttttttctttttttttctttttcttttgtttccttggtactaattttaatttttatttggaagggagcagtataaagcttatttgtatttagtagtgtatctcatagatacagacaaggcaagagatgataagctgtttaaatagtgtttaatattgattgggggtggggagaaagaaaaagtgtattacttaaagatactatatacgttttgtatatcattaaatctttaaaagaaatgaaataaatttattgtttacagaaaaaaaaa

SEQ ID NO: 23631 - DNA, 7226 bp, Homo Sapiens; identical to SEQ ID NO: 23630

SEQ ID NO: 23632 - DNA, 4650 bp, Homo Sapiens
ggcacgaggggtcacagccacccgcgggaagctcgtggccgggaccccgaggcgggagcgcgggctgggccgggctgggctacgcgcacgggctcggccgccgcccctgccggttgcataccctgtcctgagggcgcggcacggagtgcatgcgggccgctgccatgacgaccgccatcttggagcgcctgagcaccctgtcggtcagcgggcagcagctgcgccgcctgcccaagatcctggaggatgggcttcccaagatgccttgcactgtcccagaaacggatgtgccccagctcttccgggagccttacatccgcaccggctaccgccccacggggcacgagtggcgctactacttcttcagcctctttcagaaacacaacgaggtggtcaacgtctggacccatttactggcagccctggccgtcctcttgcgattctgggcctttgccgaggctgaggccttgccatgggcgtctacccactccctgcctctgctcctcttcatcctgtcgtcaatcacttacctcacctgcagccttctggcccacctgctgcagtccaagtcagagctctcccactacaccttctactttgtggactatgttggcgtgagcgtttaccaatatggcagtgctttggctcatttcttctacagctctgaccaggcctggtatgaccggttctggcttttcttcttgccagcagctgccttctgtggctggttatcttgtgctggctgttgctatgccaaatatcgttaccggaggccttatccagtcatgaggaagatctgtcaagtggtgccagcaggtctggcttttatcctagacatcagccctgtggcacaccgtgtggcgctctgtcacctggctggctgccaggagcaagcagcctggtaccacaccctccagatcctcttcttcctggttagcgcttatttcttctcctgccccgtgcctgagaagtacttcccgggttcctgtgacatcgtgggccatgggcatcagatcttccatgcatttctgtccatctgtacgctctcccagctggaggccatcctcctggactaccaggggcggcaggagatcttcctgcagcgccatggacccctatctgtccacatggcctgcctctccttcttcttcctggctgcctgcagtgctgccaccgcagcccttctgaggcacaaagtcaaggccagactgaccaagaaagattcctgaggctggcaagtggggcaacgtgtggaggaagcccctcataatttggagaaaacttgatacaatagaagctgacttttaaggcattggcttttaaattaatacatatatccaaggatatgttatagctgcagtgtttgaaagccaaaggatttaagagttttgttgttgttaataaaaggaatactccttttccttttggatcatagcttaacaaggcacaggaagggaagggatcttgactaagattcatgagacattgaattaaggagaatcatcttcatgcctgaaaatttagcaaaattccgactatggcctccaggggcaattcctaaaagctgaatggataataaaattggactggaaagtaagtaggtggctggtcctcaccctgttggaatggctatcctactatgctgttctttggtaatggaataaattgacccaaggaccgaatttcatttggatttcaagttgtccagagtggaaaagccttcaagatgacatgatgaattactcagttcatctgatttctggtccctcctttctcgacaactataatactaacccttttctcaggataactgtctacacctggcagttttctctgaagtgctgttcactcacatccctaccttgcatggtaatataaaggactaggaagcagtcatacttccaggaaatgcttggattcatgtggacattcaggaagcttattctcatataatactaatctaaacagtactagaaattacagtgccaagagccaccaggaggcccagccaataagcatagatactatatggtatcatgggacccatctattttttaccagtggactacaggattacttgagagttatcagggctgcctaacagaccaggagatctgggggttgcaccagggaatcgccatatttgaccagcatgttttaaaagctcttggtaggattagttggttctaaggatccctctagggacctcattatttcaagaggaacccaaagtccagcctcctacatagatgctgccccacgaaggacccacaaaactaacctagttcagggttctcaggcaggcagttctgcttcagcttagagcagaacccataaaatactcaagtactgggataggcaagcatgtgtgtttactgtggattggtccctgaaggctcctttgggtgagaacatgtgaaccaggcaccctggtttgtttggagcattgctgcccagaagcttctatgggataggtggtgcttgggattgatgtgttgtggccatgcagccctccctgaggattgacttctgcactaatccagtgaaggaggctgtgtcaaaagaagggctcagaagccctcttttcagaggcaatgattcctgtcagtatgaggtcccttagttactaaaaagggacatgatttaactccagtttgatgaacctcctccgagtttactttattgtcttcaaatcttttgttttcttcctttttgtgagatttgtgggttttgtgccttataaatggaaatgtatgaacacaatatatgctcatgtagaattttctgttctgggttattgggataagaaaaaatatatattgctcttcaactagtgaatgaaagaaacttcagaaagctagaattgcttatcaatcaaaagactttctcaatctattttggccacaaacaaacatattcaactgaagctttccaataatctttatatcaagaaagcatgcgtcttgtcagctacattgttttcttagatggatttctcctgttaatcctcaaatatctgaacttctgtgttacccaagtgtcttatacaagcttctggtgtctaggacaaatttatggcaaataaaattagcaaaactgaactgggttgaactgaacaagaggatgggggaattgtgcaaatacgttgttagtagaaggtcaatttaaaatagggactagaaattatttgaagttttctttattacggattcaaagacttattttgaaagttggaaggagaagggagggaagagagcagaagggaagaaggtgtaagtcaagctcttgaatataactggtggtattgtgggcagagatctttagttcaaatccacgtattttttaaaagagagaactggaggtagagcaatgatcagatgggtgcacagaccagtgccaatctgaacattgttaatggcctgtgacatgatgagcacaggaacaggcatgaagatattgccatacaattttaatttatacaagtattggcccctcaagtggttggaaattttttttttaatctctttttctgagacagggtcttactctgtcgcccaggctggagtgcagtgatgcaatcacggctcactgcagcctcgacctccccagctcaagcaatcctcccacctcagcctcctaagtacctggtactacaggcgcgtgccaccacacctggctaatttttgcattttttgtagagacagggttttgccacgttgcttaggctggtcttgaactcctgaactcaagtgatccgcccacctcagcctcccaaagtgttgggattacagacattagccatcacgcctgccctagaaacagttttttaataggagatatttgagaggcattgaggtagaagactctatgacatgccctcagaatatcagaatcttcttagaaataaactaggaaatgcagatgtttttaactactcagacttttgaggaattaatccttttaaaacatttttgttaaagttagtgtatcagtaagaaacagacctagtttaaaaggaataatcaacaattttataaaggagatggcttattcaaccatagcccctccaacatatctactggaaattctgctggttaactttatctctctctctcttaatttagactttcaacctatgaaaatgtaaatacctttgaaaaaactaaactatcagtcatttacatcttctcatgaatgaaatgcagtgtagggagaggagatggcaggacacagcaaacaggacacatttgcctgcttctctcttgcctaattcttcctgacctgtatttactgatgcttaataatacttgtaagactctaggggttcatttcccatttcagcggaaagtacttcactcaacaacaatattctcaagagtcttctactggaagctagaaagaaataggaatttaagtccatagaatgaaggtagttattcctgcctgtgttgcccacctgttcacaaaaagtacctttatgcttgaaaacattaggttctttggttactgcactgtagtttcaaatggatcctccagatggcattcatgtcttactcagaaagggcactgccattgtccccaaggcttctgtctactaattctattggtcttgtgttttgcttgattgcttggcaaaaaaaaaaaaaaaaa

SEQ ID NO: 23633 - DNA, 7888 bp, Homo Sapiens
cagacacacatggtgcattgttgccattccccagattgcatctttgaaacacaggctcttagtaaccttcagcgaacaaagaggcaacctcccagatacgtctgctgggagggagtcatcgtgactgccctctagcttttgctggatctggatttgaattccactatggagcctcgcatggagtcctgcctggcgcaggtgttgcagaaggatgtggggaaacgattgcaggttggccaagaactgatagactatttctcagacaaacagaagtctgctgaccttgagcatgaccagaccatgttagataaacttgtggatggacttgctacctcttgggtgaactctagcaattacaaggtggttctgctgggcatggacatcctgtccgccctggtgacccggctgcaggatcggttcaaggcgcagatcggcacagtgctgccaagtctaatagacagactaggagatgctaaagactctgtgagggagcaggaccaaactctgctgctaaagatcatggatcaagctgctaatccccagtacgtatgggacagaatgcttggaggcttcaaacacaagaatttccgtactcgagaaggcatctgtctctgccttatagcaacactcaatgcctctggagcacagactttaacactaagcaagattgtgccacatatatgcaacttacttggagatccaaacagccaggttcgagatgcagcaataaacagcttagtggaaatttacagacatgtaggagaacgtgtgagggcagatctcagtaaaaaaggattgccacagtcccggttgaatgtaatttttacaaaatttgatgaagtccagaaatctggaaacatgatacaatctgcaaatgataaaaatttcgacgatgaagattctgtggatggtaacagaccttcctctgctagttctacatcatccaaggctccaccaagttctcggagaaacgttggaatgggaaccacccgccggcttggttcatccacccttggatccaagtcttcagctgcaaaagaaggagctggtgctgttgatgaagaggattttattaaagcatttgatgatgtacctgtagtacagatttattccagccgagaccttgaggaatccataaacaaaattagggaaatattatctgatgacaagcatgattgggagcagagagtaaatgctctaaaaaagattagatctttacttttggctggtgctgctgagtatgataacttctttcaacatttgcgtcttttggatggagcctttaaactctctgctaaggacctgcggtctcaggtagtgcgggaggcttgtatcacgttggggcatctgtcatcagttctggggaataagtttgaccatggagctgaagccattatgccaactatctttaatttaattccaaacagtgccaaaattatggccacatctggtgttgtagctgttaggttaattattcggcacacacacatccctaggttaatacctgtcataacaagcaactgtacctctaagtctgtcgcagttagaaggcgctgttttgaatttttagatttgcttttacaagaatggcagacacattcactagaacgacacatatcagtattagctgaaacaataaagaagggaatacatgatgctgattccgaagcaagaatagaagccagaaaatgttactggggtttccacagtcacttcagcagagaagcagagcacttgtaccacaccttggagtcctcctaccagaaagccctgcagtcccacctgaagaactcagacagcatagtgtctctgcctcagtcagaccgctcatcttccagctctcaagagagtctaaatcgtccgctgtctgccaaaagaagtcctactggaagtaccacatctagagcttctacagttagtaccaaatctgtgtcaacgactgggtccctccagcgatctcgaagtgatattgatgtgaacgcagcagccagtgccaaatccaaagtctcctcatcttcgggcacgacgcctttcagctctgcagcagctttgcctccagggtcatacgcatccttaggtcggatccgcacaagacggcaaagctctgggagtgccaccaacgtcgcctctacacctgataaccggggccgcagtcgcgctaaagtggtttcacagtcccagcgatccagatctgctaatcctgctggtgctggcagccggtcaagttccccaggaaaattgttgggaagtggttatggtggacttactgggggctcctcacgaggcccacctgtgacaccgtcttcagaaaagcgaagcaagattcccaggagccagggatgtagccgggaaacaagtccaaaccgaataggattagcacggagcagccgtatccctcgacccagcatgagtcaggggtgcagccgcgataccagccgtgagagcagccgagatacaagccctgctcggggctttcctccacttgatcggtttgggcttggccagccaggaagaatacctggttctgtgaatgccatgagagttctgagcacaagtacagatcttgaagctgctgttgctgatgctttgaagaagcctgtgaggaggagatatgagccgtatgggatgtattctgacgatgatgccaacagtgatgcctcaagtgtttgctctgagcgctcatatggctccaggaatggtggcattccccattatctgcggcagactgaggatgtagcagaagttctcaaccactgtgctagttcaaactggtcagaaaggaaagaagggcttctgggcctgcagaacttactgaagagccaaagaacactgagtcgagttgaactgaaaaggttgtgtgagatcttcactcggatgtttgctgaccctcatagcaagagagttttcagtatgtttttggagactcttgtggattttataataattcataaggatgatttacaagactggctttttgttcttctcacacaattacttaagaaaatgggagcagatttacttggatctgtgcaagcaaaagttcaaaaggctctagatgtcacaagggactcctttccatttgatcaacaatttaacattttgatgagatttattgtggatcaaactcaaactccaaacctcaaggtcaaagttgcaatcctgaaatacattgagtctctggccagacagatggatccaacagattttgtaaactctagtgagacaaggcttgctgtttctagaatcataacctggacaacagaaccaaagagttcagacgtgagaaaggcagcacagattgtgctaatctctctgtttgaattgaatactcctgaatttaccatgttacttggtgccttgccaaaaacattccaggatggtgccaccaaactcctgcacaaccacctcaagaattccagtaacaccagtgtgggctctccaagcaatacgattggccggacgccctcccgacacaccagcagcaggaccagccccctgacctcacccaccaactgttcccatgggggtctgtctccaagtcggttatggggttggagtgccgacgggttagcgaagcacccacctcccttttctcagcctaactccatccccaccgctccctcccacaaggctctcaggcgctcttactctcccagcatgctggactatgatacagagaacctgaactctgaagaaatctatagttctctacgtggagttacagaagccattgaaaagtttagttttcgaagccaagaagatctgaatgagccaattaaacgagatggcaaaaaggagtgtgatattgtgtcccgcgatgggggcgctgcctcccctgccactgagggccgggggggtagtgaagtagaaggaggccggacagctctggataacaagacctcactactcaacacccagcctccgcgcgccttcccggggccgcgggcgcgagactacaacccgtacccctactcagatgccatcaacacctacgacaagaccgccctgaaagaggctgtgttcgatgacgacatggagcagcttcgagacgtgcccatcgaccattctgacctggtggctgaccttctgaaagagctgtccaaccacaatgagcgagtggaggaacggaagggagccctgctggagctgctcaagatcacgcgggaagacagccttggtgtctgggaggagcacttcaagaccattctgctcctgctgctggagacccttggagacaaagaccattcaattcgagcactggcgttaagagttttgagggaaattctgagaaatcaaccagcaagatttaaaaactacgccgagctgacgattatgaagactctggaagcccacaaagactcccataaggaggtggtgagagcggctgaggaggctgcgtccacactggccagttccatccacccggagcagtgcatcaaggtgctctgccccatcatccagacggccgactaccccatcaaccttgctgccatcaagatgcagaccaaagtcgtcgagaggatcgcaaaggagtcattgctgcagctccttgtcgacatcatcccaggcttgctgcagggttatgacaacaccgaaagtagtgtgcgtaaggccagcgtgttttgcttagtggcaatttattccgtaatcggagaagacctgaaacctcaccttgcacagctcacagggagcaagatgaagctactaaacttatacataaagagggcccagaccaccaacagcaacagcagctcctcctccgatgtctccacgcacagctaatggcagtacctgtctcttgtgtagacctagaagcaatcggtggtgcctctcagagacctttccccacccccttcatcggctgcccagtcagtacaaggaggcccacaaatatttattacaatcagtattttggtcccttccagcttttctgtagaatcttactggtattgaatgtaaaggaagcaaggcctgtattgcagtcttcatacaaaacaaaaggaataagaacagaaaagagccatactgaaacatgtcttgtacagcctgctgagatggcgaaaccctgtgtgtggggtgcagtttttaaaaatcagagcgctctagccactacttggtagaaagtagcattttttttttcagttaataacatatttgggggtggggtggggtgttactttgtgttcttcctccttagcctattttcttgtgcgtatggtctgtgtggggcccctttcacagctgacaccacgaaaggtgatatatctttaagttgtgttctgagacctactaaaaatgggaatcaagtcttggcaagaacagtctgaagatggccttttaacaaacgctgggaattttgcttgtcatatccagactggaggccgactgccctggctttcagcgtagaattgggagtgcaccctgacagtctccttccagctctccctaatcgactccaccgacaaggtccctaccccagagcttccatgcaaaggaattcttcaagtttaaatctggacacaaaaataagataaatgtatggcatcatttagggatgcctgagatggcagttcatgaagcacagaagataaagaagaagtctttcatctttactgctgagatccttgggaacactgttgtcatgggggctctgccaagaccctcatctctgggctacacggtgattcagattgagcaccaacttgtttcctcccctcaaagttctgcctaagccgttcagttctaacatggtctcagttaatctggtaaatggcatctttaccatcttagttctgacttctcagtttaatgtgggattaagagccaagaaaagcctagagagactggatatcacaattttttttaattttataaactgaagtagttccttgaatgtctgttgatgaaatagtcactgtttaaggaaaaaagtaattatgaggtgtagcagattgcagaaaaacaggattagaaacacacttaaaaagaacacacatttagagtctctcttcctcctcagcgaaccactaggcccccttttttaaaaacacctttagagcctaattactccaataaaagtaactagaggtttggagtctggttaaataaattctgagtaaaattcttaagccaaatggaaattcttaatgcaatcatgaggacttctattgtctcttactgttgtattagatcctataaattgaactgatttttccataaggaaaatgcttcttttgagattaattctaataacgtatttgctattgcagtgcagagcccactgcaactgctaggactgaaagcagaggctgggtgccagagcacgtgattcttaacatcatttccacagacccctctgccctgaccctctgcattggatgcaggaagctgggaaagactgatgttgatttggaaacatgggctgaaaatgaaggccccatagtgcataggaacagtaaagccagggtgctgacgtgtgtgtgtgtgtgtgtgtgtgtgtgtgtgtgtgtggtgttgtgtgtgtttgtgcgtgcaccctacacatgtgtggtacctcactgctgctgtttagggaacttgagggacgcgtttcaaggggttgggtattactgacgagctttggctcaaaatatagcaggaccaggtcttttgttgataagtactgtttgtttattaatatgtcattaatggtatttcttttttacactctacaagtgaattagggagtctcttgttgacccctttgttgcaggaatgtgcgtcgggctaggttatccatgagtttctttattcctaatgcagttagaaagacctttctccttgagctctttgactcccagaaggtaccccagtccccagtgtacttagaaaggatctcgaacattgctggacgtcctcatagtactcacaaagggctagccttgaatgtcactcgcccagtcttcagtctcctgacttagagatacaatcacgtcacaggtctcttggcctcaatctgaaaactgctgccgccgcgccgaggagactcgcatgccgccaccacctcactgggagggcgccgagcccaccgtcgccccctagaccctgacagctgcagctgccttgccttgccgccgcctccctgcagggcccctgttccaatgaaaaacagaacacaaaagagcagagcacctaagcctgtctctgcctccctgtctaccggactggccagggcccaagacccccgctgctccactgcggggctgggcgggctgactccctgcttcctccaagctgctgcctcccctgcagccagggtctgggcagggtgcagccggtcctcggggcacgcagcttccttcaagtacactgtgtgtgcttcccggacctgcggcgatgccacgggcctgccttttctatgcgcctcactagcttaccaccctgtgcaggtaatgcaactgactttgtctcatcagtctttttctttccctgccaccctttatttatcaagcgtaatgttacactttaaaggacagcaaataagaactttgtagaatcccaccaggactttgctaacaataatgtttggaaataaagaagtgctctgaaaaaatatcagccaccaaaatagttatgttggcactgtgttcacacgcatggtccccacacccccaggttgggtgggtttttttgttttttgggtttttttggggggggggctttttcatgttacatccatatctgtatttatatcttatttgtttcactttcaagtgtatcatggcaaatgtacagatttttttgttaataatgtgctaggatttgctaaaaaagaaaaaaaaaaaacccttttgagtttgccctagaataaatgagacttaatttaaaaaaaaaaaaaaaaaaaaaaaaa

SEQ ID NO: 23634 - DNA, 7888 bp, Homo Sapiens; identical to SEQ ID NO: 23633

SEQ ID NO: 23635 - DNA, 1617 bp, Homo Sapiens
cctcacatgatccagtttaatcctcctcttctcccttcctgaagctgcacgctgcagtaagagcacagcagaaatgcagacaaaagggggccaaacatgggcgagaagggctctgttgctcggcatcctgtgggccactgcacatctgcctctctcagggacctccctgccccaacgtctcccaagggccacaggaaatagcacccaatgtgttatttctccatcatcggagtttcccgaagggtttttcacgagacaggagcgcagagatggaggcatcataatctatttcctaattatcgtttacatgttcatggccatatctattgtctgtgatgaatacttcctaccctccctggaaatcatcagtgaatcccttggattgtctcaggatgttgcaggcacaactttcatggcagcgggcagttcagctcctgaattagttactgctttcctaggtgtatttatcacaaagggagatattggcattagcaccatccttggatctgcaatttataatctccttggcatctgtgctgcctgtggtttgctatctaatacggtctcaacactatcatgttggcccctattcagagactgtgcagcgtacacaattagtgcagcagcagttcttggtataatatatgacaaccaagtttactggtatgaaggggctttactgcttttgatatatggattgtatgttttggtgctgtgttttgacattaaaattaaccaatatattataaagaaatgcagtccttgctgcgcctgtcttgccaaagctatggagagaagtgaacaacagccactgatgggctgggaagatgaaggtcaaccattcattcgtcggcaatcaagaactgatagtggaatattttatgaagattctggctactctcagctctctataagtttacatggccttagtcaggtttctgaagatccaccaagtgttttcaacatgcctgaagcagacttaaaaagaattttttgggtattatcccttcctattattacattactttttctaaccacaccagattgtagaaaaaagttttggaaaaactactttgtgataacctttttcatgtctgcaatatggatatccgcatttacatatatcctggtttggatggtcacaattacaggggaaacactagaaattcccgatacagtaatgggccttactttattagcagcaggaacaagcataccagacacaattgcaagtgtgttggttgcaagaaaagggaaaggagatatggctatgtctaacatcgtgggatccaatgtgtttgatatgttgtgccttggtattccatggtttattaaaactgcatttataaatggatcagctcctgcagaagtaaacagcagaggactaacttacataaccatctctctcaacatttcaattatttttctttttttagcagttcacttcaatggctggaaactagacagaaagttgggaatagtctgcctattatcatacttggggcttgctacattatcagttctatatgaacttggaattattggaaataataaaataaggggctgtggaggttgatattattaatagtgttatgcagaaaatatgaatggcaggga

SEQ ID NO: 23636 - DNA, 3897 bp, Homo Sapiens
  misc_feature (3100)..(3100): n is a, c, g, or t
  misc_feature (3158)..(3158): n is a, c, g, or t
gcagggtaccggtcggaggagtcccgtagtcatggaaacccctctgagccccagtccggtctaagaaaggctctgcgccctgcgcccggatgacagcagctccgcccgcaccgagatccacctgctcttcgatcagctcatctccgagaactacagcgagggcagtggcgtggccccggaggacgttagtgctcttcttgtccaggcttgccgactggtacctcttaatcagaatcatcttgtcagcaaagtgagccagcttatccaccatttacttaacagattacaggtaattgttgatgaacagcacttggatttcctgttggcatatactatttcggctattcatcagtgtagttcctggacacacagggaaattcttcaagccctggcagctctggtgtactgcaatggctccaaatgtcaaaagtacctcccagagctgctaggcaacaccggactcttaatgaagttgagtgacttggctcagtctgatcctgaagtcaggagagctgcagtacattgtatggcaaacttatgtctcagtgtgccaggacagccgtatttggaggagccctaccaaaatgtctgtttccaagcttttctgactattttacagtctccaaaatcatctgatatggatgatatcacattttgcatgttattgcaaaatgcattaaaaggtatacagtcacttctaaatggtgggagaatgaaactaacacagactgatgaacttggagcacttttagctgtgctaaagaaattcatgtttcacggactccctggactaaacatagagatgcccacggtgttatacccaactccgcttcctcagtatgatgggcgaacacctatcaaaccacagcaatcagaatccagtgcttctcgaccaactttgaataaaaagaaaaaatccaaagtaaaaccaaagaaaatccagcaaggagaggaggaggaaaaggaatccagtggtgaaatagaggcagccccagtcactggcacaggcagagtgaacctgcatgaagggaacacttggtgtccctcctccctgggtgtccagagtttgcctttagatggaagtggagctgcagaaaaagatggagtctcctcatccttcagttcttccagttggaaaagggtcagcagtagtgagtcagacttttctgatgctgaaggaggcatgcagagtaaaatgaggtcttaccaagctaaagttcgccaaggagccttagtttgttttctttctactataaaatcgatagaaaaaaaagttctttatggctactggtcagcttttattcctgatacgcctgaacttggcagcccacagtcagtgtccttgatgactcttacattgaaagacccttctccaaagacacgtgcctgtgctctgcaagttttatctgccatcttggaaggctcaaagcagtttctttctgttgctgaagataccagtgaccacagaagggcttttacccccttctccgtaatgatcgcttgcagcattagagagttgcacagatgtcttttgttagctttggtggcggagtcatcctcacagaccgttactcagataattaagtgccttgcaaatttagtatcaaatgcaccttatgatcgtctaaaactcagcctgctgaccaaagtctggaaccagataaagccttatattcgccacaaagatgttaatgttcgtgtgtcaagtctcacactcttgggagctatagtgtccacccacgcacctttacctgaagtccaactacttctgcaacagccatgttcttctggactcggtaatagcaattcagcaacccctcacctcagccctcctgattggtggaagaaagcccctgcaggaccctctctggaagaaacgtcagttagctcacctaaggggtcttcagagccctgctggctcattcgactctgcatttccattgtcgtactgcccaaggaggattcctgttcaggtagcgatgctggctctgcagcaggaagcacctacgaaccatcccccatgcgactggaggccttacaggtattgactcttctggcaaggggctacttttcaatgactcaagcctacttgatggagcttggagaggtgatttgcaagtgcatgggggaagcagatccatccattcagcctcatggagcaaagcttctggaagaactgggcacaggcttaatacagcagtataaaccagactccactacagcacctgatcagagagcaccagtcctcttggtggtgatgttctggactatgatgctgaacggtcctttacccagagccctgcagaattcagaacacccaactctccaggcgagcgcctgtgatgccctgtcttccatcttgccagaggccttcagcaatctgccgaatgacaggcagatgctgtgcatcacagtgctgctcgggctgaatgacagcaagaatcgcttagtgaaagctgcaacttcacgggccctgggagtctatgtgctttttccctgtctcagacaggatgtcatatttgttgcagacgcagcaaatgcaatattgatgtcacttgaagacaagtctctgaatgttcgagccaaagcagcctggtccctgggcaacctgacagacactctgattgtcaacatggaaacaccagacccaagtttccaggaagagttctctggtctcctgctcttgaaaatgttacgatcagctatagaagcatccaaggataaagacaaggtaaaaagcaatgcagtccgggcccttggaaatttgcttcattttctgcaaccctctcatatagaaaaacccacatttgcagaaatcattgaggagtctatccaggccctaatttctactgttctaacagaagctgccatgaaagtccgatggaatgcttgttatgcaatgggaaatgtatttaaaaatcctgcccttcctttaaggacagccccatggacctcccaggcctacaatgccctgacatcggtcgtgacatcatgcaagaacttcaaagtgcgcatcagatctgcagctgccctttccgtcccggggaagagagagcagtacgggtctgttgaccagtatgctcggttctggaatgcattngtcaccgctttacagaagagtgaagacaccatagactttttggaattcaagtactgtntcagcctacggacccaaatctgccaggcactgattcacctcttgagcttggccagtgcctcggacctcccttgtatgaaagaaacccttgaactgagtgggaatatggtccagtcctatattctacagtttttaaaatcaggagcagagggagatgacactggagcaccccacagcccacaggaaagagaccagatggtcagaatggcccttaaacacatgggcagcatccaggcaccaactggagacacagccagaagggccatcatgggctttttagaagagatcctggccgtttgttttgactcatctggatcacaaggggcactcccagggttaacaaatcagtgaagatcccaccatactttctagatgtcgaaggcggcagtaggaagacctgagcttgagcataagatctgtgggatttcatcttaggggcagaaacaatccgttcactatttatttagaatgacttagcagccatttaaattttcacagagggctcaaccacctttggagtgactccatagcactggccatggtcagggttgttggaacatctgacctgtgcatccaggagccgaggagtcaggttgtaatacaggccaagcagacgggctttgagggcatttagtctcagaaaaaaaaaatgtagaaggatttcggaattagaattttgtgtattgtatctgtagttttgtaataaactaacgaaaaatagtgtgtccccaaaaaaaaaa

SEQ ID NO: 23637 - DNA, 4023 bp, Homo Sapiens
caatttagacactcctgttaacctaacgtatgggtcatcttactctggaagactatcagatctggagtgtgaaaaatgttcttgccaatgagtttttgaacctccttttccaggtgtgtcacatagttctggggttaagaccagctactccggaagaagaaggacaaattattagaggatggttagaacgagagagcaggtatggtctgcaagcaggacacaactggtttatcatctccatgcagtggtggcaacagtggaaagaatatgtcaaatacgatgccaaccctgtggtaattgagccatcatctgttttgaatggaggaaaatactcatttggaactgcagcccatcctatggagcaggtcgaagatagaattggaagcagcctcagttacgtgaatactacagaagagaaattttcagacaacatttctactgcatctgaagcctcagaaactgctggcagcggctttctgtattctgccacaccaggggcagatgtttgctttgctcgacaacataacacttctgacaataacaaccagtgtttgctgggagccaatgggaatattttgttgcaccttaaccctcagaaaccaggggctattgataatcagccattagtaactcaagaaccagtaaaggctacatcattaacactagaaggaggacgattaaaacgaactccacagctgattcatggaagagactatgaaatggtcccagaacctgtatggagagcactttatcactggtatggagcaaacctggccttacctagaccagttatcaagaacagcaagacagacatcccagagctggaattatttccccgctatcttctcttcctgagacagcagcctgccactcggacacagcagtctaacatctgggtgaatatgggaaatgtaccttctccgaatgcacctttaaagcgggtattagcctatacaggctgttttagtcgaatgcagaccatcaaggaaattcacgaatatctatctcaaaggctgcgcattaaagaggaagatatgcgcctgtggctatacaacagtgagaactaccttactcttctggatgatgaggatcataaattggaatatttgaaaatccaggatgaacaacacctggtaattgaagttcgcaacaaagatatgagttggcctgaggagatgtcttttatagcaaatagtagtaaaatagatagacacaaggttcccacagaaaagggagccacaggtctaagcaatctgggaaacacatgcttcatgaactcaagcatccagtgtgttagtaacacacagccactgacacagtattttatctcagggagacatctttatgaactcaacaggacaaatcccattggtatgaaggggcatatggctaaatgctatggtgatttagtgcaggaactttggagtggaactcagaagaatgttgccccattaaagcttcggtggaccatagcaaaatatgctcccaggtttaatgggtttcagcaacaggactcccaagaacttctggcttttctcttggatggtcttcatgaagatcttaatcgagtccatgaaaagccatatgtggaactgaaggacagtgatgggcgaccagactgggaagtagctgcagaggcctgggacaaccatctaagaagaaatagatcaattgttgtggatttgttccgtgggcagctaagatctcaagtaaaatgcaagacatgtgggcatataagtgtccgatttgaccctttcaattttttgtctttgccactaccaatggacagttatatgcacttagaaataacagtgattaagttagatggtactacccctgtacggtatggactaagactgaatatggatgaaaagtacacaggtttaaaaaaacagctgagtgatctctgtggacttaattcagaacaaatccttctagcagaagtacatggttccaacataaagaactttcctcaggacaaccaaaaagtacgactctcagtgagtggatttttgtgtgcatttgaaattcctgtccctgtgtctccaatttcagcttctagtccaacacagacagatttctcctcttcgccatctacaaatgaaatgttcaccctaactaccaatggggacctaccccgaccaatattcatccccaatggaatgccaaacactgttgtgccatgtggaactgagaagaacttcacaaatggaatggttaatggtcacatgccatctcttcctgacagcccctttacaggttacatcattgcagtccaccgaaaaatgatgaggacagaactgtatttcctgtcatctcagaagaatcgccccagcctctttggaatgccattgattgttccatgtactgtgcatacccggaagaaagacctatatgatgcggtttggattcaagtatcccggttagcgagcccactcccacctcaggaagctagtaatcatgcccaggattgtgacgacagtatgggctatcaatatccattcactctacgagttgtgcagaaagatgggaactccagtgcttggtgcccatggtatagattttgcagaggctgtaaaattgattgtggggaagacagagctttcattggaaatgcctatatcgctgtggattgggatcccacagcccttcaccttcgctatcaaacatcccaggaaagggttgtagatgagcatgagagtgtggagcagagtcggcgagcgcaagccgagcccatcaacctggacagctgtctccgtgctttcaccagtgaggaagagctaggggaaaatgagatgtactactgttccaagtgtaagacccactgcttagcaacaaagaagctggatctctggaggcttccacccatcctgattattcaccttaagcgatttcaatttgtaaatggtcggtggataaaatcacagaaaattgtcaaatttcctcgggaaagttttgatccaagtgcttttttggtaccaagagacccggctctctgccagcataaaccactcacaccccagggggatgagctctctgagcccaggattctggcaagggaggtgaagaaagtggatgcgcagagttcggctggggaagaggacgtgctcctgagcaaaagcccatcctcactcagcgctaacatcatcagcagcccgaaaggttctccttcttcatcaagaaaaagtggaaccagctgtccctccagcaaaaacagcagccctaatagcagcccacggactttggggaggagcaaagggaggctccggctgccccagattggcagcaaaaataaactgtcaagtagtaaagagaacttggatgccagcaaagaaaatggggctgggcagatatgtgagctggctgacgccttgagtcgagggcatgtgctggggggcagccaaccagagttggtcactcctcaggaccatgaggtagctttggccaatggattcctttatgagcatgaagcatgtggcaatggctacagcaatggtcagcttggaaaccacagtgaagaagacagcactgatgaccaaagagaagatactcgtattaagcctatttataatctatatgcaatttcgtgccattcaggaattctgggtgggggccattacgtcacttatgccaaaaacccaaactgcaagtggtactgttacaatgacagcagctgtaaggaacttcacccggatgaaattgacaccgactctgcctacattcttttctatgagcagcaggggatagactatgcacaatttctgccaaagactgatggcaaaaagatggcagacacaagcagtatggatgaagactttgagtctgattacaaaaagtactgtgtgttacagtaaagctaccactctggctgctagacagcttggcggtgagggagatgactccttgtagctgacatttggcaaaagcgtcactgaaaggcaagctaaatgtagttattttatcctgtggccctgaagcacaaaataaaaattctaatttaaagaaaaaaaaaaaaaaaaaaaa

SEQ ID NO: 23638 - DNA, 3582 bp, Homo Sapiens
ggaagttgcgcagccgaactggccggctgggcgcgcgctcttgcggtggcgtaatctctcagcctttctgtgtctcctttcctccgcctcagtttggggcgggtcgggggaatggctgaggagatggagtcgtcgctcgaggcaagcttttcgtccagcggggcagtgtcaggggcctcagggtttttgcctcctgcccgctcccgcatcttcaagataatcgtgatcggcgactccaatgtgggcaagacatgcctgacctaccgcttctgcgctggccgcttccccgaccgcaccgaggccacgataggggtggatttccgagaacgagcggtggagattgatggggagcgcatcaagatccagctatgggacacagcaggacaagaacgattcagaaagagcatggttcagcactactacagaaatgtacatgctgttgtcttcgtgtatgatatgaccaacatggctagttttcatagcctaccatcttggatagaagaatgcaaacaacatttgctagccaatgatataccacggattcttgttggaaataaatgtgacttgagaagtgccatacaggtacccacagacttggcacaaaaatttgctgacacacacagtatgcctttgtttgaaacgtctgctaaaaaccccaatgataatgaccatgtggaagctatatttatgaccttggctcataagcttaagagccacaaaccattaatgcttagtcagccccctgataatggaattatcctgaagcctgaaccaaagcctgcaatgacgtgctggtgctaaataacagtctttattatattatctaattttgactaaagaaatacttttgaagtatgacagtattaagtcataagatttaatctcaactataatgggtcatcttgacactttgctgtttgtcattgtcacgcttttgtattttgtatctacttaagtttgtcactgtgacaacacaggaaaagttggttttcaggtgagattgaaaatgaagcaaagataggatgaatctgaacatctctccatctagagcccaatgaaggaagcttcaaatgagaacatgatggaatcagtaaccattcaatcttttgtcctaggattggaaaaaaatgttaaaggtttaggacacacctaatagtatgtcctttgaatgggaagtgttcttaataggataaaaactggtatttgcctctccccagagtactttttttgttttttcatagagacggggtcttgctatgttgtccaggctggccttgagctcctgggctcaagcaatcctcccacctcagcctccccagtactgggactgtaggtactcaccactgcatctggcctttctttgttttattaacatatttagttttgttattattggtatgttttagagccaagactttagttccagtgggataagaaggcatagaatgttttctggttcccagtccataaagaatgacttttccaagagttctggatgtttgattttctaattaatacttatcagatctacaaaaatcattattattttaaaagagttatttgagtttctttctttctttttttttttttttttttgagatggagtctcgctctgtctccaggctggagtgcagtggcgtcatctcggctcactgcaacctccgcctcccaggttcaagtgattctcctgcctcagcctcccgagtagctgggattacaggcgtgcactaccacacccagctgatttttgtatttttagtatagatggggtttcaccatgttggccaggatggtctcgatctcttgacctcatgatccacccgcctcagcttcccaaagtgctgggattacaggtgtgagtcactgcacccagccgagttgctttcttactaaatcctattaaaatatgcaaaaataagtcagattttaaggcaaataaagtgacataaggtgctttatattttattttggtatatttaaacagtgaaaaactaactgaaagcacatgaagagttgtaacttgggggaaaataggtaaacatagcttctagctaacacaggagacctattcttagcctttactaatttcaagcagtgtatcccatatggtatctcttgctcttccttcaactccaataaatttaatgactaaatgccaagttaacaaatcaacttccatttggattgtaggtgtgaaggcacaactctaattgctattagtctacatgtatttctgtaatagtattgtgtcatatcaatttttaagatgtctaaattttatggtcacaagttatccctcctcagtatgaaaaataaattagatattgaaaaatgtctaaacttcagtgatggaaagaatatttcaagaagttttttaacctaaatacttttattttgaatttaagtctttgcacataaaatatagcaagcttacatattaaactatttacgtaaatggaatgtaagccatgactttaactgaagtgttcacattcactaattttgatagattgctgtccttaataattttggaggaaattaagccaaatgattattgtactacagtattttcagaatatgggaaatcaattaaaaatgtaatctaatctagtttaagatttttgtttaatcatcatggtggtcctacctggataatttaactataaagacaaagtaattctattaaatgaactaactgaaaataataattataggaagtgattattccattttaagtattagagctcaaattggctttatttgcatttagggagatcatgttttcttaatcatgctggaatttaaaaattgttttacttgtatcgaaattaaccttgatttataactatttttgtaataaaacaatgacagctgtagtaactatgatgggtgtaacaacatttttttaaagaagggaatctgtttatcgcttttcaaaatattttctaaagtgggggaagaaagtttatagactttccaagcacatttatggttttttattactattattatggttttaaaaagagtaactttatttctttttgtaaggaattaagtaatatcctttacagttctgtgaaaggacttattttttaactgtaatatttattagttttaaaatatttgtatctcatttgtaacaatttgttttaattttttatatatatgtttttatttttaaaaaacataccagttgaatggggttaaagctttcaatatcttaaaatatttataaaacatttcactgttgcaaaatcacttccaaaatgatagctatctaacaactaattactaatttttaaagaacaaatcacacatttaaaaaatctgtagaatttattttaactatgacctttaattgaaaataaataattaaaatatcagacatgttttggaaaagtcttaatttgagaacaccaaaggaaactaccccagaatctaatgtagttcgctattaataacaatgcattattgaaagtatattgcaaatacatgtttcctcatgaaatctaagtaattttgttgtggaatagtgtcactgttacatttcccccatgaagtttaataaaccagcttagcccc

SEQ ID NO: 23639 - DNA, 5571 bp, Homo Sapiens
attttccccgcacaactgctaaagctccagagacacgagcgtgtgtggcagcaagagccgccagttcgggaccaccgcagctggggtggcagcggcgcaggaggggtcgcggggagggagtggtgagcgcaggcggcaggggtctgggaaagacgaagtcgctatttgctgtctgagcgcgctcgcagctcctggaagtgttgccgcctctcggtttgtctcgcctgctgcgctcctagaagggcggccgcctccaggactgaccagggccaagtggcgctcggcgggcactacatggcggagggtgaagggtacttcgccatgtctgaggacgagctggcctgcagcccctacatccccctaggcggcgacttcggcggcggcgacttcggcggcggcgacttcggcggcggcggcacgttcggtgggcattgcttggactattgcgaaagccctacggcgcactgcaatgtgctgaactgggagcaagtgcagcggctggacggcatcctgagcgagaccattccgattcacgggcgcggcaacttccccacgctcgagctgcagccgagcctgatcgtgaaggtggtgcggcggcgcctggccgagaagcgcattggcgtccgcgacgtgcgcctcaacggctcggcagccagccatgtcctgcaccaggacagcggcctgggctacaaggacctggacctcatcttctcggccgacctgcgcggggaaggggagtttcagactgtgaaggacgtcgtgctggactgcctgttggacttcttacccgagggggtgaacaaagagaagatcacaccactcacgctcaaggaagcttatgtgcagaaaatggttaaagtgtgcaatgactctgaccgatggagtcttatatccctgtcaaacaacagtggcaaaaatgtggaactgaaatttgtggattccctccggaggcagtttgaattcagtgtagattcttttcaaatcaaattagactctcttctgctcttttatgaatgttcagagaacccaatgactgagacatttcaccccacaataatcggggagagcgtctatggcgatttccaggaagcctttgatcacctttgtaacaagatcattgccaccaggaacccagaggaaatccgagggggaggcctgcttaagtactgcaacctcttggtgaggggctttaggcccgcctctgatgaaatcaagacccttcaaaggtatatgtgttccaggtttttcatcgacttctcagacattggagagcagcagagaaaactggagtcctatttgcagaaccactttgtgggattggaagaccgcaagtatgagtatctcatgacccttcatggagtggtaaatgagagcacagtgtgcctgatgggacatgaaagaagacagactttaaaccttatcaccatgctggctatccgggtgttagctgaccaaaatgtcattcctaatgtggctaatgtcacttgctattaccagccagccccctatgtagcagatgccaactttagcaattactacattgcacaggttcagccagtattcacgtgccagcaacagacctactccacttggctaccctgcaattaagaatcatttaaaaatgtcctgtggggaagccatttcagacaagacaggagagaaaaaaaaaaaaaagaaaaaaaaaagagtgatccagcccttattagggatgtgttttgtgcaatgatgatatgctcctggttttaagtttggcaaagcttatgtatcttttaatagatgtgggagcatgatctcgaaaggatccttttcccttctcttattctcctacccaattggattctatcctgcaaaaaaagagagacctgtcattagaagcaaccaggttctcctgatacaagagaagaaatgtgtgatgacaatatgggtttgctgtatctgctcccatagctttgccataggaaaaaaaaaagtggaaagtttcttttaagatggaattcataaaagggaaaatacggaggaaaaaaggtctcactccaacttgtgaatcagtttaggagttcagatattaatagtaacaatacaggaaaaaggggaactccaacgttgggattactgtctgaggcttgtagcaagtgctttctgtggaatgatcttgttttgctaacaaacggcttgctccaaatgaacagtagtaggttggtgcagttctcgtaacaatcagcagaacttatgatgacacaatccattaattccagctgcgtgcatagatcacatttttaaaatgtaaaaatgcaagcaaaaacagctgtaacaaagaaagtgtgctcaaggaccaaagatttaacagataaaaatacccaattagaagagatatagtagactatatgaagagagattatatttgttacacaccaatatacatcaaagtgcctgttgccttctgaaaatttgaagtggcaaaattattttatggtttaatgattattttattttatcagggactgcctcaagaagaaaataacataagcttgtgaatggtggagaaaatgccctattttttcttgcaaatacttgtataaagttaacatttgttgatctgatattatcataggtacatgtgtatgtgtgtataaattatatgtgtgtgtgtatatatacattttatatatacattttatatgtatatatacacagtagattgactatgatctagaataatgtctcaaataggaaatgtttaaatactgtgtgtttttatgttttcaacaggataacatgagacgtgggcatattgcaatgatgaattaaatccacatctaaaaaaattaaatgaaggagggaaccaagtaatatatttcataggaagagcagaaattatactgttttagtgggatttttttttctttttttttttttctttggtgagccataaaattccacaaatgggagaatatttgtttggcagagcactcttttttatattgaactgccattttgacagttggaacccatttattaaaaaaaaaattgcattcctctatgatgtttaatctagtggatcatggatcagtaataggctacttaaatccctgactgctaaaaaggatttccggtgatctaaacactacttgctaatgtttaaatgaattttaatgaatgcattctgcatttctggaccactagaatttagtaatgtgaaatgaccctttttacagaatatttgcacaattgcttaaaatttatatatgagatatatattatatataacattttataaatcatgtcaatatgaaacatctttgatctggttgtcacactgcatttaaatatttagtactgtactttaaatcgctttccattaaatcaaatccaactttattttctttcttacaaaaataccagttatacctttgtgaaatgaactggcattactatttcagttcaataacagctaatcctaaaaccaccctttctcctagccagtagttcctctagatactggtctctgaaaatgcatttgttaaaaacaaaacaaaactaacacataagaaccttccctttgtgttgtgaaacaaccacataatctccacaaccttagtggatgactgcttgctatgataattcctcgaagacccaattagaagattttcatcatcagttaaagagagaccacgggagaaaaaaatatcctcctgttggcagtataatttgtttgtttgtttatctagggatcctcagatgcttagtgctaggttaatccaggttaatccgtctggactaccttttgtgcatctttctttgaagccttaatgggaacctgatgggtttgctgtagcagcttccttgtgaattctgtcagagctgcaacagccgctgcactgccactcagttttctaaggaactcctcctactaccatcttggctcagtctccctcacttaagccctgggtttgaaaaattaattgcaacttcccaggaaacattgttcagtttgcagattaagcctggcactcacctatcagaaaccagagctccgcctgcttagttgtttcaaagttttctgaaagaaaactaggggagcacttgtgaacacaggagcagctggtgatctgctttcttaccctaactcttgacaaatgagtcgtctactattttaaagagtctggaggtctctgactctgccataacaataacctgctgttaatttataacacagatttttgtttggaagagccttatttgaaatacactttgatttattttcttaaatatttatattcttttcttgcttacttcagggttggtagcttagttggaagtgccagcacctggcacctattcatatagaacaggctgtactcaagacaacttctagcatttactttaagacttatataatttatttctattttgtgtgtactatagtcttgtgcatatgtagttgaacacacagtgaaatatatgtctctctttgtggatgtgcggcctaaaaatttgaatgtctggtgagagagagccatgtgtataggtcagagaaaagaacagctcccgactccctattagcgcctgtgatttgtttccttttgtgtttatctggcctagtgtgctgtttctttaaaccaggaagaagttttgtcttttggaggctcttctcacctgtccagcctggcatgtcagagaacacatagcctgtgacaatgccgtttttaaaggtttacttaatttgcagtaaatccagctgcctcaagaactcctacaccaagatggacatttcctttccagaaatgggatcaagtatctgctcactttggtattggatggactaataatgtagctccaaaaatgcaaggatggaagaatatgtgtaatccaaaccaaggaaggaaatgaaaagtgaacgtactgtttttaccacccctttctgtttgcttattgttggttgcttcactgtgcataaagttgttttcaatgcaacgcttgttaaataaatattgtgaactattttgtaaatgaaatgtattatgttgaaagctgtcagttcaaaaataagcttttttgttgttgttgaagatgaagtgtgttaggtgaaaccaaaaagccaaaaaaagtaatttcatatatagcatctatttgaatataatctttctttaaaatttcttttagcatagcattttcagtgctaagaaagaatctctatgttatattttgttaaaataatggctttctaacaaagcaaatggtaaagtacaaagttggaagatgtcaagttaacgagacttgctgcaaagccttgcagaacggaggaggctcgcctgctggctgtctctccctccaacctctctacaatcatgcctgctttgaggtgttctgttgcagcaagctgcaccttgggtcactcttttggaatattttgactataggctgcgtcacaggcagaaaaggagttgatggaaaatggactaaaaaactgacatgtttgaatcagtgctagagggaacagattgtgaattttgtttacagcatccaatatttggatttttttgtaaataaaaaagttatttttttctattg

SEQ ID NO: 23640 - DNA, 1092 bp, Homo Sapiens
ggagaatttccagcaggcaaggcagtggccgctttgactgcttgcttcggagatccgagacgacggagaaggcactcttatttaccgaccaagaaagctcctcccccgtcctccgttagctaattaaaacatttttcagggacgtagccatccagagacattccattattgttccattgacctttccctcatcactgagtcctttggagctgagttatgtcaacagctgccttaattactttggtcagaagtggtgggaaccaggtgagaaggagagtgctgctaagctcccgcctgctgcaggacgacaggcgggtgacacccacgtgccacagctccacttcagagcctaggtgttctcggtttgacccagatggtagtgggagtccagctacctgggacaattttgggatctgggataaccgcattgatgagccaattctgctgccacccagcattaagtatggcaagccaattcccaaaatcagcttggaaaatgtggggtgcgcctcacagattggcaaacggaaagagaatgaagatcggtttgacttcgctcagctgacagatgaggtcctgtactttgcagtgtatgatggacacggtggacctgcagcagctgatttctgtcatacccacatggagaaatgtattatggatttgcttcctaaggagaagaacttggaaactctgttgaccttggcttttctagaaatagataaagccttttcgagtcatgcccgcctgtctgctgatgagaactgtgcctggtcagcagctctagacctagagcccgtggacactatatgcggggcttcagtggaaagagagatctgcttaattctgtcccaggtgaaggagtccagcggttcctatcctggactacgggaaggttcccacatctctttgtcccattagttgagatgacttgcagtagaaattgtccacaactcttctgacctctgggactactgcaacagtagccctattgcgagatggtattgaactggttgtagccagtgttggggacagccgggctattttgtgtagaaaaggaaaacccatgaagctgaccattgaccatactccaga

SEQ ID NO: 23641 - DNA, 5376 bp, Homo Sapiens
ggcacgaggaaacctctaggtccaccacctccatcttacacgtgtttccgttgtggtaaacctggacattatattaagaattgcccaacaaatggggataaaaactttgaatctggtcctaggattaaaaagagcactggaattcccagaagttttcatgatggaagtgaaagatcctaatatgaaaggtgcaatgcttaccaacactggaaaatatgcaataccaactatagatgcagaagcatatgcaattgggaagaaagagaaacctcccttcttaccagaggagccatcttcttcctcagaagaagatgatcctatcccagatgaattgttgtgtctcatctgcaaggatattatgactgatgctgttgtgattccctgctgtggaaacagttactgtgatgaatgtataagaacagcactcctggaatcagatgagcacacatgtccgacgtgtcatcaaaatgatgtttctcctgatgctttaattgccaataaatttttacgacaggctgtaaataacttcaaaaatgaaactggctatacaaaaagactacgaaaacagttacctcctccaccacccccaataccacctccgagaccactgattcagaggaacctacaacctctgatgagatctccgatatcaagacaacaagatcctcttatgattccagtgacatcttcatcaactcacccagctccgtctatatcttcattaacttctaatcagtcttccttggcccctcctgtgtctggaaatccgtcttctgctccagctcctgtacctgatataactgcaacagtatccatatcagttcattcagaaaaatcagatggaccttttcgggattctgataataaaatattgccagctgcagctcttgcatcagagcactcaaagggaacctcctcaattgcaattaccgctcttatggaagagaagggttaccaggtgcctgttcttggaaccccatctttgcttggacagtcattattgcatggacagttgatccccacaactggtccagtaagaataaatactgctcgtccaggtggtggtcgaccaggctgggaacattccaacaaacttggctatctggtttctccaccacaacaaattagaagaggggagaggagctgctacagaagtataaaccgtgggcgacaccacagcgaaagatcacagaggactcaaggcccgtcactaccagcaactccagtctttgtacctgttccaccacctcctttgtatccgcctcctccccatacacttcctctccctccgggtgttcctcctccacagttttctcctcagtttcctcctggccagccaccacccgctgggtatagtgtccctcctccagggtttcctccagctcctgccaatttatcaacaccttgggtatcatcaggagtgcagacagctcattcaaataccatcccaacaacacaagcaccacctttgtccagggaagaattctatagagagcagcgacgactaaaagaagaggaaaagaaaaagtccaagctagatgagtttacaaatgattttgctaaggaattgatggaatacaaaaagattcaaaaggagcgtaggcgctcattttccaggtctaaatctccctatagtggttcttcgtattcaagaagttcatatacttattctaaatcaagatctgggtcaacacgttcacgctcttattctcgatcattcagccgctcacattctcgttcctattcacggtcacctccataccccagaagaggcagaggcaagagccgcaattaccgttcacggtctagatctcatggatatcatcgatctaggtcaaggtcacccccttacagacgctatcattcacgatcaagatctcctcaagcgtttaggggacagtctcctaataaacgtaatgtacctcaaggggaaacagaacgtgaatattttaatagatacagagaagttccaccaccatatgacatgaaagcatattatgggagaagtgttgactttagagacccatttgaaaaagaacgctaccgagaatgggagagaaaatatagagagtggtatgaaaaatattataaaggttatgctgctggagcacagcctagaccctcagcaaatagagagaacttttctccagagagatttttgccacttaacatcaggaattctcccttcacaagaggccgcagagaagactatgttggtgggcaaagtcatagaagtcgaaacataggtagcaactatccagaaaagctttcagcaagagatggtcacaatcagaaggataatacaaagtcaaaagagaaggagagtgaaaacgctccaggagatggtaaaggaaataagcataagaaacacagaaaaagaagaaaaggggaggaaagtgagggttttctgaacccagagttattagagacttctaggaaatcaagagaacctacaggtgttgaagaaaataaaacagactcattgtttgttctcccaagtagagatgatgccacacctgttagagatgaaccaatggatgcagaatcaatcacttttaaatcagtgtctgaaaaagacaagagagaaagggataaaccaaaagcaaagggtgataaaaccaaacggaagaatgatggatctgctgtgtccaaaaaagaaaatattgtaaaacctgctaaaggaccccaagaaaaagtagatggagaacgtgagagatctcctcgatctgaacctccaattaaaaaagccaaagaggagactccgaagactgacaatactaaatcatcatcttcctctcagaaggatgaaaaaatcactggaacccccagaaaagctcactctaaatcagcaaaagaacaccaagaaacaaaaccagtcaaagaggaaaaagtgaagaaggactattccaaagatgtcaaatcagaaaagctaacaactaaggaagaaaaggccaagaagcctaatgagaaaaacaaaccacttgataataagggagaaaaaagaaaaagaaaaactgaagaaaaaggcgtagataaagattttgagtcttcttcaatgaaaatctcgaaactagaagtgactgaaatagtgaaaccatcaccaaagcgcaaaatggaacctgatactgaaaaaatggataggacccctgaaaaggacaaaatttctttaagtgcgccagccaaaaaaatcaaactcaacagagaaactgggaagaaaattggaagtacagaaaatatatcaaacacaaaagaaccctctgaaaaattggagtcaacatctagcaaagttaaacaagaaaaagtcaaaggaaaggtcagacgaaaagtgactggaactgaaggatccagctcaactctggtggattacaccagtacgagctcaactggaggcagtcctgtgcggaaatctgaagaaaaaacagatacaaagcgaactgtgattaaaacgatggaagaatataataatgacaataccgcgccagctgaagatgttatcattatgattcaggttcctcaatccaaatgggataaagatgactttgaatctgaagaagaagatgttaaatccacacagcctatatcaagtgtaggaaaacctgctagtgttataaaaaatgttagtacaaagccatcaaatatagtcaagtatcctgagaaagaaagtgagccatccgagaaaattcagaaattcaccaaggacgtgagccatgaaatcatacaacatgaggttaaaagttcaaaaaactctgcatctagtgaaaaagggaaaaccaaagatcgagattattcagtgttggaaaaggagaaccctgaaaagaggaagaacagcactcagccagagaaagagagtaatttggaccgtctgaatgaacaaggaaattttaaaagtctgtctcaatcttccaaagaggctagaacgtcagataaacatgattccactcgtgcttcctcaaataaagacttcactcccaatagagacaaaaaaactgactatgacaccagagagtattcaagttccaaacgtagagatgaaaagaatgaattaacaagacgaaaagactctccttctcggaataaagattctgcatctggacagaaaaataaaccaagggaagagagagatttgcctaaaaaaggaacaggagattccaaaaaaagtaattctagtccctcaagagacagaaaacctcatgatcacaaagccacttatgatactaaacggccaaatgaagagacaaaatctgtagataaaaatccttgtaaggatcgtgagaagcatgtattagaagcaaggaacaataaagagtcaagtggcaataaactactttatatacttaacccaccagagacacaggttgaaaaagagcaaattactgggcaaattgacaagagtactgtcaagcctaaaccccagttaagtcattcctctagactttcctctgacttaactagagaaactgatgaagctgcttttgaaccagactataatgaaagtgacagtgaaagtaatgtttctgtaaaagaagaggaatcttcaggaaacatttctaaggacctgaaagataaaatagtggagaaagcgaaagagagcctggacacagcagcagttgtccaggtgggcataagcaggaatcagagccacagcagccccagcgtcagccccagcagaagccacagtccttctggaagccagacccgaagccacagtagcagtgccagctcagcagaaagtcaggacagcaagaagaagaagaaaaagaaggaaaagaaaaaacacaagaaacataaaaagcataagaagcataagaaacatgcaggcactgaagtggaattggaaaaaagccaaaaacacaaacacaagaaaaagaagtcaaagaagaacaaagataaagagaaggagaaggagaaagatgaccaaaaagtgaaatctgtcactgtgtaaaaagacagattttttaaattgacttaattactaagtcatctgtattaaattttgttataatgtaaagagattcaagccttgtaaataatgacatggaagaccctgtgctgcacttaaaatattgctgcttgattatttgatttttacatcagagctttataacacgaacttttgtacagaattgtgagttgtgaccatgtaacatgagaggttttgctagggcctattatttttaaccaccattaattagttggggtggagtttactgtaatgtgaaattttcacatttgaattttttaattgcctggcaaaagctgatataagttctaaaatatcagcagaatgatttgctgaattcattacatccctgttatgtcactttttgattacaataaaagttttcagtaaacttttcaaaaaaaaaaaaaaaaaaa

SEQ ID NO: 23642 - DNA, 10202 bp, Homo Sapiens
ttcaatttacgttctttacactacggggactggggtcgtctttgcccacgtcccgacaacttgttccctgaccccctcagggatggccccaaactgtccctgcctctggcaccccctttcattggttccatccatccccacaacagcctgccaatcgaagcccgtccctgcatccaggatggtaccagctcccgcccctcgccccccacctccacaggtgccttaaagggccctcgtccacccaaggtggggggcaggggccctcactctccggccctggtgtgggggagagagtgaggggttgggggatcggcagttgggaggggcgctctgagattaaagagttttacctctgagataaatgtgaagtgtgttgtgagtgttcattcaacattttctgaaaccgaatggcagcgtctgattatcagtgaatagctgggggttggaattactgtgcccattttatttacttttttgagacagggtcccactctcgcccaggttcaagcgattctcctgcctcaacctcccgagtagctgggattacgcgccactgccgcccgggtaatttttgtattttcagtagaaacagggtttcatcatgttggtcaggatggtcttgaactcctgacctcaaatgatccacccgccttggcctcccaaagtgctgggattacaggcgtgagccacggcgcctggctttgtgcccattttatagatatgaagacacaggttcatggggtggaggagagcatcccagtcttatgtgaccatggaacccaatcttgaggaggtgagtgttggagacagagcccacatattcaccagcaaagccaggaactccagccgggagtcttctattataaaaggactggagcaactgggcttggtgcctcacgcctataagcccaacacgctgggaggccaaggcgggaggatcacatgacaccaggaggtcgagatcagcctgggcagcacagtgagaccccttctccaaagggaaaaaaaatggctggaggttagaaagcaggtggaacctcgtccgaaattaggactaggtaaacgtagtcccaccagaccactaccgaaagaatgctaacactaaataagacttaaacggatctgagcactttgggaggccgaggtgggcggatcacgagatcaggagatcgagaccgtcctggctaacacggtgacaccccgtctctactcaaaatacaaaaaattagctgggcgtggtggcgggcgcctgtagtctcagctactcgggaggctgagacaggagaatggcgtcaacccgggaggcggagcttgcaggtgagccgagatcgcgccactgcactccagcctgggcgacagagtgagactccgtctcaaaaaaaaaaaaaaaaaagacttaaacagggctcactaccacccattttttaaagcttttgtcacgtgttagctcctttaatcgtcatggtaaccccacgaagcggaaacgattatcctttttatagatgaggaaactagaacatcgagggtgaagccaaagaaggacttaggggcgctgtcgggggcggaggtttcctcgactgacaatgaccatcagatgggaaaaaaatcttcctccctgggatgaaaattagaagtcaaggtggaaagaggcaaatctgctaacggaggatccagtccccgctaccggcctgagcctcgcgttgcagcaagagagatgaaggtcagggctgccgagagaccctgggggccgggagtcggggaagggggcgttgcagcaagagagatgaaggtcagggctgccgagagaccctgggggccgggagtcggggaaggggcgtggctgctgtgggaggaggccaggccccgccccccacgaggggacgagtcatttccgtccgccgaggaaccgaccgccgccggccgggttgcaggcggggcacctcgggcaggacctccctggtcggaagtggccgtgagcccaagccgcggtcccgggtgagtacggggcggggcggaggcatgtgcgaggctctctgcctgtacgctggaaagtggggattgcaactcggggagggatggagcacgcgtcgtcgcctgggaaacgggtcgacccgcggaaggcgagcgggtgggacttccggagcagttaatggtgggaaactttctagtggatgtgggaggaggcgggacttcctgcagcaaattggggctgtgcgccgctcaagcccgtttacctgctccccaggccggcacccaggatgggcgaggtggaggccccgggccgcttgtggctcgagagcccccctgggggagcgccccccatcttcctgccctcggacgggcaagccctggtcctgggcaggggacccctgacccaggttacggaccggaagtgctccagaactcaaggtgagcggggcctgagctggagggggtgtggcctgctgcaaaagcgggaacaatccagagggacgcttggctgctacgcgggattgcagtggtgcagccagccccgaagtcggaaggtgctctctagggagtacaggaagataaagtttgtgcttgatttagaattagctagatcctttgggggagaggggatcgagccgatttcgggaggatgttcactgcgcggatgatgctcaggccatcgagaaatccagaaacaggcgacgaccttcgtcaagagaaaaatgatcctgtggagaaaagtaaatgtcgctaggttgggatggatggtaacaggccaagccccggacctatatctagccacattttttgtcaaggaggaaaccaattctgtagagaaaagtacctccctgtcccttgcaaggaccagtgtcaggcaatcctagtgccactatctggctactgcatgtcaaggagccaatcccatgtagaaataaactgcctcttactccctggatgctatagcctgaagcaggccacactccccagaaatgagggacccaatcacacaaggatgcaaatcctgactccacccctccaatcctcagtggagctggtcgcagatcctgagacccggacagtggcagtgaaacaggtatcagtgcctctgcaagggccagcaaggcctggggatgggatttggggaggaattgcaagccgtcagtgaaggggtacattaggaaaatctgattggggccgggcgtggtggctcaagcctgtaatcccagcactttgggaggccgaggcgggcggatcgcttgaacccaggagttcgagaccagcctgagcgacatggtgaaacctgtctctctaaaaaattagcgggaatggtggcgcgtccttgtagttcctaatcgggaggctgaagcgggaggatcccttgagcccagtaggtcaagggtgtagtgagcagtgatcaccacactgtacttcagcctgggtgacagagcgagaacctgtctcaaaaaaagaaaagaaaaaatatggctgggagagaaggggatgtgtccagtaaagaaagaagtgttgcctgtttcagtggggtgggtacctgtccaagaccttagaaattggacaaggcggccaggcgcggtggctcacgcctgtaatcccagcactttgggaggctaggcgggcggatcacccgagatcaggagtttgtgaccagcctggccaacatggcgaaaccccatctctactaaaaatacaaaaattagcggggcatggtggcgggtgcctgtaatcccagctactcgggtagctgaggcaggagaatcgtttgaacccaggaggcacaggtttcaatgagccaagattgcaccactgcactccagcctgggcgacaaaacaagcctatatctccagggaaaaaaaaaaaaaaaaaaaaagattcggacaaggctgaaaacctgtaaccgttccaaagcccgttccaaagtgaagaggtggggcctaagggtctgatagtggtggagaagggctgatttttccgctgggtatttgattggaggaagctcccggtgggggcggagccagtcccagctcctccctctctttctgcagctgggagttaacccctcaactaccgggacccaggagttgaagccggggttggagggctctctgggggtgggggacacactgtatttggtcaatggcctccacccactgaccctgcgctgggaagagacccgcacaccagaatcccagccagatactccgcctggcacccctctggtgtcccaagatgagaagagagatgctgagctgccgaagaagcgtatgcggaagtcaaaccccggctgggagaacttggagaagttgctagtgttcaccgcagctggggtgaaaccccagggcaaggtgagggccacgcgagggctgtgggagccgccacagactgggacccaatcccacgtttgttgcgtgctctcaactttttagcctctacttacttttctgagaaatgggcctaatgataaatgcagggatcgttgtaagcagttaagcagtggggagaatgatatatgtcagctcctgcgttacccacagtgaccacccagtaatcagcaatgaccatgactgtctcagtaggagctattacgatgaggattttttatgtccagagagacttgagttcaaatgctgttaccaccacattctgagtcccatgtgtctcatctctacgatgctgaatccataaaaaaagcacgtggcatagttcctgacatgcagttagcacccaaagctttgctcctgcttttattttcacggttattagcccaccgaggtggtgaaggccaggggaagaaggaggctgggtaagacattaacccccattttaaagactgtaatcctggggctggcgtcataaggagtaacaggagacagtaaggttaagatgtcgggccccactcagaggcatcacggatgcttgagatggaggtgctctgtgactcggtttccccatctgtgagatggcagtgataacaccctgcctggcagggttggtgtgagtcagcctgtgagtgaggagggtcagaggtatcacagtgctgctgtttgtctttccttggtgacaccaggtggctggctttgatctggacgggacgctcatcaccacacgctctgggaaggtctttcccactggccccagtgactggaggtgataagaggcaaaacaagggagtgagtgaggcctggagtccacctctggccccgggtcacccctgccgcttcatacctgccgtaggatcttgtacccagagattccccgtaagctccgagagctggaagccgagggctacaaggtatgtgcagccgcctgtctgcatgggcacgtgcacgtggcggtccgaccgcagtcagaccaaggccctggtgagcagagcgtctggtgacaccctttgctccccagctggtgatcttcaccaaccagatgagcatcgggcgcgggaagctgccagccgaggagttcaaggccaaggtggaggctgtggtggagaagctgggggtccccttccaggtatggctggaagggaggctgggagctatgtgggggcacagagatccagagcgagggctttagactccagggtaagcggggcggaggcctcaggcagtgtgatgctgataggaacccatcatcagctacaaattctgggctggggtggcatccagtaggtgcttgagggggagctaaagctggtggccccctcccatccacaggtgctggtggccacgcacgcaggcttgtaccggaagccggtgacgggcatgtgggaccatctgcaggagcaggtgagtcttgcagcctgcccggcccccctccttttcctcactccagcccctcactcctgggctccccggcctccggttggggcctccttactcctctgtcctctctcgctccctccttctgttttttgctgtgacatcttagatgttggtttacgagaccagtgctttcagactttctacatcagagtagtagggaagctgttcattccttcgttcattcgtttgtgtgtgcatttgttctgaagtttagcgcattcttgagctgaaggtatcagtgagcgggacggcctgctccagcaggccctcacggcgagggcggtgactctaggcggatgggcagactggcgtgtaaaacagcaggagggagggagctggagaaagcaggcatcacccgtggtgggcagggatggcctctgaggaggtgacatcagaggaaaaggcctaaggcagggaaaggagggagccaggtggacacctggggaaagcggtccccccccttgtgggagtgacagcaagtgcaaaggccctgaggcagtccctagcctgggctagttagggacagcgaggcccatgcggctggccctaagcgagggaggggagagggcagggccacagggagggccccgcttttgccctgagggagggggaacctgggaggcgccggcacgccgaggctggagctgtagcagggtgggtgccctccggtggccgcgtggggaacgggaggaggtgaagtcgggagacctggagggagggggctgtgtggagagaccacggagtggggagggggccaggagcacggtgcaaagtggctggagagtgaggacatgaaaggtcgggggatgattcctgatgtggggcacagaccaggcgaagcagccccagggacccgctaccgctgcggggggacatttgtgggaagggcctcctcactaccgtctcccgtaggccaacgacggcacgcccatatccatcggggacagcatctttgtgggaggtaagggcctggaggctgctgagggtgggctgggacgcctccctccgagctggtgggaacggggtgtcccgtgtgttccagacgcagccggacgcccggccaactgggccccggggcggaagaagaaagacttctcctgcgccgatcgcctggtgaggcccctgccccctgccccgcgcccgagcccgaccctggcctgtgtctgatgttcgtcctcaacccctagtttgccctcaaccttggcctgcccttcgccacgcctgaggagttctttctcaagtggccagcagccggcttcgagctcccagcctttgatccggtgaggccctggggcgggggtgggggtggggatgggagggctcccggggatggggacggcatctcacgcgtgtcccccgcccctcgcagaggactgtctcccgctcagggcctctctgcctccccgagtccagggccctcctgagcgccagcccggaggtggttgtcgcagtgggattccctgggggtaagtgtcctgttcctgtgcgcgtgccctgagccccgcctgggtcctaggccacccaccgacactgccccccacacagccgggaagtccacctttctcaagaagcacctcgtgtcggccggatatgtccacgtgaacagggtatgaccaggcttttgccgccccaaatctattataaagttcccatctccacctctcaactggtttggggcggctttcctccatcattgcctccccgtccccgctcggggtcttctctccccctgggtctgccgatctgtttgtgacctctcgtgtccccaggacacgctaggctcctggcagcgctgtgtgaccacgtgtgagacagccctgaagcaagggaaacgggtcgccatcgacaacacaaacccagacgccgcgagccgcgccaggtagcgtgaccgcggggccgtaggtggcctgcggcggggtgggcggggcctgcacatccagctccttcccccacaggtacgtccagtgtgcccgagccgcgggcgtcccctgccgctgcttcctcttcaccgccactctggagcaggcgcgccacaacaaccgggtgagcccgctcagcccggacaccccccgggctgcaccccctgacccccctcctcccctgacccctgggcctgccgcccctctgatgttccccacagtttcgagagatgacggactcctctcatatccccgtgtcagacatggtcatgtatggctacaggtactgttggggatagcagggggcaggggcactggctgggccacatgatccaggctgtccctcactgttcccaccactgccaggaagcagttcgaggccccaacgctggctgaaggcttctctgccatcctggagatcccgttccggctatgggtggagccgaggctggggcggctgtactgccagttctccgagggctgagccccgcccagctcccctccacaataaacgctgtttctccttgagcttggccggcattttgctggaaggagggtggtccccacgggggaggggctccaggcctgccagtttcttacatggaggaggctttaaggacattttcaggtaacaaaaggtggggccctaccgaggggagtccagctgggacctggcatgagcactttagacattagccggggaacacacagggagggcgctgtgtggccccccgagagccagctggtgagcccacgagcctcaaccgaggggctggctcaaggccaggtgtgacccctgaggacaaaatccagctcaggttctgtgacactgaacttgaacccaaggcctgcgggtctggagattcgggggggaagagggtgtggacagccgagagccagacccagtgagttcccgggctgtccagcctgctgggccaccttagagctagggggctgcaaggcatcgggcagtgagcagagaaggcaggcaggtttttaaaaggctttattggggaaacgtagaggggtggggaccgtccttggaggcctcaggacaccatcctccatgttgctgggcagttgaagtccccaggggcccctgctcagaagcgtgtcacctgggggcaggggtgcagtgggggctgctggccacaggctcccaagcactgaccccacatccctgtgagcagaggcctggccccacccaggcctggataccacctcccatggccctgaggctgggctgcagtttcccgacagcctaggaccgctgggactgctgcctctccctctgctctgctctccccaaggccaaggtcgccctgcttctttcccaaccccaccccccccacatgccccagggtccctcctgtacatgacagggtcaccactcaccagtctctgcgggggcctcatctgtgactcctggaggggcccagcccggggtaaccactacccccccatctacggcgagaaatcagaggccagtggtgagcaggcagcgggggtggagggagactgagcagccctggaggccggccacctcacccctcgttgctgttgctcctgctccaggttccgctgcaggacctgctgctggttggcaatgacacgccggatgccgttgacaaagttgccctggtcatgggggatgaggccaatgaagattttcttctctgaagagtacaggagcataagcacgcggatctcacacgatgctttgtaggaaaagtgcacgcagccggcctggcaggcacagggcgtggtgtcaccagacagcaccacagggaccagcatccctccaaccacggcaccatgccgtggctccatgagcaggcacagcctaactgctctgtcctcacaccccccacccaccctggaggtgggcccccttattgggatgacacggtggccaagagcaatgggtgggccaaaggccaacaggctctgtcgggaagggcccaagaacctgcatttcagagctcctgggcaggccaggctgtgtctggggccacctcaccacagccacctgagccaaccggccatggcttcaactcaggagcccgagggatctgcagcggccggcccagcacaagcaagggctgaggtacatggagcctttctgggtttccttgaggaaactttttttttttttttgagactgagtttcgctcttgtcgcccaggctggagtacaatggcatgatctcagctcactgcaacctctgcctcccgggttcaagccattcttgtgactcagcctcctgagtggccatcatgcctggctaatttttgtatttttagtagagacggggtttcaccatgttggccaggctggtctcaaactcctgacctcaggtgatccacccgcctcggcctcccaaagtgctgggattgcaggcgtgagccaccgcacccggcccctgagggaatgcttgaaattgctttcatgtaaaagcacctacacccaggccccccc

SEQ ID NO: 23643 - DNA, 2137 bp, Homo Sapiens
  misc_feature (2108)..(2108): n is a, c, g, or t
cctggatcttgtttctggactgagatggatggagaggccacagtgaagcctggagaacaagtgcctttgtggacacatggatggccccctgatgacccatctccttcctttgctgcaggttcttctttcgcccttccacaaaaaagaccccatccgagatggctgtgggagggctctctcccctccaggacccatctccgggccatgggaacactcaggccttcctcgcccctctgctggcgggaggagagctcctttgcagctccaaattcattgaagggctcaaggctggtgtcaggggagcctggaggagctgtcaccatccagtgccattatgccccctcatctgtcaacaggcaccagaggaagtactggtgccgtctggggcccccaagatggatctgccagaccattgtgtccaccaaccagtatactcaccatcgctatcgtgaccgtgtggccctcacagactttccacagagaggcttgtttgtggtgaggctgtcccaactgtccccggatgacatcggatgctacctctgcggcattggaagtgaaaacaacatgctgttcttaagcatgaatctgaccatctctgcaggtcccgccagcaccctccccacagccactccagctgctggggagctcaccatgagatcctatggaacagcgtctccagtggccaacagatggaccccaggaaccacccagaccttaggacaggggacagcatgggacacagttgcttccactccaggaaccagcaagactacagcttcagctgagggaagacgaaccccaggagcaaccaggccagcagctccagggacaggcagctgggcagagggttctgtcaaagcacctgctccgattccagagagtccaccttcaaagagcagaagcatgtccaatacaacagaaggtgtttgggagggcaccagaagctcggtgacaaacagggctagagccagcaaggacaggagggagatgacaactaccaaggctgataggccaagggaggacatagagggggtcaggatagctcttgatgcagccaaaaaggtcctaggaaccattgggccaccagctctggtctcagaaactttggcctgggaaatcctcccacaagcaacgccagtttctaagcaacaatctcagggttccattggagaaacaactccagctgcaggcatgtggaccttgggaactccagctgcagatgtgtggatcaccagcatggaggcagcatctggggaaggaagcgctgcaggggacctagatgctgccactggagacagaggtccccaagcaacactgagccagaccccggcagtaggaccctggggaccccctggcaaggagtcctccgtgaagcgagcaacatgcccaggtttaagtactcttaaagaaatcaaagtcagtgctgtccttacccagaaccctcacagtctgctctgtgtctctgcagctcaggaggcagaaagggtcaccttaattcagatgacacattttctggaagtgaacccccaagcagaccagctgccccatgtggaaagaaagatgctccaggatgactctcttcctgctggggccagcctgactgccccagagagaaatccaggaccctgagggacagagagatgaactgctcagttaccatgggagaaggaccaagatcaaaggccttcaggaccccagcctctttccatcatccttcctccacctgtgggaagagaagctgatgcagccggtgctccacccatggaagaaaggctggctgtccttgggcccaagaaagtcaagcattatccacgtccaaaggtgacaagatgactcaaaggagacttcaagaacagtgtatgaaacactggaagaggtcacctaggaaaagcatgaaatttccattcctgaatgtttgaaaatagaagaggcttccaatcagtgtggaaagtgacaaatcccctatcaacactcccagcccttgctgggggctccttttctgactactgttagcactcagcctcccattcacatgtattatatttaagtgtaccagccttgccttctcaagtagattctaagctccttttaaggcagtaattgcattntatctgtctcatgatgcccccagagaact

SEQ ID NO: 23644 - DNA, 3623 bp, Homo Sapiens
gttgtcatggaggaaccaagatggcggctctggcctacaacctgggcaagcgggagatcaaccactacttcagcgtgaggagcgccaaggtgctggcgctggtggccgtgctgctgctcgcagcgtgccacctcgcctcccgccgctaccgaggcaatgattcgtgtgaataccttctctcaagtggcagatttcttggagagaaagtttggcaacctcacagttgtatgatgcataaatacaaaatcagtgaagcaaagaactgccttgtagataaacatattgcatttattggagattccagaattcgtcaattgttttattcttttgtaaaaataattaatccccaattcaaagaagaaggaaataagcatgaaaacattccttttgaagacaagactgcatcagttaaagtggattttctgtggcatcctgaagttaatggttctatgaaacagtgtatcaaagtgtggactgaggattccattgcaaagccacatgtgattgtagcaggagctgccacatggtccatcaagattcacaatggtagcagtgaagcgctttctcaatataaaatgaacatcacctccatagcaccacttttagaaaaattggcaaagactagtgatgtttattgggtcttacaagatcctgtttatgaagatctattaagtgaaaataggaagatgatcactaatgagaagatagatgcttacaatgaagctgcagtcagtattttgaatagtagcaccagaaattctaaatcaaatgttaagatgttcagtgtttccaaattaattgctcaagaaaccatcatggaatctttggatggcttacatcttcctgaatcgagcagagaaactactgcaatgattcttatgaatgtgtattgcaataagattttgaagcctgtagatgggtcctgttgtcaacctcggcctcctgttactctcatacagaagctagctgcttgttttttcactttatctattatcggatatttaattttttacataattcatcgtaatgctcatcggaagaataagccgtgtactgatttggaaagtggagaggaaaagaaaaatattatcaatacccctgtgtcttcattagaaatacttttacaatctttctgcaaacttggcctgattatggcatatttctatatgtgtgaccgtgcaaatctgttcatgaaggaaaacaaattttatacacattcatctttctttattccaattatctacattttggttttgggagtattttataatgaaaatactaaagagactaaagtattaaatagagaacaaacagacgaatggaaaggctggatgcaacttgtgattttgatttatcacatttctggagcaagtacatttttgcctgtatacatgcacattcgagttctggttgctgcatatttatttcagacagggtatgggcatttctcatacttttggataaaaggagattttggaatctatagagtatgtcaggttttatttcgtctcaatttcctggtagtggtgttatgtatagtaatggatcgaccttatcaattctattactttgtccccttggtcactgtatggttcatggtcatatatgttactttagcactatggccacaaataatccaaaaaaaagcaaacggaaattgtttctggcattttggcttactgttgaaactaggctttttgctgttattcatatgttttttggcatattctcagggtgcatttgagaagatcttttctctttggccattgtccaagtgttttgaactgaaagggaatgtatatgaatggtggttcagatggaggttagaccgttatgtatttttccacggaatgctgtttgcttttatttatctggctttgcagaagcgtcaaatactttctgaaggaaagggtgaacctcttttttcaaacaaaatttcaaattttctgttgtttatttcagtagtttctttcttgacctattccatctgggctagcagttgtaaaaacaaagcagagtgcaatgaactccatccgtctgtttctgtggtacagattttagccttcatcctaataagaaacatccctggatatgcccgttcagtttacagttcattttttgcttggtttggaaaaatttcattagagctatttatttgccagtatcacatatggctggcagcggacacaaggggtatcttggtactgatacctggaaaccctatgctcaacatcattgtcagcactttcatatttgtttgtgtggcacatgaaatttctcagatcactaatgatcttgcacagattattattcctaaagataactcatctctcttgaaaaggttggcatgtatagctgcatttttttgtggactcctcatcttatcatccattcaagataaatcaaaacattaggttccaaaaattctaaaaaacctaaactcttcaggctacctttgtgtgtctctagaagagaaaagcatctatctggagatataaatgtgtatgtaaatataaacgtttgtggcaagaggacagttctgtgacatctgttgaacatatgtggttgtatatattggaaatgtacatatccaatatgaaatactaaaacaaacaaacaaacaaaaaaccagaatgcattgtataggattgcatgtgaagtcttttctactgaatctatatttccatttgtaagtgattttaagttaacatatgaaggcagggaaatgattacctttccagtaaaaagtatagataatttaattaacttagtgacaccaccaagtgttttgatataactaaatttgtggtaataagactgtctgcacctgtattcattgtggaacttcctctttcattggaaactttcttactcaagaatgacggcagtattgttttcttatatgtgcaatgaagtggaatgataaacagtatgcctttaatttatatgtgttcttgttctgatgttgtttcctgaaatgatttttcttcctaactgtggttttcgggtatgcaagcctaaatctttgtacactttgtctcacagaatagttctgaggctccatgacagggttttgtcattgttgatgttattgttgcttcgttttataaaaaagccaaaattttttttccaatccaaacgttcacctgtttcctttcctcaagctataccagtgtaataccagttaccctgtggatccatttaatatgttatccccactaattaattttcgtatattatttccaatatttggaaagctctttatagccatttggtatttcctattacccacctcctattttaaatatttatcagtctaaacttgtgcagtgtagtaaacatgcaagttgttacgattgagctgtattaccataagtagaattttaagtaaactggtgaatttgggcaataaatgtttttgctttttgtttgatttttttttacaagctaactgttagaggtatacatttatttatctgttgtacagatttgattatgattttaatgtttgaaagattgcacttgtttgcttttactatatgtggggtaaaatatattttctgttcacagtatatgaaaatatggagtaatttaaacagtaaataaacattctgtggatgctt

SEQ ID NO: 23645 - DNA, 12227 bp, Homo Sapiens
tgagctgcgaggcccgagagtcagaacctgggggagagggatggtctctgcacgggggggagccggaggagccgccgccgctgccgacgccaccgccgcagccgccgccgccgccgccccggcacccgcctcccggcgctgacggtctcgtacgaagccggcgagggggagccagcagcggcggtcgccggcacgccgcccagcatggtccgggaaaccaggcatctctgggtgggcaacttacccgagaacgtgcgggaagagaagatcatcgagcatttcaaacgatatggccgcgtggaaagtgtcaaaattcttcccaagaggggatctgaaggaggagtggctgcctttgtggattttgtggacatcaaaagtgcacagaaagctcacaactcggtcaacaaaatgggtgacagagacctacgcacggattataatgaaccaggcaccatcccgagtgctgctcggggattggatgatacagtttccatagcatctcgtagtagagaggtttctgggttcagaggaggtggtggagggcctgcttatggtcccccaccgtcacttcatgcacgagaaggacgttatgagcggagacttgatggggcttcagataacagggagcgtgcttatgaacatagtgcctatggacaccatgaacgggggacgggaggatttgatcggacaagacattacgatcaggattactatagagatcctcgagagcggactttacaacatgggctctattacgcttctcggagtcgaagtccaaatcgctttgatgctcatgacccccgatatgaacctagggctcgcgagcagtttacactgcccagtgtggtacacagggatatctacagggatgatattacccgggaggtacgaggcagaaggccagagcggaattaccagcacagcaggagtcggtcaccacattcatcccagtctagaaatcagtctcctcagagactggctagccaagcatctagacccacaaggtcccctagcggcagcggctctagaagtagatcctccagtagtgattcaatcagcagcagcagtagtaccagcagtgacagcagtgattccagcagtagttcaagtgatgattctccagctcgatcagttcagtctgcagcagtccctgcacccacttcccagttgctttcatctctggaaaaagatgagccccgtaaaagttttggcatcaaggtccagaatcttccagtacgctctacagatacaagccttaaagatggccttttccatgaatttaagaaatttggaaaagtaacttcagtgcagatacatggaacttcagaagagaggtatggtctggtattctttcggcagcaagaggaccaagaaaaagccttgactgcatcaaaaggaaaacttttctttggcatgcagattgaagtaacagcatggataggtccagaaacagaaagtgaaaatgaatttcgccccttggatgaaaggatagatgaatttcaccccaaagcaacaagaactctctttattggcaaccttgaaaaaaccactacttaccatgaccttcgcaacatcttccagcgctttggagaaattgtggatattgacattaagaaagtaaatggagttcctcagtatgcgtttctgcaatactgtgatattgctagcgtttgtaaagctattaagaagatggatggggaatatcttggaaataatcgcctcaagctgggttttggaaagagcatgcctacaaactgcgtgtggctagatgggctttcttcgaatgtgtcagatcagtatttaacacgacatttctgccgatatgggcctgtggtaaaggtggtgtttgaccgcttaaaaggcatggccctggttctctacaatgaaattgaatatgcacaagcagctgtaaaagagaccaaagggaggaaaatcggtgggaataaaattaaggtggattttgcaaatcgggaaagtcagctggctttttatcactgcatggagaaatctggtcaagacatcagagacttttatgaaatgttagccgaaagaagagaggaacgaagggcatcctacgactataaccaagatcgtacatattatgagagtgttcgaactccaggcacttatcctgaggattccaggcgggactatccagctcgagggagagagttttattcagaatgggaaacttaccaaggagactactatgaatcacgatactacgatgatcctcgggaatacagggattacaggaatgatccttatgaacaagatattagggaatatagttacaggcaaagggaacgagaaagagaacgtgaaagatttgagtctgaccgggacagagaccatgagaggaggccgattgaacgaagtcaaagtcctgttcacttgcgacgtccacagagtcctggagcgtctccctctcaggcagagaggttgccgagtgattctgagaggaggctttacagccgatcctcagaccggagtggaagctgtagctcactctcccctccaagatatgagaaactggacaagtctcgtttggagcgctatacaaaaaatgaaaagacagataaagaacgaacttttgatccggagagagtggagagagagagacgcttaatacggaaggaaaaagtggaaaaggacaaaactgacaagcagaaacgcaaaggaaaggttcactcccctagttctcagtcttcagaaacggaccaagaaaatgagcgagagcaaagccctgaaaagcccaggagttgtaataaactgagcagagagaaagctgacaaagagggaatagcgaaaaaccgcctggaactcatgccttgcgtggttttgactcgagtgaaagagaaagagggaaaggtcattgaccacactcctgtggaaaagttgaaagccaagcttgataatgacactgtcaaatcttctgccctggaccagaaacttcaggtctctcagacggagcctgcaaaatctgacttgtctaaactggaatcagttagaatgaaagtaccaaaggaaaaggggctttcaagccatgttgaagtggtggagaaggaaggcaggcttaaagccaggaagcacctcaagcctgagcagcctgcagatggggtaagtgctgtggatctggagaagctggaagccaggaaaaggcgctttgcagattccaatttaaaagcagaaaagcaaaaaccagaggtcaagaaaagcagtccagagatggaggatgctcgcgtgctttcaaaaaagcagcctgacgtgtcctctagagaggtcattctgctgagggaaggagaggctgaaagaaagcctgtgaggaaagaaattcttaaaagagaatctaaaaaaatcaaactggacagacttaatactgttgccagccccaaagactgtcaggagcttgccagtatttctgttgggtctggctcaaggcccagctcagacctacaagcaagactgggagaactagcaggtgaatctgtggaaaatcaagaagtccaatcaaaaaagcccattccctcaaaaccacagctcaaacagctgcaggtattagatgatcaaggaccagagagagaagacgttaggaaaaactattgcagtcttcgtgatgaaacacctgaacgtaaatcaggccaagagaaatcacattcagtaaatactgaagaaaaaattggcattgacatcgatcacacgcagagttaccgaaaacaaatggaacagagtcgtaggaaacagcagatggaaatggaaatagccaagtctgagaagtttggcagtcctaaaaaagatgtagatgaatatgaaagacgtagcctcgttcacgaggtaggcaaaccccctcaagatgtcactgatgactctcctcctagcaaaaagaaaaggatggatcatgtcgattttgatatctgcaccaagcgagaacggaattacagaagttcacgccaaatcagcgaagattctgaaaggactggtggttctcccagtgtccgacatggttccttccatgaagatgaggatcccataggctcccctaggctactgtcagtaaaagggtctcctaaagtagatgaaaaagtcctcccctattctaacataacagtcagggaagagtctttaaaatttaatccttatgattctagcaggagagaacagatggcagatatggccaaaataaaactatctgtcttgaattctgaagatgaactaaatcgttgggactctcagatgaaacaggatgctggcagatttgatgtgagtttcccaaacagcataattaagagagatagccttcgaaaaaggtctgtacgagatctggaacctggtgaggtgccttctgattctgacgaagatggtgaacacaaatcccactcacccagagcctctgcattatatgaaagttctcgattgtcttttttattgagggacagagaagacaagctacgtgagcgagatgaaagactctctagttctttagaaaggaacaaattttactcttttgcattggataagacaatcacaccagacactaaagctttgcttgaaagagctaaatccctctcttcatctcgtgaagaaaattggtcttttcttgattgggactcccgatttgcaaattttcgaaacaacaaagataaagaaaaggttgactctgctccaagacctattccatcctggtacatgaaaaagaagaaaattaggactgattcagaagggaaaatggatgataagaaagaggaccataaagaagaagagcaagagaggcaggaattgtttgcttctcgttttttacacagctcaatctttgaacaagattccaagcgattgcagcatctagagagaaaagaggaagattctgacttcatttctggtaggatctatgggaagcagacatctgagggagcaaacagcacaactgattccattcaagaaccagtagttctgttccatagcagatttatggagctcacacggatgcaacagaaagaaaaagaaaaagaccagaaacccaaagaggttgagaaacaggaagatacagagaatcatcccaagaccccagaatctgctcctgagaataaagattcagaactgaaaactccaccttccgttgggcctccaagtgtcacagtcgtaactctagaatcagccccatcagcactagagaagaccactggtgacaaaacggtagaggcgcctttggtaacagaagagaagactgtggagccagctaccgtctcagaagaagcaaagcctgcatctgaacctgctcctgcccctgtggaacagctggaacaagtagacctgcccccaggagcagaccccgataaagaagctgccatgatgcctgcgggtgttgaggaaggttcatcaggtgaccagccgccttatctggatgccaagcctccaactcccggggcctcgttttcccaggcagagagcaacgtagatccagagcctgacagtacccagccactttcaaaaccagctcagaagtctgaggaagccaatgagccaaaggccgaaaagccagacgccactgcagatgctgagcctgatgcaaaccagaaagccgaagctgctcctgagtctcagcccccagcttctgaagatttagaggttgatcctccagttgctgcaaaggataaaaagccaaacaaaagcaagcgttcaaagacccctgttcaggcagctgcagtgagtatcgtggagaagcccgtcacaaggaagagtgagaggatagaccgggaaaaactcaagcggtccaattctcctcggggagaagcacagaagcttttggaattgaagatggaggcagagaagattacaaggactgcttctaaaaactctgctgcagaccttgaacatcccgaaccaagtttgcctctcagccgaacaaggcgccggaatgtaaggagcgtctatgcaaccatgggtgaccatgaaaaccgctctcctgtcaaagagcccgttgagcaaccaagagtgaccagaaagagattggagcgagagcttcaggaggctgcagcggttcccaccacccctcggaggggaaggcctccaaagacacgccggcgagccgatgaagaggaggagaacgaggccaaggaacctgcagaaacactcaagccacctgagggatggcggtcgccaaggtcccagaaaactgcagctggtggtggaccccaagggaaaaagggaaaaaatgaaccgaaggtggatgctacacgtcctgaggccaccactgaggtgggcccccaaataggcgtgaaagagagctccatggaacccaaggctgctgaggaggaggcagggagtgaacagaaacgtgacagaaaagatgctggcacagacaaaaacccccctgaaaccgcccctgttgaagttgtagagaaaaaaccggcccctgaaaaaaactccaaatcaaagagaggaagatctcgaaactccaggttagcagtggacaaatctgcaagtctgaaaaatgtggatgctgctgtcagtcccaggggggctgcagcacaggcaggggagagggaatctggggtggtggcagtctcccctgagaaaagtgagagtccccaaaaggaggatggtttatcatcccagttgaaaagtgatccagttgatccagacaaggaaccagagaaagaagacgtgtctgcctctgggccgtccccagaagccacccagttagccaagcagatggagctggagcaggccgtggaacacatcgcaaagctcgctgaggcctctgcctctgctgcctataaggcagatgcaccagagggccttgccccagaggacagggacaagcctgcacaccaagcaagtgaaacagagctggctgcggccatcggctccatcatcaatgacatttctggggagccagaaaacttcccagcacctccaccttatcctggagaatcccagacagatctgcaaccccccgcaggtgcacaggcgctgcagccttctgaggaaggaatggagacagatgaggctgtatctggcatcctggaaactgaggctgctacagaatcttctaggcctccagtcaatgctcctgacccctcagccggcccaacagataccaaggaagccagaggaaatagcagtgaaacctcacactcagtgccagaagccaaagggtctaaagaagtggaagtcactcttgttcggaaagacaaagggcgccagaaaacaacccgatcacgccgcaagcgaaacacaaacaagaaagtggtggctcctgtagagagccatgtccctgaatccaaccaagctcaaggtgagagtcctgctgcaaatgaggggacaacagtacagcaccccgaagccccacaggaagaaaagcagagtgagaaaccccattccactcctcctcagtcatgtacttctgacctaagcaagattccctccacagagaattcgtcccaagaaatcagtgttgaggaaaggactccaaccaaagcatctgtgcccccagaccttcccccacctccccagccagcaccggtggatgaggagcctcaagccaggttcagggtgcattccatcattgaaagtgacccggtgaccccacccagcgatccaagcatccccatacccacactgccttctgtaactgcagcaaagctctcacctcctgtcgcctctggggggatcccacaccagagcccccctactaaggtgacagagtggatcacaaggcaggaggagccacgggctcagtctactccatctccagctcttcccccagacacaaaggcctctgatgttgacaccagctccagcaccctgaggaagattctcatggaccccaagtatgtgtctgccacaagtgtcacttccacaagtgtcaccacagccattgcagagcctgtcagtgctgccccttgcctacatgaggccccgcccccgccagttgactctaaaaagcctttagaagaaaaaacagcacctccagtgacaaacaactctgagatacaagcctcggaggtgctggtagctgctgacaaggaaaaggtggctccagtcattgctcccaaaattacctctgttattagccggatgcctgtcagcattgacctggaaaattcacagaagataaccttggcaaaaccagctcctcaaaccctcactggtctggtgagcgcactcactggcctggtgaacgtctccctggtcccggtgaatgccctgaaaggccccgtgaagggctcagtgaccacactgaaaagtttggtgagcacccctgctgggcccgtgaacgtcctgaaagggcctgtgaatgttcttacggggccagtgaatgttctcaccactccagtgaacgccacggtgggcacagtgaatgccgccccaggcacagtcaatgccgctgcgagtgcagtgaatgccacagcaagtgcagtgaccgtcacagcgggtgcggttactgctgcatctggtggtgtaacggccacaacaggcacggtgacaatggcaggggcagtgattgcgccgtcaacaaagtgcaaacagagagcgagtgctaatgaaaacagtcggttccacccagggtccatgcctgtgatcgacgatcgtccggcagacgcgggctcaggggcggggctgcgtgtgaacacttctgaaggggttgtgctcctgagttactcagggcagaagaccgaaggcccacagcggatcagcgccaagatcagccagatccccccggccagtgcaatggacattgaatttcagcagtcagtgtccaagtcccaggtcaaacctgattctgtcacagcatcgcagcctccatccaaaggccctcaagctcctgcaggctatgcgaacgtggccacccattccacgttggtactgaccgcccagacatataatgcctctcctgtgatttcgtctgtgaaggccgataggccatccttggagaagcccgagcccattcacctctcggtgtccacgcctgtcacccagggaggcacagtgaaggttctcacccaggggatcaacacaccccctgtgctggttcacaaccagctggtcctcaccccaagcattgtcaccacaaacaagaagcttgctgaccccgtcacccttaaaatcgagaccaaggtccttcagccggccaacctggggtccacgctcacgccccaccaccctcctgctctgcccagcaaactgcctacagaagtcaaccatgtcccctcggggcccagcatcccagcagatcgaactgtctcccatttggcagctgcaaagctagatgctcattctcctcgaccaagtggacccgggccatcctcattcccaagggcaagccaccccagcagtactgcatctacggcgctctccaccaacgccacagtcatgctggctgcaggcatcccagtgccccagttcatctccagcatccacccagagcagtctgtcatcatgccaccccacagcatcacccagactgtgtccctgagccacctctcccagggcgaggtgagaatgaacactcccacgctgcccagtatcacctacagcatccggccagaagcgcttcactctcctcgggctccgctgcagccccagcaaatagaggtcagggccccacagcgtgccagcaccccgcagccagccccagctggtgtgcctgcactggcctcccagcaccctcccgaggaggaagtgcattatcaccttcctgtcgctcgagccacagcccctgtgcagtcagaggtactagtcatgcagtctgagtaccgactgcacccctatactgtgccacgggatgtgaggatcatggtgcatccacatgtgacggcagtcagcgagcagcccagggccgcggatggggtggtgaaggtgccaccagccagcaaggcccctcagcagccagggaaggaagctgccaagacaccagatgccaaagctgcccccacccccacccctgcccccgtccctgtccctgtcccccttcctgcccctgctcctgcccctcatggtgaggcccgtatcctcacagttacccccagtaaccaactccaggggctgcctctgacccctcctgtggtggtgacccatggggtgcagattgtgcactccagcggggagctgtttcaagagtaccggtacggcgacatccgcacctaccaccccccggcccagctcacacacactcagtttcccgccgcttcctctgttggcctgccttcccggaccaagacagctgctcagggccctcctcctgaaggtgagcccctgcagcctcctcagcctgtgcagtccacacagcctgcccagcctgcaccaccctgcccgccctcccagctcggtcagcccggccagccaccaagcagcaagatgcctcaagtgtcccaggaggcaaaggggacccagacgggagtagagcagcctcgcctcccagctggacctgcaaacaggccacctgagcctcacacccaggttcagagggcacaagcagaaacaggcccgacttccttcccctcccctgtgtctgtctccatgaagcctgaccttccagtctctcttcccactcagactgccccaaaacagccgttgtttgtcccaacaacctctggccccagcaccccaccaggactggttctgccacacactgaattccagccagcccccaaacaagattcctctccacacctgacttcccagagacccgtggatatggttcaacttctgaagaagtaccccatcgtgtggcagggcctgctggccctcaagaatgacacagctgctgtgcagctccacttcgtctctggcaacaacgtcctggcccatcggtccctgcccctttctgaaggagggcccccactaaggatcgcccagaggatgcggctggaggcaacgcagctggaaggggttgcccgaaggatgacggtggagacagattactgtctgctgctggctctgccctgtggccgtgaccaagaggatgttgtgagccagaccgagtccctcaaggctgccttcatcacttacctgcaggccaagcaggcggcagggatcatcaacgttcccaaccctggctccaatcagcctgcctacgtgctgcagatcttcccgccctgtgagttctctgagagtcacctgtcccgcctggcccctgacctccttgccagcatctccaacatctctccccacctcatgattgtcattgcctccgtgtgagccactgagtggttatcacctcagtgaatcttcccagggctctgcagtaaaaacaaaggacaacccagccaagcagaggaagaagctgccgaaggggacagactccactgccagacggccagccgtttgctgtcctgccgcccggctcagtcggccagacttcctctaggagtggtgctgctaccttgtatgtttacataatgctttagcccaaggacacatcaccaacccatggactcgcagacaccggggctgggtttctctttcctctttttggagaaaaggaacagggcagtggaatgaaaattttttgtttgtttgtttttaagaaacaagaaaacagaactgcctttgcactaaattagtgacttggacttttgcccagtgaagacaggctgtgacactctggatgtcttggtgtgtgtagacacacattgcagactcttaacgcaggaaggacttcaaacttctgctgagaccttggggtcaaggaacatttcattggttttttttgtccacccccatctcccttgctcatttggatgcgtcaccttaattctcctgctgccaccgtctttgattcaccgggatgtacagtttacagttgaagagcaaacagaaaggttttctcttggtgggatatgcagaacttgggatgtgtgtatatataaatatataatatatataaatatatataatactgacttaaaaaatcaaatcccccgacatacgttttttttaatctgtgccaaaaatgtgttttcagaggaaatcttattttcatattcagactttgtattgcccactcatttgtataagtgcgcttcggtacagcacgggtcctgctcccgcgatgtggaagtgtcacacggcacctgtacaaaaagactggctaacccctcttcctattaccttgatctcttcccccaacttcctaacacttattaatttatgaaactgtttttctcagcgcagttttgttttgtgtgtccattggattacaaactttattaaaaaatataaaacac

SEQ ID NO: 23646 - DNA, 4214 bp, Homo Sapiens
ggggagcgtggaccgcggcgctgctcagcggtggggctgccttcccccggccctcctccctggtccctggcgagggcactggcggcggcggggccggggtccgcaaggccggagaaggccgccgggcccgggcatggtggtctggggcaacgcggaagaagctccaccatgaggcgaggtggatggaggaagcgagctgaaaatgatggctgggaaacatggggtgggtatatggctgccaaggtccagaaattggaggaacagtttcgatcagatgctgctatgcagaaggatgggacttcatctacaatttttagtggagttgccatctatgttaatggatacacagatccttccgctgaggaattgagaaaactaatgatgttgcatggaggtcaataccatgtatattattccagatctaaaacaacacatattattgccacaaatcttcccaatgccaaaattaaagaattaaagggggaaaaagtaattcgaccagaatggattgtggaaagcatcaaagctggacgactcctctcctacattccatatcagctgtacaccaagcagtccagtgtgcagaaaggtctcagctttaatcctgtatgcagacctgaggatcctctgccaggtccaagcaatatagccaaacagctcaacaacagggtaaatcacatcgttaagaagattgaaacggaaaatgaagtcaaagtcaatggcatgaacagttggaatgaagaagatgaaaataatgattttagttttgtggatctggagcagacctctccgggaaggaaacagaatggaattccgcatcccagagggagcactgccatttttaatggacacactcctagctctaatggtgccttaaagacacaggattgcttggtgcccatggtcaacagtgttgccagcaggctttctccagccttttcccaggaggaggataaggctgagaagagcagcactgatttcagagactgcactctgcagcagttgcagcaaagcaccagaaacacagatgctttgcggaatccacacagaactaattctttctcattatcacctttgcacagtaacactaaaatcaatggtgctcaccactccactgttcaggggccttcaagcacaaaaagcacttcttcagtatctacgtttagcaaggcagcaccttcagtgccatccaaaccttcagactgcaattttatttcaaacttctattctcattcaagactgcatcacatatcaatgtggaagtgtgaattgactgagtttgtcaataccctacaaagacaaagtaatggtatctttccaggaagggaaaagttaaaaaaaatgaaaacaggcaggtctgcacttgttgtaactgacacaggagatatgtcagtattgaattctcccagacatcagagctgtataatgcatgttgatatggattgcttctttgtatcagtgggtatacgaaatagaccagatctcaaaggaaaaccagtggctgttacaagtaacagaggcacaggaagggcacctttacgtcctggcgctaacccccagctggagtggcagtattaccagaataaaatcctgaaaggcaaagcagcagatataccagattcatcattgtgggagaatccagattctgcgcaagcaaatggaattgattctgttttgtcaagggctgaaattgcatcttgtagttatgaggccaggcaacttggcattaagaacggaatgttttttgggcatgctaaacaactatgtcctaatcttcaagctgttccatacgattttcatgcatataaggaagtcgcacaaacattgtatgaaacattggcaagctacactcataacattgaagctgtcagttgtgatgaagcgctggtagacattaccgaaatccttgcagagaccaaacttactcctgatgaatttgcaaatgctgttcgtatggaaatcaaagaccagacgaaatgtgctgcctctgttggaattggttctaatattctcctggctagaatggcaactagaaaagcaaaaccagatgggcagtaccacctaaaaccagaagaagtagatgattttatcagaggccagctagtgaccaatctaccaggagttggacattcaatggaatctaagttggcatctttgggaattaaaacttgtggagacttgcagtatatgaccatggcaaaactccaaaaagaatttggtcccaaaacaggtcagatgctttataggttctgccgtggcttggatgatagaccagttcgaactgaaaaggaaagaaaatctgtttcagctgagatcaactatggaataaggtttactcagccaaaagaggcagaagcttttcttctgagtctttcagaagaaattcaaagaagactagaagccactggcatgaagggtaaacgtctaactctcaaaatcatggtacgaaagcctggggctcctgtagaaactgcaaaatttggaggccatggaatttgtgataacattgccaggactgtaactcttgaccaggcaacagataatgcaaaaataattggaaaggcgatgctaaacatgtttcatacaatgaaactaaatatatcagatatgagaggggttgggattcacgtgaatcagttggttccaactaatctgaacccttccacatgtcccagtcgcccatcagttcagtcaagccactttcctagtgggtcatactctgtccgtgatgtcttccaagttcagaaagctaagaaatccaccgaagaggagcacaaagaagtatttcgggctgctgtggatctggaaatatcatctgcttctagaacttgcactttcttgccaccttttcctgcacatctgccgaccagtcctgatactaacaaggctgagtcttcagggaaatggaatggtctacatactcctgtcagtgtgcagtcgagacttaacctgagtatagaggtcccgtcaccttcccagctggatcagtctgttttagaagcacttccacctgatctccgggaacaagtagagcaagtctgtgctgtccagcaagcagagtcacatggcgacaaaaagaaagaaccagtaaatggctgtaatacaggaattttgccacaaccagttgggacggtcttgttgcaaataccagaacctcaagaatcgaacagtgacgcaggaataaatttaatagcccttccagcattttcacaggtggaccctgaggtatttgctgcccttcctgctgaacttcagagggagctgaaagcagcgtatgatcaaagacaaaggcagggcgagaacagcactcaccagcagtcagccagcgcatctgtgccaaagaatcctttacttcatctaaaggcagcagtgaaagaaaagaaaagaaacaagaagaaaaaaaccatcggttcaccaaaaaggattcagagtcctttgaataacaagctgcttaacagtcctgcaaaaactctgccaggggcctgtggcagtccccagaagttaattgatgggtttctaaaacatgaaggacctcctgcagagaaacccctggaagaactctctgcttctacttcaggtgtgccaggcctttctagtttgcagtctgacccagctggctgtgtgagacctccagcacccaatctagctggagctgttgaattcaatgatgtgaagaccttgctcagagaatggataactacaatttcagatccaatggaagaagacattctccaagttgtgaaatactgtactgatctaatagaagaaaaagatttggaaaaactggatctagttataaaatacatgaaaaggctgatgcagcaatcggtggaatcggtttggaatatggcatttgactttattcttgacaatgtccaggtggttttacaacaaacttatggaagcacattaaaagttacataaatattaccagagagcctgatgctctctgatagctgtgccataagtgcttgtgaggtatttgcaaagtgcatgatagtaatgctcggagtttttataattttaaatttcttttaaagcaagtgttttgtacatttcttttcaaaaagtgccaaatttgtcagtattgcatgtaaataattgtgttaattattttactgtagcatagattctatttacaaaatgtttgtttataaagttttatggatttttacagtgaagtgtttacagttgtttaataaagaactgtatgt

SEQ ID NO: 23647 - DNA, 1618 bp, Homo Sapiens
aattgtcgacggccattaccaatcgcgaaaccgttttgtccttcctttatactaatgatagtgctttagaatgagaattatgcctgaaatctggcaaaccgaaaaatgttgctattgcaacaaagtggcaaaagctaaaagtaaggatttatcttcaaacataagctgagataacgaatagaagcaaaacgattggctactagctctctctctctctctctattaggtaaatttgaaaaataaaaatgacttggcacttttaaaggtaacttcaccaaagaccgaagagccagtaaccagtagctccaacttgtctcagcatcacatcttctgtgctctttatttttgccggaccagtttgcggttaggagaatgtgccttttttgtacctttgcatttaggttttataattttaattgatgtatggacacacacaaacaaaaaagcatgaaggaagatttggatccaagcagtgccacactttacatcatcactacaagtgttcaagtgtaaagaaaaccaattttgaaactatgaaattcctgattcataaatacacagttatttctactttagtacatataagataattcactgttattaaagctcttttattaaggcaattgcatatgttttaaaagcaatggtaaattaagttgtcttccaaaactgtgtacttgtctggtcagctgtgtatgatcagttatctacctcagagtctattttcttttgtgctgggacaggttgctggccctccctgtttccacagaccaaatcctcctagctcaggagctagggctaagcagttatttctttcaagtattttttagttcttaaattttatgcttgtatttgatgatagatgtcagtgacatttcatagtttcaaaagtccttgctgctctgagaagtgtagattctagtgaaaattacatagtcataagagaaatgtgtttttgtttttgtttttgtttcatttttttaaagttgtggtattattggttctatgctccctggaatattactgctttgtgaaagtccagactgaacgcagcaccctctgtgtacctagtacagttataaacctgggtctctcactacttgatatttttgcattagttaagacagaaatttgatagctcggttagaggggaggggaaatctgctgctagaaatgtctgaactaagtgccatactcgtctgggtaagatttgggaaacataacctctgtacataaaaaaaaaaaaatcagttaaacatcacatagtagacagccattaaattataaaaaaattaatttatgaagaaagaccttttgtacagattgaaaaaaaaagattttcatagagatatctatatgatcaagagagttaattttttatttttgttttactagtgccacagacttgccagtggtaacttatttgtccggttcaagataactctgtagttttctttcctaggacttgttgttaaacgccaaaagacatttttgaactgtacatttgatcagattgttagcttttctgttttatttcttttgagaacctttgaataaaaaacatctgaaattttaaaaaaaaaaaaaaaaaaaaaaaaaaaaaaaaaaaaaaaaaaaa

SEQ ID NO: 23648 - DNA, 3123 bp, Homo Sapiens
gccatgaacttccaggcgggcggggggcagagcccgcagcagcagcagcagctggccggcgggcccccccagcagttcgcgctctccaactccgcggccatccgggccgagatccagcgcttcgagtccgtgcatcccaatatctacgccatctacgacctgatcgagcgcatcgaggatttggcgctgcagaaccagatccgggagcacgtcatctccatcgaggactcgtttgtgaacagccaggagtggacgctgagccgctccgtaccggagcttaaagtgggcatagtggggaacctgtctagcgggaagtcagccctggtgcaccgctatctgacggggacctatgtccaggaggagtcccctgaaggggggcggtttaagaaggagattgtggtggatggccagagttacctgctgctgatccgagatgaaggaggcccccctgagctccagtttgctgcctgggtggatgcagtggtgtttgtgttcagcctggaggatgaaatcagtttccagacggtgtacaactacttcctgcgtctctgcagcttccgcaacgccagcgaggtgcccatggtgcttgtgggcacgcaggatgccatcagcgctgcgaatccccgggttatcgacgacagcagagcccgcaagctctccacagatctgaagcggtgcacctactatgagacgtgcgcgacctacgggctcaatgtggagcgtgtcttccaggacgtggcccagaaggtagtggccttgcgaaagaagcagcaactggccatcgggccctgcaagtcactgcccaactcgcccagccactcggccgtgtccgccgcctccatcccggccgtgcacatcaaccaggccacgaatggcggcggcagcgccttcagcgactactcgtcctcagtcccctccacccccagcatcagccagcgggagctgcgcatcgagaccatcgctgcctcctccacccccacacccatccgaaagcagtccaagcggcgctccaacatcttcacgtctcggaagggtgctgacctggaccgggagaagaaggctgccgagtgcaaggtggacagcatcgggagcggccgcgccatccccatcaagcaggggatcctgctaaagcggagcggcaagtccctgaacaaggagtggaagaagaagtatgtgacgctctgtgacaacgggctgctcacctatcaccccagcctgcatgattacatgcagaacatccacggcaaggagattgacctgctgcggacaacggtgaaagtgccagggaagcgcctgccccgagccacacctgccacagccccgggcaccagcccccgtgccaacgggctgtccgtggagcggagtaacacacagctgggtgggggcacaggtgccccccactcggccagcagcgcatccctgcactctgagcgccccctcagcagctcggcctgggctggcccgcgccctgaggggctgcaccagcgctcctgctccgtttccagcgccgaccagtggagtgaggccaccacttccctgcccccaggcatgcagcaccctgccagtggcccagctgaggtactcagttccagccccaagctggatcctcccccatctccccactccaaccggaagaagcaccggaggaaaaagagcaccgggaccccccgaccagacggccccagcagtgctactgaagaggcagaggagtcgtttgaatttgtggtggtgtccctcactgggcagacgtggcacttcgaggcttcaacggcggaggagcgggagctgtgggttcagagtgtgcaggcccagatccttgccagcctgcaaggctgccgcagtgccaaggacaagactcgactggggaaccagaacgcagctctggctgtgcaggccgtccgcaccgtccgcggcaacagcttttgtatcgactgcgatgcacccaatccagactgggccagcctgaacctgggtgccctgatgtgcattgagtgctcaggcatccaccgacacctgggggctcacctgtcccgggtgcgctcccttgacctcgatgactggccgcctgagctgctggctgtcatgactgccatgggcaatgccctcgccaacagcgtctgggagggggccttgggtggctactccaagccagggcctgatgcctgcagagaggagaaggaacgctggatacgggccaagtatgaacagaagctcttcctggccccactgccaagctcagatgtgccactggggcagcagctgctccgggccgtggtggaagatgacctgcggctgttggtgatgctcctggcacatggctccaaagaggaggtgaatgagacctatggggacggggacgggcggacggctctacatctctccagtgccatggccaacgttgtcttcacgcagctgctcatctggtacggggtggacgtgaggagccgggacgcccggggcctgactccactggcatatgctcgccgggccggcagccaggagtgtgcagacatcttgatccagcatggctgccctggggagggctgtggcttagcgcctacccccaacagagagcctgccaatggcaccaacccctctgctgagctgcaccgtagtcctagcctcctataaggcccaggaagagggcagaggggccagaaggactccatggcccaaagaccctcctccctgcaggcactgtgggaacagacacagagatggagaagcagggacatgctgagaggacgaagccaaggaaattagggaggagagtcaaagggatcaaggagagttggggatttgagctgcagcagagagggatgagggatttagccctctgccctaaggtgccattgaaaagggacaggacccttcggaggtgcctgtgaggagaggggagcaggacctctccctcctccagatccctgcctcctagtgccagcccctcacacgccttcatcctgaaacaggaagaggacggcaccaagttgggggtgctggatgaaagagacgaggggtgatctgtgagtcccatgtaaactttgtacattggaatatttatgtttgtgtacatatttgatgtgtgtgtgtatgatgagccaataaaccagactgtgtgcgcaa

SEQ ID NO: 23649 - DNA, 4563 bp, Homo Sapiens
ccctttcttctcttccagggctccgctttatttgctctcagaagtcggtttcctttccttttcttcagtgaatcggagctcagagcgttgcttcggtttccctccagacagttaggaatctgaaataaacaggaaagcactatgtcttcaatgtggtctgaatatacaattggtggggtgaagatttactttccttataaagcttacccgtcacagcttgctatgatgaattctattctcagaggattaaacagcaagcaacattgtttgttggagagtcccacaggaagtggaaaaagcttagccttactttgttctgctttagcatggcaacaatctcttagtgggaaaccagcagatgagggcgtaagtgaaaaagctgaagtacaattgtcatgttgttgtgcatgccattcaaaggattttacaaacaatgacatgaaccaaggaacttcacgtcatttcaactatccaagcacaccaccttctgaaagaaatggcacttcatcaacttgtcaagactcccctgaaaaaaccactctggctgcaaagttatctgctaagaaacaggcatccatatacagagatgaaaatgatgattttcaagtagagaagaaaagaattcgacccttagaaactacacagcagattagaaaacgtcattgctttggaacagaagtacacaatttggatgcaaaagttgattcaggaaagactgtaaaactcaactctccactggaaaagataaactccttttcgccacagaaaccccctggccactgttctaggtgctgttgttctactaaacaaggaaacagtcaagagtcatcgaataccattaagaaggatcatacagggaaatccaagatacccaaaatatattttgggacacgcacacacaagcagattgctcagattactagagagctccggaggacggcatattcaggggttccaatgactattctttccagcagggatcatacttgtgtccatcctgaggtagtcggtaacttcaacagaaatgagaagtgcatggaattgctagatgggaaaaacggaaaatcctgctatttttatcatggagttcataaaattagtgatcagcacacattacagactttccaagggatgtgcaaagcctgggatatagaagaacttgtcagcctggggaagaaactaaaggcctgtccatattacacagcccgagaactaatacaagatgctgacatcatattttgtccctacaactatcttctagatgcacaaataagggaaagtatggatttaaatctgaaagaacaggttgtcattttagatgaagctcataacatcgaggactgtgctcgggaatcagcaagttacagtgtaacagaagttcagcttcggtttgctcgggatgaactagatagtatggtcaacaataatataaggaagaaagatcatgaacccctacgagctgtgtgctgtagcctcattaattggttagaagcaaacgctgaatatcttgtagaaagagattatgaatcagcttgtaaaatatggagtggaaatgaaatgctcttaactttacacaaaatgggtatcaccactgctacttttcccattttgcagggacatttttctgctgttcttcaaaaagaggaaaaaatctcaccaatttatggtaaagaggaggcaagagaagtacctgttattagtgcatcaactcaaataatgcttaaaggactttttatggtacttgactatctttttaggcaaaatagcagatttgcagatgattataaaattgcgattcaacagacttactcctggacaaatcagattgatatttcagacaaaaatgggttgttggttctaccaaaaaataagaaacgttcacgacagaaaactgcagttcatgtgctaaacttttggtgcttaaatccagctgtggccttttcagatattaatggcaaagttcagaccattgttttgacatctggtacattatcaccaatgaaatccttttcgtcagaacttggtgttacatttactatccagctggaggctaatcatatcattaaaaattcacaggtttgggttggtaccattgggtcaggccccaagggtcggaatctctgtgctaccttccagaatactgaaacatttgagttccaagatgaagtgggagcacttttgttatctgtgtgccagactgtgagccaaggaattttgtgtttcttgccatcttacaagttattagaaaaattaaaagaacgttggctctctactggtttatggcataatctggagttggtgaagacagtcattgtagaaccacagggaggagaaaaaacaaattttgatgaattactgcaggtgtactatgacgcaatcaaatacaaaggagagaaagatggagctctcctggtagcagtttgtcgtggtaaagtgagtgagggtctggatttctcagatgacaatgcccgtgctgtcataacaataggaattccttttccaaatgtgaaagatctacaggttgaactaaaacgacaatacaatgaccaccattcaaaattgagaggtcttctacctggccgtcagtggtatgaaattcaagcatacagggccttaaaccaggcccttggtagatgtattagacacagaaatgattggggagctcttattctagtggatgatcgctttaggaataacccaagtcgctatatatctggactttctaaatgggtacggcagcagattcagcaccattcaacctttgaaagtgcactggagtccttggctgaattttccaaaaagcatcaaaaagttcttaatgtatccataaaggacagaaccaatatacaggacaatgagtctacacttgaagtgacctctttaaagtacagtaccccaccttatttactggaagcagcaagtcatctatcaccagaaaattttgtggaagatgaagcaaagatatgtgtccaggaactacagtgtcctaaaattattaccaaaaattcacctctaccaagtagcattatctccagaaaggagaaaaatgatccagtattcctggaagaagcagggaaagcagaaaaaattgtgatttccagatccacaagcccaactttcaacaaacaaacaaagagagttagctggtcaagctttaattctttgggacagtattttactggtaaaataccgaaggcaacacctgagctcgggtcatcagagaatagtgcctctagtcctccccgtttcaaaacagagaagatggaaagtaaaactgttttgcccttcactgataaatgtgaatcctcaaatctgacagtaaacacatcgtttggatcatgccctcaatcagaaaccattatttcatcattaaagattgatgccacccttactagaaaaaatcattctgaacatccgctctgttctgaagaagccctggatccagacattgaattgtctctagtaagtgaagaagataaacagtccacttcaaatagagattttgaaacagaagcagaagatgaatctatctattttacacctgaactttacgatcctgaagatacagatgaagaaaaaaatgacctagctgaaactgatagaggaaatagattggctaacaattcagattgcattttagctaaagacctttttgaaattagaactataaaagaagtagattcagccagagaagtgaaagctgaggattgcatagatacaaagttgaatggaattctgcatattgaagaaagtaaaattgatgacattgatggtaatgtaaaaacaacttggataaatgaactggaactgggaaaaactcatgaaatagaaataaagaactttaaaccatctccttccaaaaataaaggcatgtttcctggttttaagtaataatacttaactctcaagctaagtaaaaatatgtcatcatgcttatgttaaactctgttgtaagtaataatttgtaaattgaataagtggcatactttttaaaaaactattttatgttcagaaatgtaaatgttattattcttgagtttttgggtttctttttttgagacagagtcttggtctgttgcccaggctggaatgcagtggtgtgctctgggctcactgcaaccttcacctccaggttcaagtgattctcctgcctcagccttctgagtagctgggactacaggtgtgcaccaccatgcccagctagtttttgtatttttagtagagatggggtttcaccatgttggccaggctggtctcgaactcctggcctcgtgatctgcccttctctgcctccctaagttgctgggattacaggtgtgagccacagtgcctggcccattcttgagttttgataaagtaattcatacaaagtattgtcctcaaataagtcttccttagctaaatgcaatttaaaattattcaaagatcctagggcacttctagtttcacgtaaatattcatattaggtggttctcttcatccatttgttttcacactgatacataaaaattaacagcagtctaatctagtgacacctcagtcatatttcgctatagattttac

SEQ ID NO: 23650 - DNA, 94605 bp, Homo Sapiens
agatcgcaccactgcactccagcctgggcgagagcgagactccgtctcaaaaaaaaaaaaaaaaaaaaaaaggccaggcacggtggctcacgcctgtaatcccagcactttgggaggctgaggtgggcgtatcacgaggtgaggagatcaagatcatcctggccaacatggtgaaacccaccccgtctctactaaaaaaaataccaaaaattagccaggtgtggtggcaggctcctgtagtcccagctactcaggaggctgaggcaggtgaatagcgtgaacccgggaggtggagcttgcagtgagccaagatcgcgccactgcactccagcctgggcgacaaagccagactccgtctcaaaaaaaaaaagaaaaaaaaggctgcttgctaacacgctgctggtacttcccaagtatttgaaacttctgggagaaaattcacgtggatgcaactgagctttatgcagcagggctgcagtagtgtggccacggcagtagaaacgagtgttgagctgtgtcccaggaaggagacttggtgccttgtttgtttaccagttttaggaaacagtgacaaagattggccaatactactgtgaagcttgcttgcttcttttcgacttttaattcatattgtgaaaaatacatggaaacatattctctgtctgtggaagcctctgaaagagcatttgtgcatagcaaggcggcttctggaaccttctccccattgcgttttggcaggagatgagggagatgttgggctgtgcacccctggtggattcgcacaggaaaggtgaaaagtatgccacagcaatgggaaaaagtaaatccaggaagtgctcacatgactataaaaggagttatgtacatttcctggggaattctttgctctttcacagagcaggctgtgcagcctggtggagtcagggagaggttgtccatccatggggggtgaccagagttagggaggcccctttgcacatgcaggcacaggggattctctgattgtcctggctccgcgcagcctggggccaggtcagtacaactgtggggatgaacatggagggctcagggagtgcatgtttgcagggagtgggcagcgggtcaggtcacctgcagcattcaaacccagaagagaagctaagccctgtggacggcaaatggacccaaggacacgggcagggacagagctgcttccactgagccagctgttgtgcttgtgttcttggccccctggccggggttgtctttgatatgtgtcgtgtgtgctgggccctgcaggctgggcttggggggccactgggtggcctgggaggctaccagtgtggcatttggcccctccccagcgtatggccccaccccatccctgcctctcttcttacttacatcctcctctttttattctccccaacctctttctctcttgtgtgtttattcatgcattctccctaccatgtgcttgcagagtcttctgggatacccaggggtattactggcatgtttactaaaggcaccgctgatccccaaaatgggccctttgtgaaatgaccactgaaggggtggagggaggagtccttgctttctcagtttaccaagacagcagttactggtttgagactttgaagacaggatggcttgatttttatggataaacatcattatctcattggtgtattttagggggtgatattttactatccttgaagcttggatatctagatgacagttttgatctggttttactgggatcaaaagcagttttagtacgtcaagtcatcttaactgtccattgagatgggactcctgtaaaatcactttgtatctggagatagcaatccaagtgttctggctgggcgcagtggctcacgcctataatcccagcactttgggaggccgaggcgggcagatcacgaggtcaggagttcaagaccagcatggccaatatggtaaacgctgtctctcataaaaatacaaaaaagttagctgggtgtggtggtgcacgcctgtaatcccagctacttgggaggctgaggcaggagaatcacttgaacctgggaggcggaggttgcggtgagccgagatcgtgccactggattccagcctgggtgacagagcaagactctgtctcaaaaaaaaaaaaaagaaaagaaaagaaaagaaaagaaaaagaaacccagatgttctgtgattatcctctgaaaatcgtggtgcttaaaaaatcacggcaagcatcttccgccttgaagagtaacagtaatagtgacagtcattagcccgacatgttgtagttgatgatcaggttcatcttcgttggctcattggaatcttaccaataataaaccagtatttgggtactcttaccctgcaacagatggggaacaccaggccaaaaggttaagcaggaatggagaggcgtgggaactcagggcttcatcctcttctcgtccagggcagcacccttcaccaggcatctcccatgtccagctccaaataagacacaggtcctcgctgtcccctgtacttccttctagaacagcacgtggtagtccagcagctcagatacccccagtttcagcaagattttggggtttactgattttaggtgaaggaaaggattctcaatgaaaacactttcatttaaaaacaggaaatcatacatcataactcctcctttgccgggagagagatttttttctgcatcacaattgcaaatgccttgcttatcttttttttttctttttttccccctaatggagtcttagagcattcctctgcgtgacatagggacatggttgcaccttatctgagggtcaggatggagcagattggtgtgtgggtcccaggtgccttccctgtgagggagggaagctttgctgcttctgctcagcggctgccctggtgatcaattctggctaagaggaaagtacattccataacatttctggtgacttgctgatcatgtgatgttgtcataatagacattgatcattttatgacccagactgatccaatgtaaattcattctaacatggtgggtgctgtttcagcaatgagttgttggagacctgggactcaaaggacatctggtccttgccttagccagctgtcaaaggggttggaccaatagcgtttggggccccttcagctctcatgttgagtgaatctgtgactctaggatgttgggagtgggagatgggccaagatttgggaccagactgaatccctgccgtcttctcctccttctcatatttctcttcctttcttttttctgtttggtctccatagtttaaagtatttctattagtcactcaattcagccgcattttgacttaaccagccttgagagacctgctctaagagccttcaaactaagttcccaacatcttttaaacttcgctttgtccttcacttctcagctcaaatgcctgttctttggagaagtctctctgattgtcttatacaacagggattgaaacactttttgcaaaggcaagactgcaaatattgtagggcttgcaggccacagggtttctgttgcaatgactgaactctgcccttgtaacacacaaaagcagcgccagacaataaggaatgggcatggccgtgttctaataaagctttgtttacaaaaacaagctgcggctggcttggcccgcgggccatcatccgccacctcctgccaagggaccagccctcctctgccactgctgtgtgtgcccgtaccttgccatgtccttcttcctaatgcttaagcaagaacactgtattttttgtagattttgtatctatcgtctgtcacccccaccataatggacgctccacaagtgcagggtctttatcttgtctcctcttcctgcggagcttccagaataggcttgttgtatagtagacatgcagtaaataattactgagtgagaaaacaaatgttagaaacataacctgcccgtcagctgggctttccttgctttggggtgcatttgtccatgttacatttagcttctattttcctccttttgttgtgattctctctttgtgttcacgtgctagttggcatctggggcttggcatgcatgcctttggtgatgcccccttgagaagccccgggcctcctgtgtggctgttgatggtggtggtgagggggatttcttgtccccaatgcatgtggcccttgctcctttcacagtgggactgaaacacagattgacttgatttcagtctcctgtgggagatttgtccttctgaggggtgtctaggcaaaacagttgcctttgatcctgccctgatttggtgctgtctcagtgctgggaagctttgcattttctaggcctggaactctgggtcccattcacacttctcactggagggatgaaagcctccttcttgggccctcgtggccatcccagctggccgctccagctgttgttattaataaatgccagtggtgtcctctcaactccagtggagaggttgtgtgggttggatccttgtgggtccaatcccgtgctgcatatctgggaactgtgaccttgtttgacatggccatgtgtctgccaagcaggatggggtcggtggcgggaagcacagagaaccatgagacccacgccttttctctagggtcttggtgtctccgtggggagatgggatgcattcatgagaatatggtgcatcccatgagctggcaaagtgggcaggtgtatggtggagggggagggagccagtgctcttccgcccagggggactgatgcaaggtgactcccatcacggaggaccctgcttgatttgggtcttggagggtggatgacagggaagagagggaggaaggactgtccctacagaagaagcctgggacatgtgtggtgggtgttggtgagcagggtgggactcagctttgtcgtgtggagtcgggggcacacagcacccagcggcttcatttcaggacccctgtaagtgcaacggagactgccttgcagctgtctgggcattttgctctttttgtttttggtgttaaggcctctaggcttttatcattttgggaaaacagcaggtctcagctcacccagcacagaattaggtctctaaaccggcaaagtactgatctgaacatgagagctcatgaaaactctgggtggcaaaaaatcttgtagagggatcccttagttttccttgagtttgagacatttcattttaagaagcttggccttggggcaacagaccaagtctagcacaaataataaagagtgtatgtgtgtgtggcgcacagtcacgtttcacgtacaaatgtgtaaaactcggcattcttacaaataaaacataccacaataacagatttttgcaggtattacggtgcaagcacgctttggcaatcaatttaaacattttcttgtggaatattcttccatgctatggtttggtttgtttctaaagccccataggatgtggaaactaagtcaggacagattttctgggggtatcctctggttgctgttccagatacttcctgacttcctggggcttggggagaggtggatgcctgctggggccatttgcagagcaagaacagcttctcctgggaataagcaggcctccactgacctttgttggacgttctctcctctccctccttcccatctgtctccgtcttctctctcccacctttctgcagagccaccaaccaaataccaaatctctcaaccagaagtgtacgtggctgcgccaggggagtcgctagaggtgcgctgcctgttgaaagatgccgccgtgatcagttggactaaggatggggtgcacttggggcccaacaataggacagtgcttattggggagtacttgcagataaagggcgccacgcctagagactccggcctctatgcttgtactgccagtaggactgtagacagtgaaacttggtacttcatggtgaatgtcacaggtgagttggcccgccagcactatgctctctcttctctgtagccattacatttttttggccaagtgaaaaggtagtgagatctctaattgtaattggatgccaggcatacagcttcatagtttttgaaattcttctttgggacctggtgcaccagaaaggccgatcattaagaatgatagaattcttgtgcacaaagtaacatttttcttaagatagtacgcttttatttaagtaaatacatgcttttttttttttttttttgtaccactgacatctctggcatttagaatatagggttgaaatttggatactcaagatttctgattcatttattagagtttgagtttctctccatgatttccttctatgcagtgagcgggacagaacaggccccctttgtggccgagtttaaagttctgctttcagaatgttagttgacgatgagaagggccacacagggactgagttttgttagggatcaatttctttcttcaaggagaccccgcatactgaaaggttaatgttggaaaaagagtctttgggtgctacacaattggtaaatttgtcaggggcttgaatactgtttgaagcttgaaatccagttctcatatatccaattttatagcctgtttaaatagcgtgaaagcagaaaacattgagaatcataacatagaccaactgtcatcatggagggaaaatttaagccattaaaactatcttaactgaaaacaatcccaggctctttgcgagggttcctgggttgttgactttgctatggagaaggtctcagttgtagataattgcaacctttttgctttgcaaaaaacacatccatggaatatgttcttttgcatacagatgccatctcatccggagatgatgaggatgacaccgatggtgcggaagattttgtcagtgagaacagtaacaacaagagtaagtaactgcccggctccgatggtccccgagagaggagcatggagggaagttctgcctgtcacctgtcttcttgtcgactcttctgcgccatgctgtgtcccgcggcccttgcctttccccgctgtgtctactttcctgactttcaaacctgagaataaaccagtgttgctgcacagccttctctatcgtttgtcctttcttctcgtgtcactggtcattcgtttttcaaagcagttactacttttctttccttgattttcccttttccctttgacttctccctattcagagacataagaatagtagaaccatgtaacatcttggttttccttgtaatcagtgattgtgcttggtttaatccagtggtgtgtgactggggcaattgcctattcttgctctcccggcacattgggcaatatttggttgtcacaacagagggagggggtgctggtggcctttagctggggaggggccagggatgcagagcacagccccataacaaagaattatctggtccaagatgtcaatcatccctagggtgagaaacccggcctcctacaacacacacctcatgctgagtgaaaatgaaggacgtgtgccttactttgtagaccacgattgaaaagggagccaagggtggcttgcttaatgagggccatgaacactgagcgctaacatgggagaggccatttacttgcgaggaagaacatggcgtagcctcttggagctgggcaacctgggtttgaatcttgctccacaacttctgagttgctcatttcacttctgtgccttagtttctttataaaatgggagtaataataataatactattttctggggttgttatgaggattacatgagttcctagttgtatagtgctcagaagagtggttgcttgcaaatgtttattcaatacacaaaatacaatatagcattacttgcattttccaatgacttggctagaatgttcctaaagtgtttgtacatagggtattgggattctctgcttacatggtatattctacatttttcttaaaaggattttagtcaatttggtacatttaaacaaggcctaagtaatataccacacccggctaatttatgtatatatatatattttttcccgagatgcagtcttgttctgtcacccaggctggagtgcagtggcgccatcttggctcactgcaacctgcacctcccaggttcaagcaattctcctgcctcagcctcccgagtaactaggactacaggggcctgccactacacctggctaatttttgtatttttagtagagatggggtttcaccatgttggctaggctggtctcgaactcttgaccttgtgattcacctgcctcggcctcccaaagtgctgagactacaggcgtcagccaccgtgcccagcctaatttatgtatttttagtagagacagggttttaccatgttggccaggctggtcttgaactcctgacctcaagtgatccacccgcctcagcctcctgaagtgctgggattacaggtgtgagccactgcgcctggcaatactttattttttcgagcagtttcaggtccacagcaaaataaagaggaaggaacaaagatttcccatataatcttccccaacacatgcatagcctgtcctgttatcaacatccccaccagaatggtacatctgttccagttgatgaacctgcactgccatcattatcacccaaagtgtgtggttgactttagggtatgtaatcatacagtgtgtagcctttacagattggcttctttgacttagtaagatgcatgtaagtttctctcatgtcttttcatggcttgatgggtcatttgtttgtagcactgagtattccattgtttgtatgtatcaaagtttatttacccgtttacctactaaaagatatctcggctgggcaccgttgctcacgcctgtaatcctagcactttgtgaggccgaggcgggtggatcacttgggaacaaaagttcgagaccagcttggccaacatggcaaaatccctgtctctgctaaaaatacataggttagccaagtgtagtggtgcatgcctgtaatcccagctactcgggaggctgaggcatgagaatcacttgaacccaggatgcggaggttgcagtgagtcgagatcacaccactgcactccctcctgcctgggtgacagagtgagactccatctcaaaaaaaaaaaaaacaaactctgttgcttccaagttttgacagttgcaaataaagctgctacagacatctttgtgcgggtttttgtggggacatagttttcaattactttgggtaaatgttaaggagtgtgattgctggattatgtgagaagagtatgtttagatttgtaggaaaccacctagctgccttgcaaagtggctgcaccattttgtattcccaccagcaatgaatgagagttcctgttgctccacatcattcgatgtgcttggtgttctggattttggccattctgataggtgtgtaatggtattttgttgttttaatttaaatttctctgatgacagatgatgtgaagcatcttttcatatgattaattgccatccatgtatcttctttggtgagatgtctgttaaggccgttggcccattttttaattaggttgtttgttttcttactgtcgagttataagagttctttgtatattttggataacagtcctttattacatctcttttgcaaatagtttctcccctcacctgtggcttgccttttcattctcttgacagtgtctcttgcagagcagaaatttttaagtttcatgtagtctggtttttcttttatggatggtgcctttggtgttatacctaaaatgtcatcacccaacccaaggtcatctagattttctcctatgttacctcctaggagtattattgttttgtattttgtatttatgtgtgtaatctattttaagttaatttttgtaaaggatgtaaggtgtgtgtgtggattcactttttagcctgtggatgtccagtggttctgggactatttgttgaaaagactgtcctttaggtttttttttttttttttttgagatgggagtttcgctcttgttgcccaggctggagcgcaatggtgcgatctcagctcaccgcagcccctgcctcccgggttcaagcaattctcctgcctcagcctcctgagtagctgggattacaggtacatgctaccacaccccgctaattttgtatttttagtagagacggggtttctccatgttggtcaggctggtctggaactcccgacctcaggtgatctgcctgcctcggcctcccaaagtgctgggattacaggtgtgagccactgcgcccggcctgtcttcttaaaggaaaaagataaaatagatattggtaggtgcctcggataaatgagttacttaagtgaagacttagatttgtccctgagtctcctagcagctggggcaaaagagaaatattttggttggtgcagtttttactttttgtcaagaggaagcttagggcagtggttctcaaagtaaagttcctggaccagcagcatcagcatcacctgagaactccctcgaaatgcagattctcaggttcctcctcagacccactgcctcagaaactctggggctgattctgattcacactgaaatgcgagaaccactggcttagaatttgcacgtggaggtctgccctgaatgggagcttactgttagtggtcttgttcgtaaaacagtggataataaggtgagtggaagtatcttctgtgatttgtaccagccttctaaagaggttatcattattgttatttaataaaaagcactgataagtggagcatgtcactcgcctcttttttttttttttttttttttttttggggacggagtcttgctctgttgcccaggctggagtgcagtggtgctatctcggctcactgcaagctccgcctcccgggttcacgccattctcctgcctcagcctcccgagtagctgggactacaggtgcccaccaccacacccggctaattttttgtattttttagtagagatggggttccaccatgttagccagaatggtctcgatctcctgacctcgtgatctgctcgcctcggcctcccaaagtgctgggattacaggcgtgagccacggcacctggcccactcacttcttttggccagtggctctggcatgaagctggaggcaaagatgctgagggcctgcactagacaggctctgtgctggctgctggttccgtccatgccaccaataacccgatcaggtggagagagtatttattcttgctttattgaatggaaaattgtggcttagcaagcaaaagaagggctgcgtttcagttgtaggcctgttgcctgagagcatcctagggtcacgatgggggtggagtgagaatgcttgtacaggtgtttacagctctccagttttactgtatgtgggtgccctcgctatggattgagacatcagattctgtcagcttggtttttggatgcctggggaactgcgttgtcctggttgtcggctacctgcctaatagcaggttaccgtgaaaccatgtgaagcaatagaatgcaacagcaaggtatggattacatgacaggcaggctgagtggttcagaaggattatatgctgtggaccttatgctttgcattgtgaacagtgttcctaactgcccagcgcccatgcagaagggccagggggtagagcacccatgtgatgaatgccaaccaacagtgtacttgccatgccttcaccttgcaagcagggttcttttgtaattagctctcgaatgacagcaactctgcccctgaaatgggtgctctgcagtgattaagggctagtgttagctgtaccagggagatactgctgtgaggaggtgcctctgtttggtgtctgtgaaacattagatgctatttaaagtgatagcggttcttagctggctacttggcctctgccatctgttagtgtgattaggctggtctgattcacaggtgcagcctggggcggctgagattaagcagctgtggcctgtgtggacagaggaatgccacggccggggtaattggcaaggcaggaaaggggacgttgccattaaaacaattttttgccacctcaagtgtcaaatgcctgacccgattaatagggaaaattgcagaagcaccaaattctttgtattttcagccacctggaaaacactcatgtgtccagattgatttctttggtgccttctgattgtctgaaaatgccactggggtgtgtttgtatgttcttctttaggaactttgacaaatgatgctccagtgaccctgtgttgatggtgacgtttttgggcttttttgagttttttttttttttttttttttctccttttggattgagacattgaaaatttagttctgtatcttccagttggaaaaatatattgcaggttattccctctgctgatttgctagattattgatctaattttgttggttaacataagaaggcaagctcagctgcctgctagagtgttttttagattctgtacagagtacgaaaagcttgggtgccaaatacaatggcaaaaataacaatgaagaattaaagatcgggcgcggtggctcatggatgtaatcccagtactttgggaggccgaggcaggcggatcacaaggtcaggagttcgagaccagcctggccaatatggtgaaactccatctctactaaaatataaaaattagccgggcttggtggcgggcgcctgaggctgaggcaggagaatcacttgaacccgggaagtggaggttgcagtgagccgaaatcgtgccactgcaccccagcctgggcgacagagtgagactccgtctcaaaaaaaaaaaaaaacaaaaaactgtatctattaacatcatgttgtacatgcattgaaaaacccagccatgggctgatttgattgatctttttaagttggtttcttcatcacagatgtgcagggcattctctggtcatattttagcagctgactagctgatgacctcacatggtaccagcactagatgtttccaagtggaacagtcctgtgatgtcattacaagcctggttgccaggaaataatgctgttacatatgcccctcggtgcaacacattttctccagaaagaaagttgcagtttcatatgctaatttttgaaatgcatccaggttgagggttttgaagggttgagaatttatcctttcgcatagaaaagtataagttaactagttcttgccttccctaggtgctaggtatgttaatggttatctggcagcaactaggtagatgcatatacccatttgttcgagggatttttattgtttccagcttgtttcggtgattaatgtttctgaagagcttgagacttagtttttgagaagatcatgatggacgaaaagttcaggtccattgcttaactcgagggaagtgatggagagacagttgcatcaagactcttgctgctaaagtggttctttctctcgagtgatgagagaaaaagtaattttctattttggtttcattcctgttgagacctgcagatgcccacactccatgtcagggagaaaggctattttttttggaagtacctagggaaaatgaaggtagttagcctgagattccaaactcatttcattgattaacctgccgataacagttcaaagtcacctttgttctaattgggatttttacttggtagagatcctaagttggtaacagcaggcttcttagttgtgttgaagtttctaggaattgaaaagaacaatatcagtaataaaaacaacaaaaaacccacacaggctttgcaaatttttagaaattccctttgtaatgaaaacatcatcaataagttggtttgggccagcatagcagctcgcacctgtaattccagctagttgggaggccgaagcaggaggatcgtgtatacccaggagtttgagactagcctcgggagcatagcaagaccgcatctctacaaaaaataaaagattagccaggtgtggtagctcatgcctgcagtcccagttacttgggaggctcaggtgggaggatcacctgagcccaggaggtcaaggctgcagtgagctgtggttgtaccactgcagtgcagcctgggcaacggagcaagaccctgtctcttaaaaagaagaaaaagctgcttttggtattttatcacaaatactgttgatggtgttccatccaatggttggactgaatatctttctcagtctcctccttggtcaaacagcatagccaatgattggagaagtttcctttgaaggcagatcttgggaattcccatgggctaactggtctgctagtgggctcagttctttcacttgtggttaacttgcttggttttgaaaacatatatttctgattgaatgcctggctggttagcaagtttttaatgagatttctcaaagccacagacataccccctcataatcatatcctcactcacatctccgtattttgttagatttgttttctcttagtttataccaaactgaaagcagaactgcagggtagtggggagctctgagacatttttcccctgtcaggagtcaaagcattcaaatgtcctgattagtgatatttttaaaagccctaattatagactcgagacagaggctttagtggggctttagagagtttgtgagacttaatctaggagctggaacaggctgtgtttttaaaattttttgcatccataaaaatacagttggcagtcattggtggccgcggctcacataaatcttgaacttttgacttaattaccatgggagagttcaaagggcaggctggagtggttgaaggaacactgctcagggagctggagatgggcctggcctcagcccggcctctggctgtgtgaccttgatcaaatcacttaacctttctggatgacattgatatcatcagtcgttgggccagatggtcaccgaggtctcttttggtacagcctggtaatatgattccatgtttctcctttaaatcattgggccgtgttctctgttttttggttccagagagagagagagagagagagagagagagagagagtagattataaaccttaggtgtcagcattgagatgtgcaagggttttggtgggggcaggcccagcagcctatggtttctcactaagtttaaattgcagggtcaaaagaaatcacataatcctaccatttgttgacagaatcaatacctgtctagcacatagatacctggaaagtatgttcgaactggcggggaccttaatcagtgcaactacttcattttatagctaaagcttttaatagtcatccatccgtccatccatccgtccgtccatccatccatccatccatccatccaataacgcttgagtgcctactccataggctaaagacaactccagctgtaccctccaggtgccctactgttgttggtcagcatcagaaggagtatttttcagtacagagacactaatgttggaagcacacatctatcacaaagaaggggccctgagaaagaataacttggctctagggtgggaataataaaggctgtgttggagtcctttgaaggaagtttctgtgggtttataaatctctctttaactcattgcatcttaaaagacttctgttgtcttaaagtaaaattctacttaatattattactaatgtgcaatgactgttacagtgtagaaaatgataatgagtaggtatgctatatgctggtgatgggatttaattgatgggatgggattgattgattgtggctaggtctgactgttctttaaccagctcattcttagtatttgatgattaggagaacatcattcttgtggtacctattacatcagaaggtctaagaatgtcagagccaaaggaaccatacctctcatcgaggttaatttgtttcctttacaggtggattagtgtcattcattttgaatgccattggaagtttataccacacgtctctattagctgactttaagcccgctcttcatacacctctaaggtatataaagttcagggaaactcatgtgtccttagcttgcagattcatttgattgattgattgattgattgattgattgagacagagttttgctcttgtcgcccaggctggagtgcaatggcatgatctcggctcactgcaacctctgcctcctgggttcaagcaattctcctgcctcaccctccctagtagctgggactacagccatgcgtcaccatgtccagctaatttttgcatttttagtggagacggggtttcaccatgttggtcaggctggtctcggactcctgacctcaggtgatccgcccacctcggcctcccaaaggctgggattacaggcgtgagccaccgcgcctggcctgcagattcattttagataagattgttgagtaaacatccctgttaagcatctactatggacaaggctgatctctgcttcagtagatctttaatttggtacatgagttccttctccaaatgagagttgttaaagctgttcacgagccttggtataaaaggggcttccttaggtagaggagcccgttctaagtgcctggatggtgtttgtctccagctgttttgcagttcttgggaggccctggcatttccatgtgtgtcctttccaactgcaaaaacatacagaggacacaaggctgctgatgaaggaaacacagtagggctatcttatagtattattatttttctagatcttacagattcaaggttcacataaagctagtgtattttaggaagagctattgtaaaattataaaagagttccagccgggcgcggtagctcacgcctgtaatcccagcactttgggaggctgaggcaggtggatcatgaggtcaggagatccagaccatcctggctaaaacggtgaaaccctggctaaaacggtgaaaccctgtctctactaaaaatacaaaaaaaaaaaaaaaaaattagccgggcatggtggcgggcacctgtagtcccagctactcgggaggctgaggcaggagaatggcgtgaacccgggaggcagagcttgcagtgagccaagatcgcgccactgcactccagcctgggcaacagagcaagacgctgtctcaaaaaaaggaaaaaaaaaaaaaagacttcctcccctcccgtatcaagttcattaaacatatttgtgagcttgatatttaaagagaggctgtgtgctggtgtgatgttagcagtcaccagggtggggctggtcacacatgggagcctgggtggagggttgtgcctggattttttatggtggcccccaaccttggatctctgagacctagatgagcagcactgcacccgtaccctgctgtatggctgtgtctgtgttttgcagaagcagattttataggtgtagctttgatgattgaaatatcacccgagggaagtggctacctgccagaaattccagcaacattatttcaccttagtccttaaatcactcccgaggcaccaagacaaaggtgcgggttgcccatgggctgttgccacaggtcaggcctgcataggtgcgcgtggtctgggccggtccctgggctgttacagactcacccatggcttggcccagtgagggcagaaaagaacaacattcctagttccttcagctaaatcccactttttttttagggaacataaaaatcatgcctaatggtatgtaagcacatatctgttgatttcttttatgtaaaaaagaaaagacattccacaggatcagctcagcagtaattgatgttatctgaaagagttactgcattaatatttagctaattcatatgaataggctattgtgtttacttaaacaaatgacatgagtgcagacacctgacagcatgaggtatgcttttcatttaggttagatttgtaaacgtctttgtgtagtgacaaagctcattatttgttttgtgctctcaatggtttctttttagtggctgtggctgtggatggatttttctaagtagaagcttttaaaatgaaagtttattgaaattgtttcagtatatgccaggccctgagagtcttgggatgaatgggaatcaagtactccctggtgaaccctcaaaagaataggtgcgtttatgggcattcaacacccagagccaaatgtctacccaggttgcaaatgcaactggattcaaaggaaggaattcagcccctgttccttctttctcctccttcctcttcttctctcctggcttcgatagttttgcccctcttcccactgtttcagcatcatatgggtgcacctaaatcccatcactttgacacttagataagcacagggataaagatacagcatggccttgtaaagaaatctcagctctacctttgacaacaggtttcaagagcaagcgtgaaggctaattggggtaggtgtttggatgcagcgatttcaattcctgattgtaccctgagtctggctgctaagtgaaggggatccttatcccccagggacgtgctctacacccgtagaatagaggagacttctaaatatgcatcagagacaaagcccctgcctagggccattttgccttgggtttgtgaactgtgtgtgctgttgttcagtctagccttcatcagaaataagcatagttatgaattagccttctacaatgttcaagtccctgttggtggctgtttcagaggaatacagggattttggttactactttgctaagacagaaacatatatgtgaatagttaaattgctgtacagtagaggttctggacaggaaaaaaggaggacgtgtgccttgacccaggctggctttcccggacttcagccttaaacatcagattggtggaaggtacggattccaacctcgtggagaagctgcatcttcttagcagtggagagtagggttgaagatagtgggctctggcatcagactgatgtggttcaaatcttggctgcacctcttccaagctttgtggcttttggcaggttacttaactgctctgtgcctcagtttcctcacttggaagccaagattatgatagtgcctttcttgttgaagcattgtgaagattaatgtgttgacatgtaaaaactctttgagcagtgcttggcaaagtagaagctttcagtcggtagtagtcattcgccattattagcagacatgaagaatttacagtggtattctggcttgatgttgtggcttttatttagaaaaaatatactttactttgtgatttaaaacttttttcttgactttaaaaaatcacttgtatttatgactttcggggacatttggagggcataactttaacatatcatttaattggtagcctcctcttaagttatcattaggtggggtggtagggttatggcattcataaccaccattggaaagaaattttttttttaattaaaaaagttagtatgtatttagtgatacagttttttttttgtttgtttgtttgtatataagttctgagaaatgtacgaatgactctctgggttattttattatattagaatgacaatttatactattgattgcccttaaagtaaggctccaatggataagttgatagggcttttgagaacaacttgcttttactagtgtgtatatgtgatcatttaataggtgtggcaatccaaaatgatctatttttggaggactgagctgtcgcagttgtatatgttgttcatatgtttataaaatagcattttaaaacatgatttggcatgaaattattttctggcatcaagaacaagagagagaaggggcctcaaacacttttttttttttcttcctgttggtagacatgaaccatccctctctgggaccttctgctcagccagctggattagacttctgaaaatattttccaaatgtaaatattacccaaagatttaaaaaatagcctagcatttacatgcaaagcgaaatgatcttacctgtttggagtttactcatggaggggaagctgtccatcagtatacattctaatactgttttccaaaacaggagcaccatactggaccaacacagaaaagatggaaaagcggctccatgctgtgcctgcggccaacactgtcaagtttcgctgcccagccggggggaacccaatgccaaccatgcggtggctgaaaaacgggaaggagtttaagcaggagcatcgcattggaggctacaaggtagaattaagctttcagaacatcacatttcttacatttttgtttatttatttatttacattttttttttgcgatggagtctcgctctgtcgcccaggctggagtgccgtggtgcgatctcggttcactgcaacctccatctcccaggttcaagcgattctcctgcctcagcctcccgagtagctgggactacaggtgtgtgccaccatgcctcgctaattttttgtatctgtagcagagacggggtttcaccgtgttgtccaggatggtcttgatctcctgacctcgtgatccgcctgcctcggcctcccaaagtgttgggattacaggtgtgagccacgatgcccagccctacatttttgtttattttttgaagtgctcaaaagttagcaggaattagaaggaatactttaacaagaatcaataattgtcacaattgcccatgtcagggtttgatattaaaaaaaaatattaccccggacttgcgtgtaattttaaagtacaattcccgtttgtgttgttcttcatatgaggagagtttaataacagaagggtcgaaagttgagagtctgttttctatatgctttatagtgtataaaactaaaacgggtgtggagtttgagaagcgtcagtatagtttccctgtcagagcaggattgcatgaatagtgaggggacttggattagagactggagtatgaaatatgatgcattaagggagagtgcgtggagatgacagtggcaatctgctgtcctccttgaaggattcttgagagcacgtcacacaatgccatgaaattttagtctcatcactccctagggagtttgaaattggcagctgtctccctgcagatgcccgcgcatgctcctctagcctttgttcatccacttagcagacattgattgagcaccctgtgtgccaggcacactcctgggctctggggagatgagagggtgaggcatggccccagctccaaggggctcttagtccagtccagcaggagaggcagaggagaactctggcaatgggagggacacaggtttggttgaagttgcaggaacatgttgcatcccatggatgtacatggaaaggtgatattggattggcgtttggaagaataaggagaaaggaggtcaggaaaggattcaggtctgagttggaaggaaagatgtctcagaaagagagagatggaatttccaaattatttagtatggaaggagagaactgtaataattgagcatatgaaaaggactgaaggaaaccttatgatgaaattctctgatgcatttggaacataagtgggcatattagttacctgttgctgcataataaattgccccaaggtatggtagctttaagcaacatttattacctcattgttgcctggatcaggaatgaaggtgtggcttagctgggtcttccatctccagctgtctcacaggactgtaagcaaggaagggttgaggctgaggtctcattggaagggttaattggggaaggaactgctcatgtggttgctgttaggattcacttccttgcagagggcctcagttcctcactgactgttggctgggggctgcccactgttccatgccacacgggcctcttcatagggcagctgctgtcatcaggttgagcaaaggaggagccagagagagagagagcaggatcgcagaagtcagagccttttgtaacctagtgttggaagggacagccaccacttttgcttttttccattattaagcaagacactagggaggaggttgcccaaggacctgaatgccaggagacaaggggatcaccggaacccatctgggaaaactgcatggtgggaggaatagaagacgctctttagctcagacctcaggtcctttacagccaggtagggaggattcctcagtagcagcagtggggtgtccaggactgtgtctcacgtgtctttaacacaccagcatcactttagctccatcattgctgtaggtaaatgagcctcctttccacctaaaaatgccctgcaacccttttctgaaatttcttagacagttattcatctttaaaggattattttcttctgcaaaagtttttgcctttttgttttaacacttagaaattaacatctagaggccaaaattcagaggaaaatggggacagcctatgagtaagtttctaagaacgcatggtgggcagtgaacatgtgaaacagttatgaggcagatctgctagcaggtgggtactgttgaagcttgaaagtagaaatactttggttgttttccacaactcctacttggtggtggaagcaggaggcagggggtgatttgtccttctgttcttagttcagtccttagaccagatacgatgagattcaaaggttggcccttttaaaagaaatctttttgaaaaaaaaaagttaaggatttcatggggggatgctggttagaaaggaagagttaagccactaaaatcacggcccctgggattgtttttaaccaccaaatgctttctgaaactcacataattgatgcagttccaatgatttatttaaatacaatctgagtgtgagaatggtggtcaaaatcctggtggttaactaattttgtcaattaagacagccttgtaaataagtacaaagaggagctgatgaggctccagagacccctgggctcaaaataaatggaaccgacatcattattatggggaaggagctttttgcaaatctgaattagtgattacaaatatgctaagagactaagagggcctaatgagaaaatgctgcctgatttttaacaggtgcagttcagtgttaattattgattccaacatttcgctagatgaagagcacctatgttctaaaagcaaaatgaggactcccagcagaaagcctttagcctgcccctgtggagtgcagatgaccaaagtgattttgttgtatcacgctgagccgtttctggagggaaaaggaaatggaatttcagtgtgtgggacaaaaacctaaaatatattttgctttaccaaaaaaaaaaaaaaaaaaaaaaaaaaagggccaaaagcggcagagggccacacatttggatgcagtgtgctggcgtggtcctctcctttctggttctctggtggagaaaggctatggctgtagggtggggcggcctgggaggttggcccgctagttgcagaggtggtcagcctaggttgatcaagggcttttcacaacagcagtggcattgaacgttcattttggagatgccagaaactcttagaaattccactgagtcccaagggcttccgggacttgaaaaggaaagacacatttctcatctcctgggaaggttccttcagttacctaaggcatcatcttcgctaatgatgtgttaagccaaccccaggtcctggagtcactggagctcaaagaggctcattcccacctgtgggcctcccccatggggagctccttggctggctatggcctgcgtttgcctcagagagtccttgttggggcctgaccaaggcagactttggggagaatggtccctggtgttgggttttctctctgatattttcttcgttacctacgtagacttaaagaaatgtgcctctgggttgggcacagtggcactgtaatcccactgctttgggaggctgaggcaggaggatcatatgaggccaggagcacaagaccaacttaggcaacatagtgagacccccatttctgcaaaaaatttaaaccattagctgggcgtagtagtgctcacctgtagtcccagctactcaagcagctgaggtgggaggatcgcttgagcccaggagtttggggctgcagggagctgtgattatgcctctgcagtccagcctggatgatagaggaagactctgtcaaaaaaaaaaaaaagaaaaaaaaggtacctttgcacatttgacttcagggaactatattgttattttcattcctcggcacttcctcaaaagcaaagagacctaattgaaactcagagggcctgacatctaactgattcattcctgactcctgtccatttgccactttgctttattttatttttattttttgagactgagttttgctcttgttgcccaggctggagtgcaatggcatgatctcagcacactgtaacctctgcctcccgggttcaagcgattttcctgtctcagcctcacaagtagctgggattacaggtgcccgccaccacacccagctaactttgtatttttagtggagatggggtttcaccatgttggtcatgctggtctcgaactcctgacctcaagtggtccaccctccttggcctctgcgagtgctgggattacaggcatgagctactgcacccgtcccatttgccagtttatttaatgaagaagcaaaatgtcaagttttccaagatacatttttccagaaagcaaatacctgaaaaacttcttcaaacaaatgtgtgttatttctgcaatttttctttttcctttataattctgttcattccataaactatgattgtgctttggtggcctgtccatctcattctttctacccgtttatggattgggcacctcggcagccatcccctgcattacagcttgttttgaaatggcatgcatgtgcggcctataaagggaggagggaagacaaaaaaagcaaaacaaagtcaaagagaattatgaaatgtgacagaaagctcattttcattcaaatgaccaatagaactatttggaattcggcagttcagtcttgtttatcaaagaacccatgctgagccatccttaggtgattaagaatcaaattattatttttaaagtgcatgagcaaagtcttgctggatgttattaatatgtgattgatataatagtaaaggacttgaatcataactctatctccctaatcatacttattcctgggcttttgcgtcagtcttgaccatgggcaagttttttcagctctctgtgccccagaatcccttgccttaaaatgggaagattggctgaataatcctgatcccttcaggctctgagaaccataatttaatagtatcaccatcgtgtagcatcagccatttctcttcttaaacaacagcacagatttttttttttttttttttaataaagaggttaccttcatggctagatatttcacagggctcaggacagttattgcaatttaatgcagaaaagcaagaagctggctgagataattaatagaccacctcaattctcacctccttcgtaggtaattatttaggcatagggggttcttaaaaaccatcttttatgccacttcgaagtgcctgcatagaccaagagagatcgcaggacagagggctcattcaacgtgactgtgaaattggcacagaagccctcagcgttgggtattacaggggttcaggttcccctggagcccctcagcagagagtaaagcattattgagcatgaaccaagtatatttcagatctaagaaaagatgatttttaaaacttttgttataatcactactaaactggttgttttgaagcataggttaattagatttacattttctaggttagttacttagatgtcattttaaagactttttgatgaaatgttatgcttaatccacaagtatgtttagggggagaaatcatgactaatgtacttatcagcatgtttatactttatggagattttttttcagtgaagacatttcagctttaatcccacatcaagcagtctttgatgaggacacaggtatatgtttgtattagccaacgtttatggactgctcccctgcgtcgtgacttaccaggtgcctcccatggagcaagttgctcagtccttccacagcccaaagaggcagacactgttattttgcccttttacatttgagggcttgccctacccctacctcataggtggcacagctgccatttggacctacgtggttttgcaccagaatttatgctcttgctaaactgcttgcttcaaatgtagttccgtgttttgtaaaaacactgttgctgttgaatgagaaacataatgaaagtaatggctccccaaaagcatgcaaagatctagcccatggtatacagttgagagcaaagttggggatatgatgctgttctttcaacttccaagacctctgtgggttatttatttgtttgtttttgagacagagtccctctatattgcgcaggctggagtgcagtggtacgaacatggctcagtgcagtcttgacctcctgggttcaagtgatcctcctgcctcagcctcctgtgtagctaggaccacaggtgcatggcaccacatttggctaatttttaaattttttgtagagacggggtctcacttggttgcccagactggcttcgaacacgtaagctcaagtgatcctcccacctcaacctcccaaagtattggaattacaggcttgagacactgtgcccagctggttatgaggtttttacatttattgtggtaatatatgcataacataaaatctaccatttaagtcattatcaagtttagtaggcattaattacattcatggtgttgtgcaaccatcaccactattttcaaaactttttcatctctccaaacagaaactttgtacccattaagtagtaagtactcatttcccctcccccactgcacctggtaacctctaacctactttttgtgtctatgaatttgcctattctgtgtaccttatataagtgaaatcaggatatttttccttttgtgtctggcttatttcacttaacaaaagtccatccatattgtagcatgaatcaaaactttattcctttttatggctgaattatattccattgtatggatataccacttttttttttttttttttttaagacggagtttcactctgttgcccaggctggagtgcagtggtgcaaccttggctcactgcaacctccgcctcccaggttcgagcgattctcctgcctcagcctcctgagtatgggattacaggtgctcaccaccatgcccggctaatttttgtatttttagtagagacagggtttcaccatgttggtcaggctggtctcgatctcctgaacttgccatccacccacctcagcctcccaaagtgctgggattacaggcatgagccactgtgcccggccccacattttgtttatccattcatctgatgatgatcacttgggttgcttctaccttttggctattgtgaatagccattgtagcaattggtgtacaagtatctgtcccagtccttgctataagtttctctggtatatacctaggagtggaattgcaggaccatatggcatttgtctgttttgcaaaagcaaaaatggggaagatcgtgacatttttaaagagctaagttcaacaggcggtggatgtcctgccgcagccacctttgtgagcaccgacaagcaacgggcctctaagaaaacatggcttgttgtaattcacttcccacctcctctggagagatccagtggttgtttaccgagcagagggaagagtttctgccactggtcccgaggatcagattgcccggccctgttctctggacacctcctgaaaagcaaacttcttgtatcaatgttggagtttaagcattaacaggtgtttgcctccacatctgcatggtggtgagcaacagcaggtacctctgtccttgacatgcaaggttagttggcacaaatgctttcagaaaggatggcttcaagtcccccaggcacctgctgaaagtgggggactgggatgggagaataagattttatgcattttttgttttttgttttgttttgagacagagtctcactctgtcacccaggctggagtacagtggcatgatctcagctcactgcagtctctgtctcccgggttcaagcgattctcttgcctcagcctcctgagtagctgggattacaggcacctgctaccatgcctgactaatttttatatttttagtagagacagagtttcaccatgttggccaggctggcctcgaactcctgtcctcaaatgatctgcccgcctcggcctcccaaagtgctgggattacaggcgtgagccactgcacctggcagattttttgcattttaatggcaactcacctgttgaatgaactgatctgttcatggggtgggtgcctctgtgaaggccaggattacaagagattgctgtcttcctgggaaaattgggtgctgatactggcgggagaaaggcttgggaatatctttctgatatcacatggacacagcgttctacctggcacagaataaaactttgtatcaccttctgcatgtttattctgcttgttatcgaacacctgagtatttggaaatgtctggatttttttgcaatgtggaaggtaaatatccaggtgacagcctgggtctttaacctttcacccttcacctttcactgcggtgttttggtgtcaacaaactaaatctacattcccagttgtcacctgagggtagcctgggatttaataggcattttgggggaatgaaggtaacagaagaattccgaaaaacctgtctgggccaccttgtgtctttgtgtggatagggtgtggaatgttcatggaatccgcttcttgtattatacttgggagtttaggccattttgcttcagtctgctttgtttcaatattgaaatgttattttaaaaaagtctttagtgaacatagttttgaagtccatgctctcctgttctgttacttggcagatgaaaaataatgatgaattccacaaagatttggccatgagcaggaaagaaaaagagtcgtgcttgtgttggttggtgcagaatttcttctctcactggcttttgtgtttgttttgccagatccattggttctgcagggggtagctactattgaatgattatctaaggatctgttttattatacttttttgttgtgtgtgttgagatttctgtttgtttgaaaggtagaaataagaaaaaagtaggcaatacccataatcccactgcttaattatataaagtacattgctaacaatttggtatattttctttctgattttagctgtgtttatagtcaggcttatactttcagttttatatgcatctttagggtggtaaatgtgtctgcttttttcttttttttaaataaattggaatcatgaattaactgtttttcatttatcaataactgtttaatgataccttaccaggtctgaacataatacttcattctttttatgactatagactacgctgtttgaatgaactttccatcagttcatacaggatgaactatgcattcttaatgtctctctccttgacagttttttgctcttacaagcagtgcttgaagcagcagttttgttcatgtgccttgaagtaattgtgctattttctgtgggctagctttctagaagtagaattaactagatcaaaaaaaatgtgtgctgctaattttaataggtaccagcaagttattttacacaaaggtttttctcaatttatgttcccattctcaattggaatcttttatttccctacacattcaccaagtactgaataacattgatccttctaatttttgttaatcagctggtgaataacagtgtctcattattgttttaatttgcatttcccggatcgttaatgaggttaagcatcttttcatatgtttattgggtatttacattccctcttctctgaaagcaaagacggtgtatgtgcatttggcctaactggcaaaagaattgtagcactgaaaatctgaggaatttagaaacacgcgttgtatatattacgtcggaagagtggtttctttaggtttattctgaatctccatatggaaatagagtaatgaaaaaaaacccccaaactttgtgcttttgtttgccatctttataaagttaactattgtagtttcttagcttgctattaagcaaccactaatcaatggtaggatatcccctacaaaagtgtccagcagtcccactgttggtggatttaagagcatccatttggaaaatgctacagctcataaaatttgggtcaataaatcaaatactggagcaatggtgtaagaaaataaatattaacagcactgcatggggcaatattgatctagtaccaagatttctggatggacagaaacaccctgtttggtaattgtgcttctcattgtaaaaacatttttataaacgttaacttattaatatttgtagtgcatctccaggaagtaaatattcagagagcacgtgctcttgaagagggatcttgtatggaatgccatggccccagtgagagacttgagctgaccatatcccctggggttaaaaaaagggagcagtgagccaagctgcatatgccaagatttaatgtgtcagccgagtcaggcgatgtcccctccctgtgcagttcaggttcagctccatttggaatactccatgtgccaaatctggatccaggcacaagaaagacattgacagtttgaatggggtccagagacaggcactagccgtgattaagggcttatgggcatgacatttgagcgggggctcaaagaactgaatatttacagcagggataaatgctggattacatggcttggtgacgtggggacccgtggctacatccctaagttacctgccacatgactggttccccgtaggcaaagagagaatcatttctgttacccttgagagcttgaggtgaagggagggtctccttttgggtctgtggacctcaagtaaaatcaaggagcttatacctatgtgtcccatgctcttagcataacgatgccgttgtagcacccagggatccaggatttaggtagggaattctcattgcgctggaagatttagcatccatatctcctcctccttcagaagacacattctgcatggaaggtgcttatctctcttaaggggagacgcgctagcatgttgtctgggtcctgttacaagtctacggctcaaccaagagcagaaagcgagtctttgtcatacagtaaagactctccactgtcgatcagatgcccgtagattcatttttctgccagacattttacctgcgacagtgaggatcagtttcccatcaccagctccaggctgttagactctgaaactaccttcgtagttgtcgatgactgcagcagcccagcaaagtggctgaccagaactatcttaactcactgcttgtactctgttaaggaggaaggaggccaaccttcatccagtgatcctttctaagactgtcagtgatgagcagcgacctcgttttagaactcagcagcagtacctccaccctgcagtcatggcttgcatagaactgagtggctgacatgaaaaccgtggcactccagtgtgctcttcgcatctcttaactctgttggcaggctaatcactggcgctgctttgcaaagtggacagctgctctgccctcctgtttttatagtggagtggttacgagatgattttctttattctctagtttcttatatcactcatgtgcttgcagatgctctgcctgtatttgttttttatgtgattaacccaaaaacacttgcaatgcccagggcatggctcagaaggtcagttgaaattcctgaaatgatagctaaggttagtaggccttgactgtttattttttcatttcgtttcactggagtgccttgtccaaaacacctgtagagaatgacttggattcagatagaaatactaaagcctcaaaccctgaagatacaagatgttgcattttgtggtaaggaaaactctcgcaagtttgaaaatttgagtctatggaaatatttgaaaagcagggggagaacataagaatggcgtctctttgtgtattgatggtaccttgggtaggagtcacaacagctgattttcacatgtgctgcttatctttgaaaagtctcaagaagtttgtgaacggacggatatacaacttgagttttgtaaggattcattgccgccatatttggaattctgggtatttctctgaggaacatgtatatctattcagccacaaccagagatgggaagggcagactgatgttcccagctgaaacttcttgagacatccagacaacatctgagaactatgagccccttaggagaaatgaattagctacggcagcacagagggcttggagcagtgcctggcatatagtaaatgctcactataaatgttagttctacatggttctgtgatgccatagaggctgaggcttcctagtggatgggcaaactggtagctcgcctgcccgtggccattggtaccaggctggctggtgttcaggctccctggccagttggcctctcctagaggagccctcaaatccattatggtaacagacccacgctgtacactgccgaatactcctgcagatctgaatatgtcaatatttgcttcacaggtgttcaccatgatgatgatgatggttttcatttctcacgattcttaatgacagttatcaatttagaatttaggtgattcttccatacctttcttgcctccttcagcttctttttaaatcaagaaagcacagtacttggtattctgtgctaggattgttaaataaccgcctttgctttgatcttttcaggtacgaaaccagcactggagcctcattatggaaagtgtggtcccatctgacaagggaaattatacctgtgtggtggagaatgaatacgggtccatcaatcacacgtaccacctggatgttgtgggtgagtttgcctctcctcgtgtggcggctgcataccagcccattcttgcttgactcgtttgaaagcatgaacgttaagtcctgtttctcccataagtttcaggagaattggttcattcttattctttctactatcattttacaaggctgcttctgtcatctgacaatattctgttttccaggcagccagggtttatgagctttgcatgatcctcatggttcccaagcgtcatctgtgtaaagtggacgtggtatgaaatgtctgacattttggaagctgagattactctgaaaatgttaattgggcaggtgaaaagggtacagatgtgctgtagcagacctttggttttaaaagagaagcatcatttccccaacagggcaactgtagaaggccagctgaagagtaaaggaaaaggtctgaggactgagcctgtggctggctggaaaaaggtgaatgttgagggcccttcacttccatcacaagaaagtcattagacggtaccaattcagtgtctgttcctggcatctatttcctctgtgcaaagggaaccatgtatatgagcttataaatacatttttgtcagagtgcacagataagtaggccattttaattaaacattgaagaccacctcgcctgttgtcttggaaattcaagtttcttcccaggttttgcctgtgatgatggggctttgttgtaactaatgaagaaaggaggtttctgtgtcttggaggattgctaacatatggaactctacccaagacatacttcattgttgcaggatggcaggttaagatcccttccatgtaggggccatcttttctctttcctgtcatgtgccttgactttcaacctgccaccttgagccctttcttttggtttgtcctcccctaaatacaggttgctatcttctgctgtagactcaactcagttcacactcacgttttgccgtaatgtgactgttggtaattccacaagcccacaccacccactgtgcctctgtaaacgaagtgtctcctacatcatagcctgtgcgtgtgtgcctagtatcatctcatgtgtgggtctccttcaataaaacatctttgaagagggagaccccgttacatattggaattgcccaaaaagccactaaaaaaataatccaaaagcttgattaaccaaattgcaaagatttggttaattaaaattttaggttaactgaaaagtaaacaaaactattttgattttctgtcaagttaaatggaattggatctacgagacactctgccttagaaagcatgatataaccattacttccatttgcatataagcattcagggaaaatagtgtttattcgaagatttgagttttgttcttcagaagccttcatgtgaaatttgataggtccttgaataatgttgatcctatagatattcataaaagagtgagttttagagctctttccccatagagaaaacatgtggcatgtttcttagtgagaattaccatgttcagatattttacaaaacaaacaaaaagagaagtaacactcaaatttgagaagaaaatgattaacatttgtgttggcattgatacactgtaaatccattgatcaaagagcatatgacttggcctttacctgggttcctgtgtgtaccgaatgtgacgtaaaactatttctatttagggaaagagagattttgggctaaatgttctaaatacctaattttgaaattaagtaatttattgtgggaaaaaataattgagctatagcagtcttttgggattatagctttgcataggtctacaaatcattcattaggctgggctggggccattctaggcatcgtggagtcagatggcggccactccggtctgggctcttgcttaaagcaagttttaggttgagttgttatgtaaaacattcaaaagcccctcaccccacctcccctttgagctttctggcggctcatccctgtgaagccctgaaatctctcttagagtttagggttgggatttgaattgggctgctgaataatggaattgtgctgtctaatgttaatcccctggcaatcagtcttgttgaaaagagcgtatgattcagtggtgtaatgtagagagagcgtggagtgtatggagtaatgcagagagaggcctgattatgtcacaaatttgggagatcgcccagctaaacacgggccaataatgacacaatgctggttgggaatatccattaaagctcaactccaataattttccaagccttgaaccttctttataaatagaagccaaaagtcagtggagtaaaaggcattttcagtaaagatggaagtgtgaaatactctcatctctgctcaaaaccctagtaattgctttgcgaagcactaataaaataagaattgagtcagctaaagaggctcatatagacgtacagggttggcagtcattctgaacatctcagcaagtggaaacaaaaaggattcaagcttaagcagtgaatttctggtagcccacaggcccaaatgtgatacactgctgtgtgataacagcttttcagccacctctctgtttcacagaaaatcagaaaccctttcccagtgaaagcgaagtcccattcttgcccacattctttggggttttatttttgtttctatgatacatagattgtggttcagatattatgaagcatcaagatgggtgagatctttttattgaaattcttccttggaaaggcattcccataagcactttaatgtaaaagccgtgtaatttaagtgacattcttgtgttctagaattaaacggcaagccattgttgtgtgtaagggaaatgctttcatttatgggagcccttttaggagcctggcttgatcctcattaaaattgacaccattacttttcagctatttactgcaagggaaaattagtgtgatgctccacgttttggtaattgtggcgataataaaatgggctcccctaaagtagctgtggctccgggaggtggcgagccttcaccatcgttcatcattgagtggtaccagagccctggattctgactgaggtcctgtcactgtgaagctacaatgctgggatgactcattgcactttccttgtgtccaaaaatgaaggaactggaactcatgaatgttagaacaaaaaaagcggcttatgccgtggaatgaacagcaggtttgtccgtggccatacctggggcccctagtgaattgggacaaattatttagcttttctgaggctctgttttatcatcagtaaaatcggaatgatgatacttacctcattcctatgatggttgtattaggtttcctagggtacccctaacaaattactataaactaattggcttaaaacaaaagaaatctattctcttacagttctggagcctaaaaattcaaaattaaggtgttggcaagttccacgcccctctcccagcttctggtagctgtccttggcttgtagaggcaccgctccaatctctgcctccatcttcatgtagtcatgttctcactgtgtgtctcaaaatctccttctgtcttcctcttgtgaggacacctgtcactggatttagggcccaccgtaaatccaggatgagctaaccttgatatttttaacttaagtacttttgcaaagacctttttcttcaaataaggtcacattcctagtttccaaggcttaggacgtggacgtaccttctcaaaggtcacccttcagctcactacattagttacgaggcatcagttgggttagcagatgaaaacatcaggctggcaggtaggtggccagcaacaaatgctggtttcctcccttccaaaccaggattcttttgagggttagaatggatctttaatagcttttattagtctcaatcagaagtcttattaaacaaacagaatgccattttggggctgggcatggtggctcacacctgtaacctagcacttggggaggccgaggcgggcagatcacctaaggtcagcagttagagaccagcctggtcaacatggtgaaacctcgtttctactaaaaatacaaaaattagccgggtgtggtggtgggcgcctgcaatcccagctactcgggaagctgaggtaggagaattgctttaacctgggaggtggaggtggtagtgagccaagatcatgccattgcactccagcctgggcagcaagagtgaaactccttctcaaaaaagaaaaaagaaagccgggcgcggtggctcacacctgtaatcccagcagtttgggaggccgaggcaggcagatcatgaggtcaggagttcaagaccagcctgaccaacatggtgaaaccccgtctctactaaaaatacaaaaattacccgggggtggtggcaggtacctgtaatcccagctactcaggaggctgaggcaggagaatcgcttgaacgcaggaggcagaggttgcagtgagctgagattgtgccattgcactccagcctgggcgacaaagtgagactccgtctcaaaaaaaaaaaaaaaaaaaaaaaaagccattttgggacctacagacgtggccagaggctgacattgacatttcctgctgaggtttccacctttgattaatgctgtcatcaaggccatcctgagactgatttggctgttggacttgcaggagaggggtgtggagtttgaggacttgaagttcatggagttggcttctttacgcccacccctcccctcccccactttgcagtggaggaagttcaggttcagctggggtaagtgatttgctaagtaagggcttggagcaggcattctggagctggggcctccatctgggtgttctccacgcctatctgtatgaatgctccttgctctccaagcggacttcttcatttgatgttcactgtggtgtgtttcagtagtgactgccacagcccgactctaaggaggtgctgctgtcaccccaccctgctttcagttctttgctgcagaagacagaatgtgcgggagaaagatgggaccttaaaagactagttgctcttcctcactcatgtagacgatttggctttgaatcgtgaattattgcttcttttgggcattccagttctgcatttccagagaccctcaggtatgtcaagctttttgcctggcatttgatattttgggggcaaagtacagtggaagtggaaatggtgcctctggttttgtcaaggccagatatgtcttctctccactccttgtgttttttgagacagagtcttgctttgttgcccaggctggagtacagtggcatgatcttggctcattgaaacctctgcctcccaggttcaagtgattctcctgcctctgtctcctgaatagttgggattataggcatgtgccaccatgcccagctagtttttgtagtttttagtagagatggggtttcaccatgttggccaggctggtctcgaacacctggcctggagtgatccgcccgcctcggcctcccaaagtgccaagattacaggcatgagccaccgtgcccggtcttttatcagtttaactttccagaaatttgttccccctgcctgtccgcatcccttcaaatgaaagctgtaagcagcaggcagttgttgtttgggggcccatcagaggccgcatgtcacttctggatgggtcaggcatcactaccagccctgacttgatggcggcagatcagcatggcactgtcaactagcccttgacataaatctgttgtaactcagccccagacatgataggacacagcctgaaagcgcacaggaatccgtaccagagcgaagtcccccctcaggtgtgtgttcaagaatgaagcgtcttttattccaagcactgactgataagctcgaatgtggagttgacacctggaagggagttttgggagcttttggcagcccatccccagtggaagaaggaggaatggctgaaattgttgactgcttggggcagcctctgtcccaggaagacaaaggctccagtgtgatagctgagctggggccaggggacggaggcacggcggagtccctcaaaccacagctggagtgtgaagtttggactgtctcctgggttgggaacaaagtagtggttaagtaaatgaagaagcggtggcctagttaattaattaacctgttaattcattactgaagctgtcaagattcagtcattcctgctcacttgctcgtgatggaaggctgcatctcagtctcggcttccatcacactgtggcttctggatggaatttttgtttctgtgtgtgataaggagtggctgtggtggcatcatttaaatgacatgattctgcacgtccagagacgttaggatattgaaagcctgaccattaccttttaggttgtcatgcttgtacctgttcctggcacaaggtctcggctccgtagagccctgtggggttctgaacttgaagcctcttgacttagaggcttcctggccagggctcatttgattttccatactcctgactttgctgccagtgaattcttttccatttcttgctctgagtgtaagacttggtgtcctaccctgacacgggctctgcatgccagctctagagttgcgaaatctcaccggaggggggcagaaagcccctctgttgagaagggattggggtggcgtgccaggtaatgggtcacagcgacagcctttctaagtgggcttatttagttgacagatcacggaaccggagcggagttgaggaggaagcaccttccttttgccgctttcgtgtccccagcagccatctcatcctgttcttataaaccatcgctgtcacagacaacccctaagggtctctactctgtgccagatgccctctctggaggttcaggtggaaattacgtggagaggggtgtcaagttctgtttccacccttgctaactctatggccttagaaaaggcatggaacctctgagcctcagtttccttgcctgtaaaatggggtgatgactgtttccttgtagcactatggggaggaggaggtggtaggagaggcagcgcttttaaataatagtaccatgcaactgttagtcgttattgtgcgttggtcccatacttcctcttgcatctccagacagagccgtgcaccctgagcccatcctgatgaaaggaggggtcagtcctgtcctttcctccaggatagagatttcaaaacttcctttggtagctactgtttaatgagcttttgattgctacaaagcagcttttcattcctgtttcacaacagggatcccggggggcaaaggctggttagtggcagctagatcactccaaacgtactgactggcaaatacagactctcccgcagaactgaccccagcaagaagcctttgggagcaggtggtattctgcgggtgccagctccctggggtgggagcaggcacacgccagcctggatggggcatggtagaactctgcgatgtcagcttttttgtcacattctctgcaggctacccgttgtcctttgccccaccattgaggaaggaagccttattgattgctttcgattcttgcagggggcctgggtgaggtggctggagagagggctaatatttggtctggcatttaatcttggcatttcatttatggtgtgggcaaagaggatgtagaagtgttaaaatcaagttaatatcttacagttttatgtaagaagaggttacctggagattcaggtgaggatggggcagagagaaagctgcttctgtcagagcttgggcaaataaacttgccatgaaatgtcaatttagtgatggcagtaagagtgtgcagtaatgtgctggaacttagcgaggtttctatcagcgtgtgctgaattgaaataatcaaaaaacagtttaataagttgcttatatttggagttttgtggttcttaacattgcaaattctgaagcaagaaattagagtttctctctaaactcatttactcatgtggctttatcaacggctgcctttgtaaaccgaaagacctcagttgggaagttttatgagacggagtcttgttctgttgcacaggctggagggcagtggcatgatcttggcccactgcaacctccgtctcctgggttcaagtgattctcctgcctcagcctcctggtagctgggattataggcggacatcatcatgcctggctaatttttgtatttttagtagagatggagtttcactatgttgcccaggctagccttgaactcctgacctcagatgatctgcccgcgcaggcctcccgaagtgctgggattacaggcatgagccaccgcacctggcctgccaactcttgttaagatgtgagtgtggaatgctgtgtgttcttccccttttaaaagatgtgtctgttggtttgctttcacggattccctctcccttaggagacccggctgttgtattcatggtcttcatgcttggtttgttttcacagtcagagaaggtaggatgctgtagggttctacctacaggtaggatgtgctccttacttagagatttggaagggtggcatcagagaaccactgtgcgtctttcatgatagctggtcaaatgtgggtgtctgtgggaaatagatggccaagggtgtcggtgttgctgtggggaggttgttctgtttcctcttctgagaagagacagatgaggcgatgaggcaatgggagcctcattgctttggcttggagggagaaaatagagcagagctctctagctgggattttgtgtatttgctgagttgcagtggttaattctctatccttgaagcacgtggcacgctcacgcagcctttatgtggtcgagagggtgacagtcacttgaatgaggtataaggctttgccctcatggagttcctcaggtcacattttgaggtcgaagaccataaattgggatggaaatttctagatcttgatggaactccaactttttctctctttctcaaagcctctggattacaggattctctcaaacaaggctggcaggaattctgtccatcccaaataagtatgcaaatctacaggtcaaatggtgccccagacatattccccactggatcagggagattgtggtcttttgagagacaaacattgaatattattctagtaggatcttttggaaattatgctctattagaaaaaggaacttttcattttactggttcagtgtacactctggactgaaactgaaaggtaaaggacttagccctttaaattttacattttggccgggtgtgctggctcacgcctgaaatcccagtactttgagaggctgaggcaggtggatcatttgagatcaggagtttgagaccagcctggccaacatggtaaaaacccatctctactaaaaaatacaaaaattagccaggcgtggtgttgtgtgcctgtaatcccagctactcgggaggctgaggcaggagaatcacttgaacgtgggaggcggaggttgcagtgagctgagattgtgccactgcactccagactgggtgacagagtgagactccttctcaaaaacaaacaaaaaaaattaaaatattaaaaattagccaggcgtcatggtgcacacctgtagtcccagttattctagaggctgaggcaggagaattgcttgtacccgggaggcagaggttccagtgagctgagattgtgccattgcactccagcctgggcaacagagcgagactccatctcaaaataaataaataaattttacattttggactgaaaaaacaaaaccattctgtatgtgagactctcaccgagtgttcatagggagggactggggctggggcctgacttgaggcttcccatctggcttggacagtgagaagagcagtggcgtttggattgaaggcttttgtgatctgggtgactattttgaagtttctctttaggtcatgctgtacttagaagtatctagaaccgtgattattttcagtttctgagtttcatctccaagaaaacaaatgggatttattgttcagcctctcatgttattcctatcaaagggaggcatttcttgtttgctcagatgggctgaaagcttttacttctgctcgaaccgccctaggagcaaaacaaggcatgtgagagagatgagcatgatagattttctagacttctctagaagaaaggctttttagatggtgaaggttgatgaaacctgccagcatttttacaatggacatccctctatgtctgcacatctcaatctccttcattcttactagtggccaatatgctcttctttcacggatgtagtacaattcgtttaatcatattaaacaatatgattgttgtgcagatcttttgttttccagtaaaaaaaaccctacagcgacaagctttgtccacacttatttattgggcatctgtgtgaatatttttctaggacagatttgtaaaggttggttaactggatcgtttttgatagatttcagtcaaacgttttaaagctaaggggccttacttacttggagtggttgctgtctttgacggagggctcccctgtggtttggtttttagcttctttgcaaatcatttgagagaagatactctaattgggagttcacccattgtaataagagggtatacctaattcctggacattaaaaaagaacaaacttttccagctcgaaggaaacattttcttcccctgaaggaaacccagctatgcagacaccagctgataatcttgcattcctgaaagatgttgcacccctatggcaagtggcggctgctgaggctctgacgtgactcccaggcatgaacgctctcagctgtgtttacctcagctcctcgggagggagcctgggagactgacgcctgagttttacatcagtgtcaaaacccaagcacaacctagggagggacctcctgcctagtgtgtgtgggtcaggagatagaaaagctctcactgagtaaactggacaaggtcaatatacatcgctgattgagaaggtaggttttccatgaccctagaaattgatcttgttcactctgagatattgtcacctttgttatgtctcctttttaaaaaaaaatgtggtaaaatatacataacataaaatatacctctgtaaccatttttgaatgtgtaattcatttacattaagtacattcaatttgttttgcaattatcattattgttcatctccaggacttttccatcatccccaaaccatgactccttttagcaaaatagaccaatttcgaacgtaaatttggcataataactctctggttaccaaagaatcttcagttctggtgaaactttttgaaggcagagagctcagagtgtcttaaacacttggggtgtaaataacacacagccctactcctgtaattcgcccaagaagacccaaattgatacccagctggtagaagccactcaaccccaagccaaataatacagcctgtaacattaattagggaaggtactaataatacagcctgtaacattaattagggaaggtactttgcctccacctgctttggtcttcccaggccctgagcccagccagcactttactctcttcttcacttcatcgagcaagcacaaaggcattagtggtgttttgcttctagcatttcacagggtgcagcctccataagtcactttgtgactttagtgctggagggaggacacttcatttttacccaaacaagtttgttccgcagacttcactctctctgcaaagagacgtgtgtgttttagaggaagtgggagccccagccgattctgcaagacttccgagagtcagatatccagacggaagatgcggacacctgggtgaccagacagcgaagaggaaagaacaaaacgagcatgtgccaagcctgtgagggagaaagggcaacaaaccagtgaccttccacagaaatgtgtttaaacaaaacaaaacaggtgattctgggtgcccagcatcccagcccactcatctattctaggaggtgacaagccaagatactggctgtgggcacctgggctctttctgaaggtggtcttcctggccgtcatagcgttccctttttctgctaatcatttttagttctgaccttcctttgtgctgatcttcagaagctggagaaagcttcgtatttctgggaaaacaaaacaaaactcagaacccaacgagatttagcctgtcaggcttgagtgcgttaggtggagtcttgacaaggcaatgaactcattctactaattgtaattagcgtggggcctttagcaagttctgggctcctcagacttcagagagctttgatcggcctcctcctcctcctaataaccatgcctcatgctaactggtttagtgcgtttttatgcaacaaaagcaaccaccgcctactctttagaaaaaagctaggcaggctttagaaaaagaattctcagttgttttcacttgtcctccaaatcgcagaatgttctttcccttttcagctctttggcgttgctaagagactgccattttggaggaaaggtaattaaattttgattttaatttaaagacagagcaagcgaggttatccacgctccttacatgaatgggggcctgagagcaggagactggctgtttccagatcaatactgggaactccgtgtgattcgagtctcttggtgtgtgactgccggagagaggtggctttgaaatggctctttgtggcaagtactgcctaacttttggggagaaatgctcaggagaccagtgtgagccgggaaaccagccactctgtgcttgattaatttataggtgtaatttaagagcctggttctccttctgatccccgggatgcatgtttactgagcctgtagacatgaggcctctcggctcggtggacattttttatggcctttgctatgtcagagcaaaagttgtagatctcttatgagcaaacatattactatgtccagaggaggactggcatgttataaaatttcaatggtcaattaacaaagatttattctttgtcactcaggtatttttttcctctctctctctctctctccctcaataatgacctcttggaaggaagcaggctgtgctttcctgctgcagtctttaggtgggttatggctcccagctacagagcagggcttgacagagcccatcctgatatttcaattcttagcagctgggctttctgctttagtagagtggacacttgaagaaagggggcgagaccgagagtgagagagagagaacgctgggagagaatgtattttttaaagcacttcagcctgtgtttactacgcgtttatttggtggaacctcattccagcagtgcagccaactgtcccggcagcagtggccgcaccctttggactgctttccattccgtcttaatttggaattcacacagccaccttccaatcactcttttgaaggttctcatcttgttccaggtccatgcactgtgcatttgcaacctgctgaacctcagaacgtctattcttatatgtgtatatatgtaattaaaattacagtaaacagaggagctactcatcagcctattttccatgtgtttatctcactccctttgtaaaaaggaaaatctgttttatataatatctgagagttaaacatgctagaagagaatcttgcctaaaactgtaaatccttcctgtccttcctggtggagaagatgtgatttttgttatcacatagaagaagagatgaactagcactgggctttagtctctcgcccagagataatacatcaggggattctttttatatcagtttgttgcaaaaaagttgcaaacttgaggggtttggtttgcccagggaccggggaggttcctggtggggagaacacatgagctctttgggtcatcgtcccctttgtctctgccgtagtgcccgctgggccaggccacgaagggggcccccactctgcccagcctgcatcctcgtccaccatctgcaccctgccatcacctcggtttttcagaagttaggaaaggagtccaggcgctgtcatccacttactgttcactgtttctgaggttcttagggattccgaggggtggtggatcgctgaagggttcgagaggaggagcgcagcgttcggcagatgctggcatcctgggcccttttccaagacgtccaggcctcctcctccgacttgtttaagggcagagaataaggttgcaaaggaaatcaaagcctgatgtggagaaatgaaacatgagacctactgactttttaaaaacattttaaataacattctctaaggtttcattttatactgaaggcagctgtaataagtttggaagacagtgtaaggtttctattacagaacaatcctgcttgcagtttttctaccagaagtgagaaagggcggagggggagtggaggtggttaagaggttattttgtataaggtgagaaaatttgaaaagatgaattcaagactgcaagcgtgtaacatttggtatgctttaatttgcaaatgcaataacattaaaccattgcaaacttgggggggggggtgtgtgtgtgtgtgtgtgtgtgtgtgtgtgtgtgtgtgtgtgtgtgtgtacatagccgggatagcattggaataacttaataactggagctcagcagcactttgaccacaaggaaaacaagactgcagctctgtagtgggccctgccagtgttgcctcagtgactaaattccctgccgaagcctggcgcaggccagagatgtcaggcgggatgaaagcactcattgttcacggggcatcatggtttggtactgcatgcacaatgtttacttgtgaaacgatttattagaaacaaatatgtttaagaaagaggacttggtttgaaactcagttgatctggcttatgacatttaagattttatgacctttgtttctaagaatagatgtgtaggcccactgtaaatatttatcttaaaacgcacccacactacacacacacatgcatgtacaagtgcaaaactggaaaacggagccagggcatgaattgatactaaagttcacatttctgtgtgaaggaataaaccttcttactatttgctaggtgcataggagcatagtttgtgaccttgtctggcaggatctagcccagaggacagcttcccctcgtgctgtgaagtctcttggtaggaggcctggggaggagaggagcgtgtgtctgttcgtgcgcggacttaactctgcccttcccacatggatgaggccagctgggattaaatcagacctcggtcactgcccgctgtggacaggtccctggggtgtccagccagctgctaggcctgaccaggaggcttgctggggcccatccctgggtcattgtatgagccagagagcaagggtttcacctgacgtctgaaggggcccagctttgagattttctgcccaccaacaccagaagtcttaacttcaggttctttgctcagcctacatgggcaatataggggcagatgaatgatttctttgcggctccagtatccttatctttataatgtgaaaacatagatgtctgtaaagtgatgggagattctggaatgaaatgtgctaagagtaaccactagcactttttctttctttttaaagaccagcaacaggcttatgcagtaaaatcaatttgcacatggtctggctcttgtccaacaaattccactagatgatgttttaatctgaaaggtccaatgatgtagatatctattgttctaatttgctgtttccagcccagtgcatggggattctcaggtacagtgcagagacatccttggtgtgctgagctggctgagttctcctcatttccctcagttgttttttaacactggaggttagggtagtggtacccacacctaggggaggaagagagggaggaggctggtaagtgcaggcctgttgggatggagttgtattcatgaatggacacatgattgtgttttgtgtggcttttgacagatctgtgtaggaaggttccagtaagtttgtacgacaagatcaggtagcagtctggtggtctggtggttatttaattctttttattttatttcattttattgttgcaagaatgctaagcatgagaactaccatctcacctaagttttttttcttttctaagacggggtctcactctgttgcccaggctggagtgcaatggcatgattgtggctcactgcagcctcaacttcctgggctcaagccattctctcacctcagtcccaagtacctgggactacaggcatgcaccaccatgtctggctaacttttgtattatttgtagagatagggatcttgctatgttgcccaggctggtctcacactcctggcctcaagcaatcctcctgcgtcagccttcaaagttctgggattatgctcaaaggcatgaaccactgcgcctggtcttcaactaagttttcagtgtacaatacgttgttgttgactataggcacgatgctgtgcagcaggtctctagagtttgctcatcttgctttactgaaactttatgcctcttgattgcaactcaccatttccttccctgtcccagcccctggcaaccaccgttccgctctttgattttatgaatgcgatgaatttagatacctcatatcagtggagtcagtcagtgtctgtctttctgtgactatcctgtttcacttagcatcatggcttccacgttgtcacatattgcaccatgtcctccttcttcatggctgaatagtattccgttgtgtatatagccacattgtaaaaattaatcctttggcagacacttagattgattccatttcttggctattgttaatggtgctgcaattaatataggagtgcagatcctgattgcagttcttttagataaatagagaagtgggattgcaggatcttagggtagttctgtttttaattttttgaggaacctccatattgttttccacggtggctgcatcattttatattcccaccaacagtgtgcaggggttccagtgtctccacatccttgccgacacttgtcttttttttttttcctcccatcctgacaggtgtcatgtgatagctccttgtggttttgatttgcatttctctaatgattagtgacattgagaaacttttcatacacctagtggccatttgtgtcttggagaaatgcatagttaagtccttagcccatttttccatgggtattacttaacacttgaggagtctcatgtgtggttgctagcacaccttggcttgattgtctccacagaagttttgcagagaccgcctcttagctggagagaagcctttccaggcataagatgagagggtgtattctttgttgagaacgtgttctcgaaggagagagaggcaagacaagtgaagctaggaagtaattttgggataccatctctgcccttttatagggcagtctaaaacatagccaggagttggaaaccagcatctccttatgtttcattcagtgccatattggaataagctaagaaacatctacttgtgcatttagtaactggcatagagtaacacctgatattcatcaaagagctaaatgggtgaataaagaatgaatgaatggagtgaattccacaataaagaggtgaatcccattattaatcaaatctgttcataactttgggctttaggctttagtttaatttttaaaacaaaggttggaagtcttctcagagcatcttagaaatgtactggagccgagcgtggtggctcacgtctgtaatcccagcaatttgggaggccaaggcaggtggatcgcttgagcgtaggagtttgagaccagcccgggcaacatgatgaaatcctctttctataaaacatttgaaagtcagctgggcgtggtggcggttgcctgtagtcccagctactcaggaggctgaggttggagaatcacctgagcctgggaggctgaggctgcagtgagccgtgatcatgccactgcactccagcctgggcaatgaagtgagaccccgtctgagaaaagaaaaaaaaatgtattgggagacatgtgcctattgaaaccatttttggtattcagagtgtctttaaagttagtcttgtcatttgcctgtgatgttaagcttgtggttgaggtgagtttttgagattatctcaaataggataagtgaagaagcttccctcccctaccatttgtcacttagattgtcagagtagaatttcttcccgtattcatcaggtggcagtggacagccaataacctgggatgtaataagttcttttctcaattttctaagtaagtgttctttttacaagggtcgcgctccagcagtctcctttgaagtcgtttctgttattcatggggccacagtgttatttcaaaggtgtcagccagcaggcttgaggcttttctggcatgaggtcactgacagccctctggacaacacaacttatttattggtctctcattctcccatccccactcctcctttcttccctctctccaccagagcgatcgcctcaccggcccatcctccaagccggactgccggcaaatgcctccacagtggtcggaggagacgtagagtttgtctgcaaggtttacagtgatgcccagccccacatccagtggatcaagcacgtggaaaagaacggcagtaaatacgggcccgacgggctgccctacctcaaggttctcaaggtgaggactttctgaatctaaaggtacccacaactggggtctccttcatgggtttggccacaggttctttgatttcctgttggagttgagagaggatgattctcttttttgactagccagcagagagtgttctaaggaattaacagatcattacacttgctagtagaatttcagaagggaactatggagtaggggaagaactactaaacttggggaagaactactaaacttggagagagaatagttcagctatttatcagccctgagatcgcagacatttaggcttagctgcgcctctataaaagtagagatcatgatactctgtcccccatagggcggttgtgcagaataaatgggatggagtggatggaaagagctttgtaggctcaaggcattgtgccagtgttgattgttactctgatgttgttttctattaataggacattaggatccaattttagtagccacgttttagaaacaatttggattttttttttaacaaaaacaaaacaaaacaaaaccctgacctttgaaatccattcagaggtgatttagacaataaactctaggtcatatttatgcaccagtgaaatgttgaacaaggaaaatatctttccctccttatttcttatttgcaagcccccattttcatagcatctgcctcttttttagatctaggtttgctcttcaggagactgaggacaggggcagctaagtctgtacagctggctcttaactccttgcctaccacgcctcccatgtctagttgctcatggagaatgaatgtccttaagaagaacattcttccagtagaaccataggtgacccagctaagaactttcagccaatgaagtgttctcaccagctaataattccaaggatcaaaggcattgggaaaagatgaccaacctggggacccacccgacctatccagttagctatcgctcacaccctcctgcccttctctccaccaggtctttccgttgtccaccactggactgattttgttctttaaaatccgcagccctttaatgccgctgtttagacgtaatggagtttgttttcttgcggtgtgttggtggtgggaccatagacaatgctaagaccttcctggttggccgttatattgttctcctgtgtctgttctagcactcggggataaatagttccaatgcagaagtgctggctctgttcaatgtgaccgaggcggatgctggggaatatatatgtaaggtctccaattatatagggcaggccaaccagtctgcctggctcactgtcctgccaaaacagcaaggtaacaatgctttcatttttgtctttttttaaaaagaaagctggatatagaagctgaaaagacttggtgctttgggagactgcaggcagcttataggataactcttgtggccttggtatatttataataatctttcttcggtgatgcagctggtatgatgccagtagccatggaaaaatgcccacaacgttcaaagtgcttgctccaatttcttctagagattagcctccacccccacccagtttttaagttgttccttctggttgatcttgtttaggctgcacatttcccatcattactgcacattaacaccatttaaaacacacgcttccatgcctgtttaatacggggcatttgagtatcagcagagtttgtctccttctacttcaagtttttagggaaatattggcaagatgcaatttgttcaacaaagcatcatttctttggttgcatagttgatccttatgagttgctgttcttgaccttgttgcaccaaatttgaggggagctcatcttaatgaatgtactactggacgctactaaaggcaaaaggttgactttttaggtttgtcatgactcacatccaaatgtttattaatgaaaagagaaaaagcccagtttttttggttaccaagatgatgcttgcttccatttctttttgtcaatgctatgtagggcaagatggtatcgcagaagtaaaaataaccagagcctggtaaccaagacaaccttccaccccaattggttcccacagggccaggaggatgggtgaggtgtccatctgggcttatgtgcagtgtgttgtcttaaaacacagcaatttagatagaactaccctttcctcttggtgggagtctgcagccaacaggaccagaaccagcttggccttctgggcaccatacttttggaaaaccacccctaaatgcaaaccaaagcacaggccaagagaacggacctctgtgggttgattttttccatgcgtttgattgcgtgcatgtgtaggaggtgaagccggtgtggtgacgggcctgtggaggtgagctggtcagtgttgctccgtgtctctcggttgtgggctttgtggatgggctgcagtcggaatctcccagtggccagcaccccctgaagcccccggtgcgacgccttgtggttccacagccccctccacaatcattcctgtgtcgtctagccttttcttttgcttcccttgttttctaggccgccggtgttaacaccacggacaaagagattgaggttctctatattcggaatgtaacttttgaggacgctggggaatatacgtgcttggcgggtaattctattgggatatcctttcactctgcatggttgacagttctgccaggtatatactgttctttctctctgggtttttttcccttttcttggttgactgctataaaattaacacagcttctgttatcagaaatggccccttttatccttgcataaagatataaaaaatgttaaaaatgatccctcagggataagaaaactgccttggaaattcacacacagtgagatcccacactcacatttatgatcaagggaaatttcacccttaaaacctgaagggatctcatatttttagtgagtcattgagccaatgtataaattagcccatccccctttctcttaaggaacaagttgccattactttggtaaaattcaaagtaatttattctcatttcaaattccattttgctaaaatcctgtatgtgtttttattgctttcatcccactttgtatttttaacgagatgtaaatagagggatgtgtatggaggagcctggggagcggcacctctgaatgtcagatgcacagaagcagtgtgttgcctaccttggggatcggtggcttgctgcatgttgcgatagaatggacttttggtttgctttcattgcaaagcatgctcctgccatcttgggcttgatgttatttctgcctcacagagaaataaacatcattgcagccctgttgcctaaacattgctgctgtctgaatctttaaccgacatctctattctagtgaaactttcttgaaattaaacactgtcctctctgatgcatctgcctctttgtcatttcctttgtgaaactgcagagactgtggtttgctagcttatgatgttccactccagttattaattccttgtttttagagtacagtgcttacctgcatgcttattttacatctagtaaaaataaaatagatcgtttcatttttgtgctgttgctgctgagagttttgactatcttgcaagtatttttctgattaaaatgtataagctttcaataataccattgcatccgtttttccttttgttgcgaatctgctctgtgaatatttgctttgaaacaaagagatgtctcttatgttgaagcttgcttttatttgcagtactgcattctgtggtgcctaactggcacttcttaaccagtttgcctgacagtgctagcacttaactaagaatgcagtttgagaaaaacactatttggaaatacactgcttataggtggatcatcgaggactaagaagaagtcagacattggaagttgatataaaaatgtgctaaattaagtaattatatgtatactcacacataatacctttatgttttttctttaagagaaaagctgtagtgacataacaatataaccggatatgtataaacttaaaaggttattaaagaatattataatctttatgtattatggatctaatggttctatattataagcaattcaatctgtgtatttaatgcattggtttgtttatggactagatggtattaaggaattcaccaaaactttttcagaccagcctactagatgaacatcagtttcatatggaattgtgttcatccgggttaaattatcctgtggagtcttcctttggaagagcctacccatgtaagactgaagcattgtcactgtctccttagaaacaaaagtgggcatcgttgatatttcagaattttttatttggtttgcattcacagacgatcatgaaagataatcctttcattgtgggtacagttggtcgtcctccactgaaatgtctaacaaaatgtggcctcatagcctgccctgtgcaactgggtgtcaaccactcactggattgcaggtgcccactgaggctagtgacagtgactacctgggtcctggtggtcaaatgatggacccctggttattcattttcatttgggagtttttgggaagcccaccttgccttgagaatggtcgtcgccttttggttcctttggttgtgctatgatgcgtcagtctggtgtgctaactctatggcctgcttatctgttcctcctcctgtgatctgcaatctagcgcctggaagagaaaaggagattacagcttccccagactacctggagatagccatttactgcataggggtcttcttaatcgcctgtatggtggtaacagtcatcctgtgccgaatgaagaacacgaccaagaagccagacttcagcagccagccggctgtgcacaagctgaccaaacgtatccccctgcggagacaggtaacagaaagtagataaagagtttaaagaaatttactcctcccccatgacccagccagcttgtggatcttgtcctctgctttgatgccatcgacttctgtgagcttccatgtgcgagtgattctggtgtgatgcttggcggtcacccagttagtgtttggagcttggagagtctagtcatggtgcgttgcttggatcaatggggtccagttccaagggcaagaaaggacaatactgtcagaatcagaaaactaatcagcaggactggaaataactggaggcaaatccccctgtgtgtgtttgatcagactcaagtacagcggtctcttcgaagctttagccacattcgtgtcctgtgatctaataccttttttaagataagcatgaacattcgcttgggacttatgccactagtacgaaagagactctaagttctctgacttattttttaaagtcaagatcagtatcttatgccctgggggtgcatctgaactgtttgatttaaactggtgcacaataactttctacacagaattttggcttaacctctttgcaatttacaatagaattgtatgcatctattatgtctcattgttagtagttcacaggtgtggctgtggatttattagtagaatatttgtatggaaccagcaacagattgtttttaaccaccaacttggtctttggtggttgctttttgcttgtgtgtgcctcctgattggtttaattttgctttgggggagatggggcaagatggagcctctggtgtaaaccaaagccctgcataggtaggtgggacaggaaatgcctcagctcttttctgcttattcacagagatggaagcggaaggcagatgtagatgcagaacgtttacaaaagcatttgaaacttggttctgataaaggtttcttttgaaatagcaagtaaaacagcaaactcattggctctatttcagtgtgtattttagtaaaatgtacggggtgcttgttaaaatttcagattcctttgtctcagccccagagattcttgttcagtcatcttggatagggccaggaatctgcattttacacaagccctatggtgattttagaatgcactttgagaaactccaggttaattccaggcatgcctctcccgggacttcaggtaggaatgacattttctggacaaggcattaggaaggattaggaaccagttggtcagcagtggttttggaatgggtctggttgttcacaacccagcttcaaactcctggctgaatgggtccttgttaacttctctaaagccatgtttcaagcaggtctttctttgtggagacggaggatagaatttaaagtgtgtgtcaagcgtaggcgaatgaccaaattgtgttaacagcatggaaaagaggggcctgttgggtcacgtctgccaccaagaatgctgttgtcattttgagtgacatgattatctttcttggggccaggaaagcaaagatgaggccagttggccaaccagtttctagaagagtccagtcctgagataactcttacatggtttctattattttttttctaacagggaaaaatggtaacttctggaggcaacttgtaatttggcatagctaggccactgccccttaattatctcatcatctttttttctgcaactgttaaaatgcttttctttttacttaatatagaagggtaagatgcccttaaaatccccctgactcagccacagtcatcgtgttttctttccccagtgccagctggcttttcttcactgtccatctaagaatacagtttgagaaaaatagtatttggaaatatactgcttgtggatggatccttgaggactaagaagagggcagacattggaagttgacataagaatgttctaaattaagtaattatatgtatactcacatgcaataccatttatattttttctttaagagaattcagcctggccgggcgtggtggctcacgcctgtaatcccagcactttgggaggctgaggcgcgtggatcacccgaggtcaggagttcgagaccatccagcctgactaacatgttgaaacctcgtctctactaaaagtacaaaaattagctgggtgtggtggtgcatgcctgtagtcccagctgcttgggaggctgaggcaggagaatcacttgaacctgggaggtggaggttgcaatgagccaagatcacaccattgcgctccagcctgggcaacaagagtaaaactccgtctttaaaaaaaaagagagagaattcagcctaagttggtcctttttcctctcttccctgtgttaccagagggaacatcagagttccttcctctttttcttccctccttcctttatttattcatcataatttactaagtgcggggtataaatcaggttacatgtaagacacagcctgtcacattcaccagtggttccaaggttatttgatggtaaatgcctgtaatcctagctccacaggaggctgaagcgggaggatcctttgaacccaggagttcaagaccagcctgaccaacacagcgagactccaactcaaaaaacaaaacaaaacaaaacaaaacaaaaacccaaagtgggaaaaaaaagaaaatgtaattggcttgtgttcagtagggccaaggagtataacagaagcagaggaaagggggcaaataccagttccctggaaaagtacatctctgcgagattaatttatttggggggaatgttgacacacctcagctccttctacatgtccaagtggggtacattattggatcttcacaaagaatgtttcatcagtacgcatggcccctttggtagagaaagagatgcttatcgggtatctggataaaagagggttattggactggagctggaatgaaaagccccagaaaggcctgcagatacgttgatgacagagcaaataccacagggatgccaagcatgcctttacctgagcctctaatcagatgtgtcaaggatgggttgtttctaggcatttatgaggccactttttattctgtgttggccagtctcctctaggacacagggatcactcagtgtctccatggccctgactctttccctctccaacacccatacacacacagcgtctcactcaggtccctcagtccatccttgttctcttttcaggacaagaaaagttgggttttcgttcctcctgtgagtttttccttcttggcatttattaatttgcactagacttactggtgtaacacagacgtttcagtttatgttatttttttgagcaaaaatatttttttccagtaccaaagaagaaattccttgcaatcatttcctagtaagcgtgaattttttgagactttgtatgcacatggttgaagaaggagaagcaacttttgggtggtgggaggcagatggcaggtggcatctccctgtgtcctttgatggaggctcatgtcacattcagtgtcagggcttgggcaccgtgccagacactgctcacccactcccactcctttggcgcccagcgagttaaatgagaccaacaacagccagcccagagaggggcatctttgtgagcgtgttggttctggtacaggtctgctggacagccagtgaccagtgtgaagcagcctttgtgagttaaagggggcagcattactttctgtgttttccacacatcaattgggtggtgggggaaggtgtaggggtgggtggaggatggagtgcagaggaaactgaggatgcctgtttaggagacgtgcggtgttgctgggtttgctgaatcagttttacatcgagcacatcagtttctttctctggggcttgaagcttccatagggtaggatggagatttaactgtcttatggttggctccgtccagataaattcatctcctgtgcagcttacaccctctctcactgccgtcagcatggtacaagaggctgcagggtggttttttttttgtttttttcagactttagtttcaccttctcagctgctgatataggtaggctgaaaaccagagaaaaatcaagagcagactgggtgccgtggctcatgcctgtaatcccagcactttgggagaccaagacaggcagatcacctgcagtcaggagttctagaccagcctggccaacatatagtgaaaccccatctccactaaaaaatacaaaaattagctgggtgtggtgatgcatgcctgtagtctcagctacttgggaaactaaggcaggagaatcactagaacccaggaggtagaggttgcagtgagctgagatcgcgccactgcactccagccttggtgacagagtgatactccgtctcacacaaataaaataaaataaaataaaataaaataaaataaaataaatcaagggcagtgaaggctaccttttgtagcaatacttttgaggcaaatggcatattcctggggacgttaggaataggaccaagatgaagggggaggagcggagcgggtgcctcgggggaggaatgtgtgactcagtagccagttctcaggtccagtgttagtgatcctcaaacatatgccaaattccgggaagggggatggatgttctactcccagaagctcgtttactgcctggcagctgaacatcatgatctgggaatattctctgtattttggtcaatcaggtggtctaaaccttaccggctccagaaaacatttgggtaattagagtggtcacggatgacttaactggaatctgccctttcatgtgggcacctcaccctccctgcccctatttcgctgctcccttttctcctctctcagcctccaaaggacatgacagtttgcccaagatctgacctggaccttggctgatgcgatctctcgagcagagccagcgcatctggggctggtgcgtcatggctctgataggtttactcacagagtcccagggaaaggcctgcgggaggcagagactcgctgtgggagaaaagtgagtgtctgatgaactgccttgcctaattacctaaattttgttatggaggaattaaaaatgcaacttcagaagcctttgaaggtttatctcaggcacccagcttgcggtggtgaaagcattttgtttggccataggggagtggtgggcaaggcttatattagagcagaagtatgttaatgccagcctcgtgttcttgtgggggaaggtggtttgcagcctaagagtcacagggcctgtttggcaggctgtggtccaagtgtgtttgtcagtcctggggagtaaacacacaaatattaattcgtctcttctccctggaacatctttgcttctgcttgctctgttctctgagaaatcccctctagatggtaaatttaattcagtataaagagataacactgttagaccgggcgcagtggcccacacctgtaatcccagcactttgggaggccgacgtaggtggatcacctgaggtcaggagttcgagaccagcctgaccagcgtgatgaaaccatgtgtctactaaaaatacaaaattagctgggcgtggtggtacatgcctgtaatcccagctacttgggaggctgaggcaggagaatcacttgaacccggtaggcgggggttgcagtgagccaagatcgtgcctggataatgagagtgaaactctgtctcaaaccaaaaaaaaaaaaaaaaaaaaaaaaaagaaaagaaacagataacactgtttcttggtggccctttaaaaagaaaggaaaaaaaaaaaacacttcctcacttaatctcccatatgtactatggaaatgtacgaaaagcacatttacttaaaagcttgacttatggcacatgctggagagattccggaaagtgaggaaatggaattggagtctgtgaaaatacatgcttaaaaaaaaatgcctgccaagattcgggagtgggaaaacagtttactagagtgttcgtgttgattgtttataagtaactcacttatcactaacaagagaatatgttaaaattggttaggaatgaaactctggaattgaagtttctaggtaggaattgaagaataaggaagattatgattttgtgcaaaagaaaagagaatttaatagtgctaaagaagtagaaggatttcagagatgagcagtgggagttatttgaggttcctgattcagaggaaagatgcccagtaaaacatggagtcccacaggggaatggcctgcccaggaccgggccaagcccccaacacaggctcgctcttggagtggaagggaatgaagagaaagccagccgtattttatagccccagaggggattttaaaagcatagtaaaaatgcatggaggtaaaattaagatatacctcagtagacagagcaatcaaattctatagtttcttagactttgcacgttttcttacccttttcccccgtttcgtgttcttataaaagtattttccaggtttgtacatttaatctgaatctccgtacttcatctgaacaaaattcccgtaagtcatccttcttgtagacctcatttttaaaattctaataataatgacaataaagttgataaaggctttcttatttatttatttttaggctttccatttgaaaagctgtcacatgaaaatcttctcgagacagtctgtttgggggatggtgtagatacatgtgaacttttgccaggggtttgtggatgcagattcctttggggtcatgggtgagccatagaggggtgaacttcagactgaatgttaaatttttctcttctgaggtaacccctaagccatatttgtcattaggaccctcttactgtccagttttcctcctgccctgagatgattccctgactcctggattcttcatctcctgcttactagaaccccagcccatccttggcagtgagcagagggcctcatctagcaaatcagacatgcccactaaggcatatcttctgcagtcagcctttaatgtcactgggttatcttcctggttgcacacagtttgacagtacaatcgtcgcttggtatgcgttggggattggttctaacaaccccgaatataccaaaatctgtggatgcccaagacctttatttaaaatggtgtagtatttgcatatgaactgtgtacatcctctcatatacttagtcatttctagtgatacctgtaataactaacgcgttgtaaatgctatgtaaatagttgttatactgtattgttttttatttgtattttaaaattgttgtattgttattttttattaattagctttcaaatatttttgatctgtgattggttgaaaccatgaatgcggaacccacagatatggaggactgactgtatcttacacacagaaccaccctaggctccaaacgctccaagttacccagagagaagtgtctttgtctgttctctcagatctgggcagcaaatgattctaaagggactaagagaaaatattgcagtgttggtagcagacattaactgagctcttagtgccaggcctagcactaagcacttcatcagtttttttttccctcattttatcatcacattaatgctgtgcagttggacctgttcctgtctcctcttttcttttttgagatggagtcttgctctgtcgcccagactgcagtgcagtggcaccatctcggctcaccgcaacctctgcctcccaggttcaagcaattctcctgtctcagcctccccagtagctggggttacaggcactcaccaccatgcccggctaacttttctatctttagtagagacagggtttcaccatgttggtcaggctggtctcgaactcctgacctcagaagatctgcccaccttggcttcccaaagtgctaggattacaggtgtgagccactctgcctggcccctgtcttgtttttaacagatgaggaaacccaggtctagaaaggttaagtgatttcccaaagctcacacagtgagtgagtgctcaaactgggacagggaccctgacaatctgaccgcacagtcccatgttattgcagttggtcaggatgcagcctgcctaatgcggggcctcatgttgtgaatgatgagcacaggaagggcagcaacgggattggctgttgcccacatcgaaggatgcagagatgccacaaaacctagcctggtagcagaaggaagggccgaaagcagtgatcttgtaagttttcactcattttagaagtcagcatatttcaagcatatgcccttcgttttcttttccgttgttcatgcctcagctcagatccttattattctaaaaaatatttttgttaaataaagtacttcttctagaacataaaagaattacatacacatggtcataaaatccaaatggtctagaaagttctgaaataaaatgtattttctaccccctctctcaactcctaatctctctgcccacaggtgatcactgctaagtctcttatatatccttccagaaacttttaagtgcccttgttctcacacctcgctgtgggacagctgccttccccacatcctattctgtgagcctcgctgatgagagcggtgattttcagggaggaggcacagaagcccagccatgcctctgcctctgctgggtgttaacgtcatccaggactgcggtcccaagcaattgcttaatcggttcccactcctctattgattgcagcttcctatgcaccccatagtggaatcctggaaactggtatccagtgatgaggggctacgctgcaggccatgcagagagtgttctggctgtacaacctgccagaccctggccatttgcggaagtcgtcccattgctaggcctccttttttttttttttttttttgagacggagtcttgctctgttgcccaggctggagtgctgtggtgcaatctcagctcactgcaacctctgcctcctgggtttaagcgattctcctgcctcagcctcccaagtagctgggattacaggcgcctaccaccacaaccgactcattttttttatttttagtagagatagggtttcaccatgttggccaggctggtctcaaactcctgacctcaagtgatctgcccacttcctcctcccaaagtgctgagattacggcgtgagccaccgcgcctggccggccggttcttactagtttggctggagcttcttgcccatgatatcctcaagcataaggtccccctgcaatgagtggtgatttttgcctgttcatggggaagaactttcagaagaccttcttagtcttgaaaacacctgcgtacttaagcatccacagcacacggccctgatgcagaatgaattaggaggacagaaagatttggggaagcatcattggccgttaaacccgctcctgaatctttctgagctctgtaggtggagcttgagatgttcctgtggaccaatgcaaactggaagtcttgatgttctctgaaagttcctggcttctgatgtgtcccgcagacgaggttagctcactacagtgaggttggataccacatggcggggactttaaagttgtctgtttcatccagggtggggcttatgcctagtctgtgacctcagtggggagcaggacggattccccaggagcacccacatttaccttctcgtcttttcccgcttgcttctgccatttgcttgtgcaacccagacacttgggtgtgaggatctcagctccacaattaatgattctttagttcccgcttttaaaacattttgaccatacaatgaataaatgttgctcatactatctgcataatgaagtttaggaataactgccccctgccaaaagattgaatggaaggctcaggaagtgctcatgtacgttttaaaagataataggaattctatgtgaaaaatggcccacttctttattttaatactgaaaacaacttcctaatcctaaaatgattttcttcccctaatctattcttgggcatcttcttgaatttccagcctgctttgagggaagtctgggtttacaaaggcgagattcaaagcttttcaaacaggacaggtcctctggttccctgtgagaagagcccaggacccaccctgtgaaagttcatcccacctaaatttgttcatctggactcagtctttgccagtgtgattgaaggcgtttgtaagcacatccaggagtactatccacctgggcagtcacgcaggagacagagcccagggtgggctagttgcctgcttggagatggatcgtggttaacttcacattcttgttctcttgggccaaagtcttgttcatggtttagaataagacagtgttcaagcagcctgtggtcagactaagattgcgtagtcatcctcaaaagtggccttccagtgtgctctgcgtgagtcttttttttccatagaaaccagccaaaggacagtgatatatttaagaaataatcattttatcagacacactgaaatggatcaggataaacaagaaagtaactcggtggagccctgtgtactgccaggtgggagaggagttctcttgtgtggttatgggaaaaggtgtattttctttccattgatgcttcatcccacgtgtttagtgcactggtttctgaaaccgaagacaagaggcagcccatttccactgaatagcctggccatcaataagtttccagaaggactggggagaaacaaagaatggcccccaatgctggggtctggggttattttgagttaaagggactcggagctactgaatgtcttccacattcaagtcctagaactctttccttgagatattccactttacatttccaaagacagaggaaatatggtagagccaatttcctaaaagttttcgtagaatttcataagcacagcattgatccatgatccgggtagtctgagaggggatccattatccagggctccagtacaggtgcaggtacaaccataaaggcactaatgaagccagagaggactgtctgcatgtcctcaagtgactctctggaggaattaggacagaaagaaaatttacattgtgatcagatggtatagaaaaatttcatagaaaaacctgaacataggaacataaaatttggatgaaatctggtactgcatggactggagggcagaggagttagattccagtggttttctaatttggtttctgacttctgccagcccccaacccattcctttctaagattcgatactctggctgggctctggctgacttccagccttctcagatggagccaggattacatctgtgtctttgcattttgtatccaggtttcggctgagtccagctcctccatgaactccaacaccccgctggtgaggataacaacacgcctctcttcaacggcagacacccccatgctggcaggggtctccgagtatgaacttccagaggacccaaaatgggagtttccaagagataagtgagtacttctcttggccatgtcccaggatggagactcagctataaatggggatattggattaacattttctttttatgacccttagccacaaaggtcttggtgtgatgatgtcagcaggagtaagattgtatttctaaataaccaactcctggaaaagaaaaaaatggatttaaaaaaaaaaataactccttgaaagcagagctacttgcccctggctggtccccaaagaagatggcatctggttatcattttttaagtgtctgggcaattcagactccgtcaaatggaataaaagtagaattatccaatttataaaacagatctgacattccagcttttggttactagaacaagactgttctctgttcacttctgtggagaaattagatgcagaatataaatggccttaaggaccgctacccagtgttgctgttctcattggttattaatgtcatattgggctgaaaagcttcaaatatggtacctgacatctaatttctgtgatccataatattttccttgttggatgatacagaggtgtgccaatcagatgtttagtcaaaatatggccacctgggtggtgttggggctatgtatctcttggtctcgcttgaactccacgtactggagctccgttgggctgcatttgaatcctggctttgccagacagtggctgggcaacctcgggtgaggcacctgattctctgaaattcattctcataaaatgagggtggtggttcagacctcccaggactgagcagagttcttggcttgtgcgagttttcctttcatttcccttcacgtggtggtaacctgggagctctgaactgcaaacctcagcaggatcatcgtgtggggcatggagtcagtgggcagaatttgagctcctagccctcgtcctctaggcagggaccgacccctagatcctccttctgaaaggaagtgcagtggtcattgtagggctgtccactcacttctggggtactttttgtcgtcacagcttgagagtacgggaaggtggaaatgctgactacttctgcatcacatacactggaataagctcttgacttgcttataagcagctaccctgtttgccttgacattttcagtagctcctcagattatatacacttctcatgtgtacctatacacatttggaaatgcaaagataagctcttccagagactgatctgatgagctctatttggaagggagaggtagcttatgtggctggcacttctgattttgattcacgtgatgtcacatcagttttgtttcccaagtgccaatttagagatgtgtaccgttagctaggactgaataattgtatggatattatttggttagagtgttaatggaagtaatttccagttgatttgtatactgtagtgaaaagaccactcactcattcacttattcattcactcaaggcatgttaattggacatttactggtggggcaccagagaaaacacaaagaatggtttctttacctgtaggatgtggagaaatggatgtttcttgtgaactccgccagccctagtttgtgtgtgattatatacacagataggttcatgtgcacattcctatatatataactgaactggagagttgtgatcatattttaagaaattgcagctttcgggtttagtccatagtttttgccacctgtgacaccacagtcaacagtggaagtctgtatgtgcccaactgttacctcccacccggggtaccctgagtgtggaaaatctgagtgctaaacatttcaaaacagtgtttagcgcaaacgtaggtggaacagatttccaatgaatgaaggctatttagaagcagtttattagatcggaggcagaagttatacaaagaaaggattgttatgcttgtagtagcaaggcggtgggacataaattagccatttttccaatgcaaatatttattttctgccaagatgttaaatttaattttcgttctgggtagaaacaaaatgacctctgcatagcacatgctgcccttagtctttatgctgcacttttgcaaactattgtgtacttaccttaaatactgtttactaatggcagctccatgctttgctgtgttatgcttaagttagaaagagccgtattcataagtattccaaagacttttgcgttttgttggtttctggaatgcacaaggacaatatatggctattcgtccgatgtgcatagaccttgtaatcttagaaatttaatttgtggtgttcactttggattttcttcattgttaattttatgtagtcataaggacttttaaacttatgtcaaaaaaaaagtccccaattttttagaattttctttttagtaaaaaattagagattccttgaaatgcttttaagaggcatatcctgtaacttggcaaggaatgtgaccataaaatccattggtatttgaataataattttaaagccaccattttacagggacaaaaaaataagaacagtcttaacgttttttctttgagccattctaaattacaaatatttaattggctcaagatcaaaagctcttctctggcacttaggaaagctgaccaccgcactagcaaggataccttccctaaagaaaataaaccgagaataccaatgtgaaatttaatagccgttccaccagtaattgacattctctaaaacgtcactaggaaaatactcaggcgcgtgtgtaccctaagtctcattagttccatatgataagcactccatgctttagtaagccgctgaaagatttttatatttagttctggaatttccctcactacaccccatcaccagatgctatgtgctaatcccctatttacacatttaggctgacactgggcaagcccctgggagaaggttgctttgggcaagtggtcatggcggaagcagtgggaattgacaaagacaagcccaaggaggcggtcaccgtggccgtgaagatgttgaaaggtgagcggggaggcgggaggctcggggaggggctgggtggagagtcttatcaagaaagttccttttgtggcatgtgaactctatcatggcacggggtcagagagcacatagttgacctaggggttgagaagttttcggtataaatcagcatctcggacagactatttatcttgagctgtgtgtacttataaagaaaagccagttttgttagaaagcggtagcctcctacatagagttattctttgactccttcttcgtgaccacaattcttcattctctctgtatttttatgtgcttagaaattatcaactcacatataattgaatttattagctaggagttggtgtgttagatttgggacttaaaccttaactttacaagtacaagaaaatttgtgtttttggagggaacgaagagacgtaagggagcagaaagccttctcttttgcgtgaggaacaaagcagaaatgacactggtctgggagagtcacttagaagctgagaaggagtgaacaggatcagggctggtgcagagcctcctgggacacataaacaattaccctgagatgtaaatgtcgtgttgtgtttgtgggactgtgaacacttctacgttaaccttccaaccctgcttcatgcccatgtccaaagaacttaaagaacttttaaccattaacttattcgtcctgcagtattcttttatgagaagagttatagggaactgtcacattataaatcctcttgtagggatctcggaaagaagatcccatgccgagtgtttcccacgtttccaggcagagaggcccatccttgggatatggtgctgggcatgtcgcaggcgctctggagttaggctttgtctttcttttgtgggttctcatgggatagtcatcacatccctcccaaggggaagtagcaggctggactttgtcaacaagatgtgcattttgttttttgggttttttaaaaggctgtttatctgagtgactcccaaggaaaactagagtgctttgagatgttccccaccttggagcctgatgccggggaggaacactgtgctgtcttgccccaggtgtcatggcaccactgactgaggcagcccctggctgcgtaccagggccaggtgtggggaggacccaggcttctcatctcttttggcggaacttctggttttgctaatggagctcagagttacatgggatattgcaaaaagggaggtctgggagttctctttctcttgtgatgcccaggctggcagccttccctgtaaggacacagaaggatattagtccccaagccattgtggcgtgtcctttcttacagcccacggctgtgtctccctccctcctcatggcccgtggctccctccttcacatacatcagtgtaaattttgcacacacagtcacttgtattgatcttccttttgtgaagctaaaaaactgtttgcaacatggttcttatccatgcccatatttcattttttttttaaaggaaacccagatttttccatactgaattagcttgaggtggagggcacatgggaaagtcttgccacttaggagaatctaagagaagctaactgcgagcccgcgtatgtggaacctgtgccattcttgcttgaaattacagagcggaagtttatgtaacttttcttaggatgggaactgcagtgccctctgagaagccactagaagtcgcagccctttacctgctcagaatgcacatgcacacacgtttatggccctgtttatggggaaccgtctgaacccacctcggaacgctctaagggcctcgaggggctgggttaagaatgcttggtcgggagcaagtctgtagtgatttgaaatggccctaccctcggtctcctcgctggtttcaggcaccatgaagtttggtgtggttttctgagacgccttagatatggcagaggatgagattatctcatggtctaggaaagaattggcattagtgtcagaagcccctgctctcgtcctgactcttggccccattggccccccagtgagctctttgacacagagtgaggcagttccctgtgtaggcctttgtcccttcctcgataaaatgagggagatgatttggaaaatcttttctgattctgaaattcaatttcatgctgtttcaactaagtctttggcaactaacagtagctgcccatgagttagaggaaatgaactgatttgtgaatatgcctactgttcatagatgatgccacagagaaagacctttctgatctggtgtcagagatggagatgatgaagatgattgggaaacacaagaatatcataaatcttcttggagcctgcacacaggatggtgagtaggaggaaaaactgcattcgcccaaatactctgcagtttgattgaatcattttagaaatggctgggcttccagatcctgctcccagagcaccctgtgtgcatgtttaaagttctttttaaaatccccattggaagatgttcctagccatgaacacaaagaagggtctgtgcccgtacctgggggccagtggaaaggagggtgcaggtgactttggatttgagggcctagagggcgctgctgtttctaggtcataacctggagggggttttggaaaaggcagcctccttatgtttttgttttgtaagtgctaagagagatttgtcagaataagatcctatgttttggttgagaagttcttcccttaaaacagggattgaagaatccacatcttgctgtgggtcacagatggctgagctcccaagaatagcttaaaagaggagaaagcggtatgaaggaatacgttattttccctgggggagagagaccctggcttcttccattgaatgtttactggcactttgaaatcaatttgctaagtaattagtaaacttgaaaacgcctatctttgacttagcaatttctcttgtaggtctatataggaattggtgaactttttctgtaaagggaggtcgtagatattttagacttttgtgggccgtatggtctttgtcgcaacttctcgtgtctgccatagtagtgagaaagcagtgctagaagtacagaaatgaatggacctggctgcatgccaataaaatttaattacccaaacaggcggtaggcaggatttggcttgcaggctgtagtctgccaaccccgagcctataccatggagaaattattgcacacgtgtgtaagggaacatgtacagagatgttcattgcctactgtttgttatggctgaaacctggaagcaaatgcctatgcatataagggaatggataaataaagtgtggtgtgtttatacgatacagtatatgcagctgtgaaaaggaatgatctggttttgtttttataagcccaacaggttccaaaaggataatgtatgggtaaaaaatgttgcaaagatctaagagctttattattcatttatgtgattaaaaataatatattacttattgaatagttaaaatgaaccaaaaggatagagtggagggatccattgctttccaagagggcgcaggtgacagcatgagagtgacagggaagagcacgtcaactgtgtctctgtgccttttgaggctatcatgaccaagggcttatttatcattttggagagattataatcatatttttatgtgtgcttttctgtatgttaaaactttttcttttttcttcttcttttttttttttttttttgagacaaagtctcgctctgttgcctaggctgcagtgcagtggtgtgatctcggctcactacagcctccacctcctgggttcaagcgattctcctgtctcagcctctcaagtagctgggactataggtgtgtgtcaccatgcccagctaatttttgtatttttagtagagacgaggtttcgctatgctggccaggctggtcttgaactcctggcctcatgtgatccacctgcctcggcctctgtaagggctgggattacagatatgaggcaccacgcccagccgctgtatgttaaactttaaaaaaaaaaaaaaaagcatgggttgtaataactaaaaatgttttgctgaattgcccaaggggagaccctggattctctctttagggagcttctcttcttcctcaacagggcctctctatgtcatagttgagtatgcctctaaaggcaacctccgagaatacctccgagcccggaggccacccgggatggagtactcctatgacattaaccgtgttcctgaggagcagatgaccttcaaggacttggtgtcatgcacctaccagctggccagaggcatggagtacttggcttcccaaaaagtgagtctttcacattctacttggctgggtggaatccaactaaaaatgtctttaaagaaaacaggcaatttggacatgctcatttgctagatcaagccctcgcatgtcttgtacaacctggaaaatatttattgcgttattcccatttgagtttaatgaactgtttaaaaccaaagcagcctcataaacctatagcatcgctgcagagatgagcagaaaagatacctcttctttgagacaggaccatgtgtgatttccctcggaattcagctctccaggtgggaaatggatggttttaaaggccccctttaattcggatgattttctttctttcttttttttttttcttaagcttcatttattttgtggttactgagtttttgaacatagactttaggtgtttagtgttttgggtttgatatggcattaaatattctaagagtaaaggtcaaacaaaggggtattttagtaaccttgcgtcctggagctctgcgtttattttgcctcgtttggcgggtgaccctctgtggttagaagttggccaggtcccctgaggtggactgcctgcattccaggcgtgccacttaccgtggaacttgaaacatttcagttattctgagagtagttagacaggtgcccagatgtcctcggaggcattttggatgacccaaaactcccttgtcagccccacacatagggaagcggaggggcggagctgcctcctgtgcagaggtgggccttgctcctacctgcattgcagtttattgcagtgccaggaattccttgggtccccaaagaggtgagatcctctggtcggcgtgcaccctctgtcactgggggtctgggttgcctgaagagtcacaaactcaagtctccatggggccatgccagtcacaccaccaaggcctgcggatcactcagagtgcagagattcgagggatggctgcacctcagctctactctctggccacataggaacatggcccagagctaccccatgttctggatggttttttctttctttcaaacaggctggagtgccgtggcataatcacagctcactgcagccttgacctcctgggttcaggtgagcctcccacctcaacctcctgagtagctgggagtacgaggatgtgccaccatgcctggctaagttttgtgttttttgttttttgttttggtagagacggggttttgccttttttctttttaatttaagaaaaactttaaaaacattttttcaggagagtttagagtttaagactttttcagatctttttcgtataaaaatctcccaatatataggttttgggaaactaattaaacacagttttgacttctgtgattgtgtttacgtacacgtgcgtgtgtgtgcgtgtatgtagggtagtttgccaatctatttggcatccagagacaaccagacagatccagaacatgggacatttgacaagatatcgcttccaaatgtcagtgtctcgaaagacaaaaactgctggggagacggttccagataaaagggggccgatgagacaattcctaagtgtaaaagtgggatcctggactggatcctgtgggtcggggagggtggccagttcttagaaaggacatttgtgagtgtcctttgaatatggactgtataatattactggttatatttctgtatcagtgttgaatttgccgggggtggtgacagtggtatctgttgtaggagaaatacgctgaagaattgagatttgtgaagtatcagtgatgcctgcagctcagttttaagtggtccagccataaaatataatcaatccattcactatcccaagtgtgtatgtgtgtgggggcaggtggggcaggacatggagacagcaagtgattgagtaggtgtaacaagcaaacccagcagtggtggatactcactgtgccatccctccttttctgcagctgtgaactcttcctaaataagcctggggagggtagcccatctgtaggctgcctattttgatattctggtcttgatcactccctgccctacctgtgtgggagataggggaagcagttttgcacccagcagggtggtgctactaggggaaatgtggtaggagggctggctcagtcattttattaaatccttcaacatctactcctagagcacccccgatgtctcatgcccttggtcaggctctccagcgaagtggccagaagagacatagtccttgacctcctggggcaagaaccatgggtgacagtaagagaaattgactgtaaatgtgggaatgaaaataaggttgtaaaaaaatattgaaaaaggtgccatggaggaaacagggggataaggccttactcatgccaggacgctgcactttgctgtcactgccatggaagcctctgagggggaggaagaggatcagttagtgcttcaaaaatgcctctcactgctgcttgtgtggtgaatgggaaggctgagcccctgtcaaaggtgatgatggtttgggctagggtctgttgggtccaaagacaccgagaaaagctggtgggctgatgttggacatattttgctcttgggataatgaatggattgattagataggagggagagaaagagagatcaagggtgacttctggatttccagcttgaaaaactggatggtggtgcagcttccaagtctgggaggacttgggaatcagggctggggcagggggcatagatttgggtggaaaatccgagctcgtcttgagcgtatctgagtcatccaaggggagataatgaagaagctgcaggcagcagctcagctctgagggtgggctaacagctgggaggcagcaaagggagctgtgagttcaagccatgggcgtggacaaactcatctgcggagaagcttggaagaggagaatagaagcctgaagtcaggtcctgagaaaattctcaaatctagagattgactgaaagcaccagaaacagcagcggaggccgagcaggcacagcctgagcagtaggaaaatcaggacacggagcacagaggccccacatgggagcttcaggaaggagggggcaggtagtagagcctcggcgctcagactggtgagaagcacgggtgttgagtcctggtcctagaggcagtggtggtacccctgcccaccctagccctgaggacccagagctccttcctgttttggagctggcagagagaaaactaagagacgaactttgctaagcagggcaaatgcatccatttaatcgtggaagaacggaagtacccatattaaagtgttgtgataatagtaactatcgttattattaattactgacccctccgggagaagctaaccatcttccaggcaccgtggcagagcatttgacataaagcatcttacgtagccctcagaacaacccggaaataggtgggatttggatccccattgtatgggggaggacgatgaggaagcagcatgaatggtttgagaccagatgtgtcaggaggactcagatgtcctcacttctgagaagcggacttgtaggtccgaagagtggagtggcaggtcccagacctaggtctcctggtcccccactcagctgtctcctgctctcatgaggcccctaactctctctaaactgaggcaagaccaatgagattccacgtggggggcgggtgaggggttgtttagtgccccagtgtggcctcattgtctctacattgaataacagcccaaggtaaaagggatattgtatgggcctttaagacatggcatggttccaaagccacttactggaggccacctgcagttaaggacccagaataggtttgaaaatggaggtagatgaagatgttaagcatggtccccttgcgagggctctgcttccaaaaatggagggcttattcttgaaagtggagaatgaagaaccaggcaaagggtccggccctggctttcccacacccatcccctcacaatggggagccatgggcttgtgagagacctgcttgcctgaaggaaggggcaaaagagaactgttgattacatcgttactgatgtactgggttcatctgtgctcagcgctgggccgattgagatgaacacacagtgcctggcctccagcagctttcagttgtgtgtgtacatgtgtgtgtgtgcgtgagtgtgtgagtgttggggtaggggttggggactggagacagagaagtgaaaaaacaccatggtgtatatagcaatgcaattaggtaatagggtatttgagccttacacaatttataaaatccttactatttttagctcaaatcacactaattttacttttttaaccaaatcccaaacccagttaaccctcaaagtgttaaacctgagcagtttgtttttcgtttttgtttttgagacagggtctcactctgtcacctggctggagtgcagtggcgtgatcttggctcactgcagccttggcctcctgggttcaagtgattctcccacctcagcctcctgagttgctgggactacaggcatgtaccaccacacctggctattttttggtagagacggggttttaccataccatgttggccaggctggtcttgaactcctgacctcaagtgatctgcccacctcagcctcccaaagtgctgggattacaggcatgagccactgcgcctggccctgagcagtttttttttttttttttggttgagacagagtctagctcttttgccgaggctggagttcagtggcgctatctcggctcactgcagcctctgcctcccaggttctagcgattctcctgcctcagcctcccaagtagctgggactacaggcgcttgccaccacgcccggctaattttttgtgtttttagtagagatggggtttcgctgtgttagccagggtggtctccatctcctgacctcgggatccgcctgccttggcctcccaaagtgctgggataacaggtgtgagccaccacgctcagcctgagcagtttttttagtgaagccccagcttccccacctgtaaaatgggtataacactatccatgtcataggttgccgcaggaattcgatgtcatcagccatactgggcacagggcatactgtctacatcatagggatgttggtcttccttcccttagtgacccactgaccttcacctatggaacaccaaactgtcccagggccctaattgtataaaatggtcagctccctgtgctggagaacagctcacattcctgtggatgacggggatttggcttgcctttgattactttctttttctcgggtgtgggttccaagtctcctcttattcaacccagaggctggggtttgatgtttcctagcccctgggatgagggatggccacgctagactctggctttcgctgagaagatggtggagggagccgtcagcagtgtctctgtgcaagctgagccctaatgcatagttggagcccagtgcgtgggaagcacattcttctgaccacacagcttgccagacacacagagcgcgtgtcggcaggagcacaccaccgggagagtttggcccggggcttggaagttcaatttgaacaggcctccaaaactgggaacagggctgcagccccagacgaatctccaggcagcttctgtgagctctcatgtttcctgcttccaacctggccagggattgcaagcttgcgtggctttcttgctttcccgcttctgggcttaggctacccgggaggcccagaagtgtgtgaacacaaggaatagctaggggtcggggtggaatcaaataattccttatttatatttcagggatcacgtagcttgccccttttttaattgtccattttgtggagtgcctaagatcgcccccatttcagccttgttgaatggactgataagactttctgcttcgtatgatagttaacctttgccaataaccagtgtaaaaggcttcggtggtgatatttgcttctttgtgtcttatctcttcccaaaatagaaggtgatgattggagaccctaattaccttgtatcttgtggaaatcttgctatatgaaagtgtaacaaaaatgcagcagctcacagtagcgtatcatttgtagaaaggaaaaatcataggccgggcgtggtggctcacgcctataatcccagtactttgggaggccgaggcgggtggatcacttgaggtcaggagtttgagaccagcctgaccaacatggtgaaaccctatctctaccaaaaatacaaaattagcctgatgtggtggtgggcacctgcaatcccagctacttgggaggctgagggcaggagaatcacttgaacctgggaggcagaggttgcattgagccaagatcgtgccactgcactctagcctgggaaacaagagtgaaactccgtctcaaaaaaaaaaaaaaaaaaaaaaaaagaaggaaaagtcgtaatagctagatctttctgagacccaagagttagtgtcaagacaataaattagctgttctgcagcaagtatttaatatttcagtgtttagaatcagtgtatgtggcacattcaggctgaggccaggtgttaggagaaactggactgagaacgtggatagacgggcattggccatggtagagaccaagaaaggacatgactagtcatttcaggaaccttagtcatgggacatggaggaggtacaacagggctaagtttggaagcgtagagacccgctagacgggcagtgtggaagtctcagggggaggggcagacagtgaagatggcctggactaaggcattagcagtgggaaaggcatggtgtggacacatgggaaggcattttggagttgaaatcaacaggacttgggaggaatgtgtaaagaataccggtgtatagctctccgattaagagagacaaagcattggaggagttgaaaccttgaatttgagacgtcaagggaatgtcagtggggaagtgtcccatagacagttgaaaatgagaacatgggtctcaggagggaggtcatgatggagatacgaacttgcgcatattttgtatgtgtttagaattaatgccttgaggatatatggaaatacataaacttaatggaacaattcctctatttgaagggacagaaaaagagaagagccagccagagattctaagagggcagggagagacagagaggcagctgagggaaggggacgggataaaactaaacagaggggctgggtgtggtggcttacacctgtaatcctagcactttgggaggccgaggcgggtggctcacctgaggtcaggagttcgagaccagcctgaccgacatggtgaaaccccgtctctactaaaaatacaaaatattagccgggtgtggtggcaggcacctgtaatctcagctactcgggaggctgaggcaggagaatcgcttgaacccaggaggcggaggttgcagtgagccaagatcgcaccattgcactccagcctgggcgacaaggacaagactccatgttaaaacaaaaaaaacaaaaacaagaaaacctaaacagagggaccattttaaaaaacaagcaagaaatcaatagcatctgaagccacagaggaggaacaactgaggagttggaggacgtcatttgcgtctaacaattcagaggttcttcataagcttcaggagaggcaagagtggaacacagattagaatgtttgagaagtgaccaggaatgaagaagacacaatgttggattttaaccaacgcttctgaaaattcaggtttaaagggcaggagagcaagtgttgagagaaaagattttaggatgatcagatacagatctataagcagctgaaagaaagacactggtgtggctggacaactggaggtagaagagaatatggttatttagtctaccttcgctcttcaaaatgatcattctatttatttataattccaaaacaaatacatgtcgtgttccaggctctccgatgatcccagttgacctgtcttcttaatcttagagccacactgcgttttcttttcttttctttctttttttttttttttttgagacagagtctcactctgtcacccaggctggagtgcaatggcgtgatctcagctcactgcaacctctgtctcccaggttcaagtgattcttgtgcctcagcctcctgagtagctgggactacaggtgcacaccaccacgctcggctaatttttgtagttttagcagagatgggattttgccgtgttggccaggctggtctcgaactactgacctcaagtgatccgcccaccttgacctcccaaagtgctggtattacaggcatgagccaccgcacccggccacactgtatttcttatagtataccgcaactggtttttaacatcagctatattttctatctgcattttaagaaatgaacatatttcctttttgttctggcggtgttttgaaattagttatttctcttgcttctttcttgatttcagtgtattcatcgagatttagcagccagaaatgttttggtaacagaaaacaatgtgatgaaaatagcagactttggactcgccagagatatcaacaatatagactattacaaaaagaccaccaatgtaagtcgatggcagtaacacagtgggcaggggcgggggtgaggctcagaatgttccaggaagaaaggccgtcaatgttgagagctgggtgggatggctggggacccattcccctgccccgattcccgttcttttgacttactattcacaaactctcaatatgcaaatttagcctctattatgtcaattttagtaaatgtgaaacacttatatacagaataatcagcaaccgctaggattttcttatggttctcatcaagaactttcatagcaaaaactacagcttggaagttactggtttaatttttgcctaataactggtcaaggagcatctgtgtgctagggagataaaggatagaatccaaggagatggcattttattaacggcccagacctgtgcatctcacacattgttcatggtcctcattgggactgatttctgctctattgactgactagtgaaaaccaagaatatcagctcttaaacagggcatagccctattgagcctgctaagataaattcttttaaatatatttagtttttgcattttcctctacatttgcaggggcggcttccagtcaagtggatggctccagaagccctgtttgatagagtatacactcatcagagtgatgtgtgagtaactctcttttctctggctttttcctgggcttgagctgcaaaaatactgtacgtacttcacctttcttccttctttagtggctgctgcatttcacacattcgtagaaggtgcaggagctggccttagaaaggacagattttatggtaggctgataaccaatgctctgttactaatctgcctggcttcaaagagcacagaaggtggaactgctgacctccccctgccagagcggaagtccttcccttgaacatattcatggatgtgcaactacaaagcggttatctaattcgccaagctcttggcatgttcttcactccattaaaggagtaatcctggagcttttcccacttacgagtagtttgtcatatttccctctaacccagatttgtccttaaagagtggagctgagtgagatgtggtccaggctggggacctccacagggtctactctctatgtttatccctcaacaaaaaggtctgatcttgctttggcatccttgatagcattctagaaacacagtagaatatttctattatgatatactgacaaaaccagtggggtcaggctccaactgatattttagatttgaaaattcagttgaaggctgtgtgcagtgactcatacctgtaatcaatcccagcactttgggagggcaaggcgggtggatcacgaggtcaggagatcaaggccatcctggccaacatggtgaaaccccgtctctactaaaactacaaaaattagctgggcgtagttatgcgtgtctgtaatctccactacttgggaggctgaggcaggagaatcgcttgaacctgggagtcagaggttgcagtgagctgagattgtgccactgcactccagcctggcaacagagcgagactctgtctggggaaaaaaaaatcacttgaactattttttatttgtatgagcaggaggagttctgggtaggcattaattctgtgctaccatagttggtcctctcaacaatcctaaaaaaaagacatgactatcccatttttgctgtgagcaactgaggcacagaggctgttctgcctgtcctgtgctgctgcttttgctctgtagaaaactgcggagtgaaacaccaccatcgagtacagaaggttgagtttccagaacgaccatgatgtagctaaacctggctctctcagcttgctcctcccagagattgagcctcctgaacttggcacaggaagtccaaatctctgaagagtcaagtgtaaataaattatggcctgtgagatgtgttcagttttgttgtgtgcaactcatctggggcatgtgattcctcatcctaaccccagcccagtgctgattgcctttgcgatcttagtaagttccagagcctctgtgcagcagatgttccgccagccacacagggcagctgtgatcctgcggagttggcttgctggccttattctgtcaactgcccatcctggtagatcacaacccttgggtcaggcacataaggagttggaaaggagcgtaaaggctttgaaactgagaaactgagatccttgcattgctaacaccacatttaagacaagcagctctattccagagtgatggcagtttgcctttttgtctattgatggaaaattccatcagcacatccccgtgtcatcatcattcggggatgctcttgcagggcaggaaagagcacataggaggaactgcaggagggcccatttgtctttgaacttcagaagtgaggaggtgtttatgtctcagctgggcgtgtttaggttttggcaacgtggatgggttagtaatgccgtgctttctccttttgttgcagctggtccttcggggtgttaatgtgggagatcttcactttagggggctcgccctacccagggattcccgtggaggaactttttaagctgctgaaggaaggacacagaatggataagccagccaactgcaccaacgaactgtaagggctgttgtctttcctgccggtgccccagtggacttgccacaccagtaatacctctcctgatgtatctcgtttttgaaggcccctggtttcctaaacatgctctaagaagaatggctgaagctctctgggctcaatccagagctgggatacatagcgacaccgacaaccattacttgtctgagagaaagaacattattctgagtatggagagggctttggatcagagggtgtctggctgcctggctgagggctcctgactttgcagagccagcaggagtggtcttcctgggccactgtgctgcaccttctgcggtctcccgtggagtgacaggaagacccacgggtcaggaaacaagctagaaagccgcggggccgccctgcagggtgtaggattaaggaaccaacacagcctttccctggtggttgtgcctggcccccgcctggccccatcgtggccagtagagaatcggtgtttccagaacttctcgaaccattgaaaattgccattacagattgacgccaaccacatttcctcagagcgaaggaactcgtgtttggttacctaggtctcacttgtgttttagtgcagagaattaaacatgtgtccaggcgccctccttactgtaccagatctgcctgtaaaaccatgaactggtttgtagcaaaacctgcctcacactttaagtggagttatgttgtgtttgtgacgtgtgcctggtgcaatagaatcagtgctttgaaaggagtctctctgcctcctgcctcaacccctccaggattaactaagaagagtgattgtcccagaaactgcggtctattgtgtatcatttcatggggattttatatcagtaatcccgtgagtgcttttcggtgtaccgtggatgtctgatgaatggccacattttatagcatattatataaaggcatttattgtgctctttgtcattcctattgttttttttcttttgtaacgtagaggatctgtcgaaacccaaaatcaagataagacctgggaagctaagcctatctaagagttaatcaggaagttagtgtgcagcccagtggtggcagattaattcatcaaaaacttgaagttgtagttttcaaattttatttaatttttttttaactcaggaagctgtgtcaactagaatcattaagacccaaagcaccgggcagataaatagtggagctgctttggtgctgggcagggtgtcaggggagggaagactggagaccagcccatggaaatacgcattttccttcagcctccaaagcatctttagggtgtgacgccattgtgagatgtcactgtggcccagggttaccagggaaaacacatagctgtgtctttcttgatggcttcgatgcctttctaacatgtttttgtaagtcaaagtgcctttcggaggaactggcagggaagcttttgggaaagtgattcatgaccccctaatctagttgcttggaaggttctgatgcattttcctaatttacaccacgtccccatattgcctattaaaactgactataaccacgtacccagtgcatatgaaattaattcaaggaaatccatttttcccaggtacatgatgatgagggactgttggcatgcagtgccctcccagagaccaacgttcaagcagttggtagaagacttggatcgaattctcactctcacaaccaatgaggtaagaacttccttctagaagccccttgtccttggttgtcttgtgagacatgcgtagtgttttacacacacactcccctgttggctgttggttggagtctgtggtcttgtttattctttttccatagggtcagatagttcaactatgggttcctctcaaatcatgatttttctcagaacttcattttgtgagttctgactcatgaaaccaaagacagagggacatccccgaggctgccttcagtgtagctgctggtggagcagtccggggtatgtgggagagtgggaaaggggaagcagtattcacttgcattttggtgtgcatgggaaaaagcttggattcctgtgcaagtttgattctgtgctttggtcattagtgggtaaactgataatgttcgtcatcatttgcttgatggaatacaatgaagttttctaacaccagcttctgttaccacagtactatcctatgtgatcctgttggtaatgctatatgccttgcagcctctttctaggtgtatataaacatacactgttttctacaatgagcaacttacatgatttttacataaaaacatgtaccttttgttaaaatatttattttccctaaaatatttatgctctcgtctgtaatcccagcattttgggaagccgaggagggcagatcacctgaggccaggagttcgagagcagcctggccaacatggcgaaaccctgtctctactaaaaatacaaaaattagttggatgtggtggtatgtgcctgtaatcccagctacttaggaggcgaggtaggggaatcgcttgaacccaggaggtgaagtttgcagtgactgagattgcgccactgcactccagtctgggagacagagcaagacttcatctcaaaaagaaaataataataatttatgatccttgccaacaaaataaacactcgtctgtcactcactgtgcaaatttagccatgtcagtggctccttcaatatgcagatagagtgccttttataattatggaaagcatatgctctgagcaggaaagatgataaacccatcaagtctagtcaaatcttaagatagagaaattgttaatgaatgtattttgagatatttaatgaggatgcacaatagtgttcttttacacaggaaactaactccaaaccatgcaattgtctcaacaagaaaaaagttaaagtcccccaagtattttagaaggaaaataatacacttaatttctgatttaggaaatagttttagagtgattttttaaaaagtaataatcaaatgtagtgatatgaagtcttagctcagcagctttatcttatgcgtctgactgtggcctgtgctggataaaggaagagattgcacttaaatgaatacagctgaccttcagaagttgaaaggaaaggaacggttcaagggggggaagaaaccaactttcttcttctgccaaaattgttgtttctagtataagttcctttaactgtagacttggaatctactgatatccctgtttttttcctatcagatctgaaagtttatggcttcattgagaaactgggaaaagttggtcaggcgcagtggctcatgcctgtaatcccagcactttgggaggccgaggcaggcggatcatgaggtcaggagttccagaccagcctggccaacatggtgaaaccctgtctctactaaagatacaaaaaattagccgggcgtgttggtgtgcgcctgtaatcccagctactccgggaggctgaggcaggagagtcacttgaaccggggaggcggaggttgcagtgagccgagatcatgccattgcattccagccttggcgacagagcgagactccgtctcaaaaaaataaaaataaaaaataaaaaagaaagaaactgggaaaagtactaaagttctattttaatgatctcatgtctatgctcaaagtgatttatttatatatttacatgtagagtgggtccgttgatactgaaatttgtatctagtaccctaaaataaaaaagcagaatgccatattgtctggtggatataaaaatcgaagtttctttccttctgaaaatcattaccatatgctcaagaaaaacggttccatttaggacaaaatttcgtttttatcattgtaagcaaaaagttctcttttgatgtggtgggcgtgtttgtttccagttgtgtggttaatgctgatgttgttggaactgatacattccccttctgggatgctgggatggggactctttctcttgccaaccctggtgatgaattagagggttttgtgtgtgtgtgtgtgtgtgtgtctttaaaaatgtctagttgccaacattccatgggctcttttctgataacactgaggctgtttgtgctgtggtctgcactttttgccccctctcagcaaaaccacatgtcatagaatagttgttggcttctggatgtgtgagcagaactgccccactgtgccagcccagtggaggcagagagacccacaagttcccaatttagaaagcttttcatagcttcagaacaggggtcggcaactgctttctgtaaagggccagggagtaaatattttcagcttcgccggccctgtggtctctgttgcaacttcgccactgtagcctcaaagtagccacagacaatatgtaaatagatgtgttctagtctgtcttctagtaaaattttatggatcctgaaattggaattttatataattgtatataaattttattcattttaatcctataagatattcttcttcttttgattttttttttcaaccgcttaccaatgttaaagaccatctttagccctcaggccatacaaagtcgtctgtgggcacccaagtcggaggaagtgtcaccctggggtgatccagagggctttttgcagcaccagcactggatgccttggggagcagaggacactttctgaatctcgaaccttcaaaactttgaaacttaaccgatattttcctgaagtttcctttaacagtgcattatggatttaacatacatgagtatgtctaagccttttttgaacctgtttacattttcaactcggagagcttctgagagtaatcagttacatctgttaaattacccactgaatgaagaagtattccccttcaattatccccgaaactacaatagtaaaatgtaattcagaaaataaatattcatagtctcaactacttaaagggggtctggggacccacaacatgttaccggttttcattttgctggggctcgcatttgaagcaagggctctagtgaggaggtggtgtagactcagcgggttatttaggtccgtgtgaagccgagttgcctgcccagcacctatagctcaactaggttttattgttctctacctgtcaatagttgatttatgatggattccaagagaaaagctaaggacagcctggggtacatcagacgtggtctcagggaggtcttcgtggaagtcaggtgggctgggtctctgttcaccttctaggggtctcctgtcctgtcccacgtccaatacccacatctcaagagtttgtgtttgaaataaaactcttctcttcccttctttcaggaatacttggacctcagtcagcctctcgaaccgtattcaccttgttatcctgacccaagatgaaataaaacgtctctcttcccttctttcaggaatacttggacctcagccaacctctcgaacagtattcacctagttaccctgacacaagaagttcttgttcttcaggagatgattctgttttttctccagaccccatgccttacgaaccatgccttcctcagtatccacacataaacggcagtgttaaaacatgaatgactgtgtctgcctgtccccaaacaggacagcactgggaacctagctacactgagcagggagaccatgcctcccagagcttgttgtctccacttgtatatatggatcagaggagtaaataattggaaaagtaatcagcatatgtgtaaagatttatacagttgaaaacttgtaatcttccccaggaggagaagaaggtttctggagcagtggactgccacaagccaccatgtaacccctctcacctgccgtgcgtactggctgtggaccagtaggactcaaggtggacgtgcgttctgccttccttgttaattttgtaataattggagaagatttatgtcagcacacacttacagagcacaaatgcagtatataggtgctggatgtatgtaaatatattcaaattatgtataaatatatattatatatttacaaggagttattttttgtattgattttaaatggatgtcccaatgcacctagaaaattggtctctctttttttaatagctatttgctaaatgctgttcttacacataatttcttaattttcaccgagcagaggtggaaaaatacttttgctttcagggaaaatggtataacgttaatttattaataaattggtaatatacaaaacaattaatcatttatagttttttttgtaatttaagtggcatttctatgcaggcagcacagcagactagttaatctattgcttggacttaactagttatcagatcctttgaaaagagaatatttacaatatatgactaatttggggaaaatgaagttttgatttatttgtgtttaaatgctgctgtcagacgattgttcttagacctcctaaatgccccatattaaaagaactcattcataggaaggtgtttcattttggtgtgcaaccctgtcattacgtcaacgcaacgtctaactggacttcccaagataaatggtaccagcgtcctcttaaaagatgccttaatccattccttgaggacagaccttagttgaaatgatagcagaatgtgcttctctctggcagctggccttctgcttctgagttgcacattaatcagattagcctgtattctcttcagtgaattttgataatggcttccagactctttggcgttggagacgcctgttaggatcttcaagtcccatcatagaaaattgaaacacagagttgttctgctgatagttttggggatacgtccatctttttaagggattgctttcatctaattctggcaggacctcaccaaaagatccagcctcatacctacatcagacaaaatatcgccgttgttccttctgtactaaagtattgtgttttgctttggaaacacccactcactttgcaatagccgtgcaagatgaatgcagattacactgatcttatgtgttacaaaattggagaaagtatttaataaaacctgttaatttttatactgacaataaaaatgtttctacagatattaatgttaacaagacaaaataaatgtcacgcaacttatttttttaatactcgtgtcttaccaaatggtttcctgtgcttggaggtgctgactgagtgctgttgtgaatgcaggaagggcagggctgccaagggtcttatgtgctacacacgggggtgacttgccagaggggttgactgagaccagcagtacctgtgacaggttgaggttgatccagtggaaaatctgaatcagttggttggagccctggctcggttgcttactggcacctcaatggaatcatcgttcctttctgagccctaccagttccccagaggagcaaacaaagagccacatggtagagagctttgcaaactggaaggtgacctaaggatgacaggtattgagtagggaagacgttcagaacatctgaatcctggggacttaaaaaccttttaggctgttttcttcatgatgtatggagagaaggatttgcttcaaattttccaaaagaaaacttggacaaatgttcgaataattatttattttcataccaccaacgatctgaagagggaaatggagttttgcctgtcagttaacaaatgtgaatctgtgactcttaagggtctgttgtatctacttgccagcctcatcagcagcaggaaagggaattgaacataggccaacttctcctgcacttcagccaggctcttagaaccttacagggccattggtaaagagtgctgtctttggggtcttctttctgtttgaggccattcatggtggagcaaggtgtcaccagccatcaggggagtggcctagggtcctggttctgtatttcccaaacctctgtccttctgtttcttacaggataacagggctcttgggaatgtgattttaaaaataaggtgcatgaaagccacctaagaaaattgtcacctgttagacacaagtgtacagggtgatgttctgtacccctggggacatttctaccgtgagatgtccttggcaagggtgaggatggacttgctggggtctacgctggttcctccgtgcagctctctggtgcatatgctgtactttagacactgaagggcagtttatagccttgacagtgtagattataatggcagtaagaactgctgtatttctggcccatttcatggagatgggtgggcaagaatcctaaatggtcttttggccattttgattttagaattattttgaaagagacacttgtcatgaagggcaagaaggcagtgtggtccatgagaatgataggtaatacagtacctttttttttttgagacctgtcccaaatgagcatacacaggtaggattcgataagaatcctggagcttatggctctcctcccccaagaacctaaggagagcgttggaaattagttgcaactacatgtgatggtcacctaaccatcatgagatgagttcatttgtgaagaaccaaaagattgcaggcatcttggatgtgtagtgcccggcctgctgttcctaactgggaaaggcatatccaagaggctgcctcaaaacgtctagctgatggtagcctctggcaggatggggagccagagaaagcgggtggaaaagtagcatcttcacgggggttctgtgcattcccaggggacagggtaccctgcatccaccacacagcctctccat

SEQ ID NO: 23651 - DNA, 2620 bp, Homo Sapiens
gcggctgcgctgctgggcgggggcgggagctggagccggagctggagccggggccggggcccgggtcagcgcttgagccgggagaagagtttgagatcgtggaccgaagccagctgcccggccaggcgacctgcggagcgcaacgaggccgcgggcggccgagggctggtcggcgcccatcctgaccctggcacgcagggccaccgggaacctgtcggcgagctgcgggagcgcgctgcgcgcggcgcggggctgggcggcggggacagcggggacggcacggcgcgcgcagcttctaagtgccagatgatggaggagcgtgccaacctgatgcacatgatgaaactcagcatcaaggtgttgctccagtcggctctgagcctgggccgcagcctggatgcggaccatgcccccttgcagcagttctttgtagtgatggagcactgcctcaaacatgggctgaaagttaagaagagttttattggccaaaataaatcattctttggtcctttggagctggtggagaaactttgtccagaagcatcagatatagcgactagtgtcagaaatcttccagaattaaagacagctgtgggaagaggccgagcgtggctttatcttgcactcatgcaaaagaaactggcagattatctgaaagtgcttatagacaataaacatctcttaagcgagttctatgagcctgaggctttaatgatggaggaagaagggatggtgattgttggtctgctggtgggactcaatgttctcgatgccaatctctgcttgaaaggagaagacttggattctcaggttggagtaatagatttttccctctaccttaaggatgtgcaggatcttgatggtggcaaggagcatgaaagaattactgatgtccttgatcaaaaaaattatgtggaagaacttaaccggcacttgagctgcacagttggggatcttcaaaccaagatagatggcttggaaaagactaactcaaagcttcaagaagagctttcagctgcaacagaccgaatttgctcacttcaagaagaacagcagcagttaagagaacaaaatgaattaattcgagaaagaagtgaaaagagtgtagagataacaaaacaggataccaaagttgagctggagacttacaagcaaactcggcaaggtctggatgaaatgtacagtgatgtgtggaagcagctaaaagaggagaagaaagtccggttggaactggaaaaagaactggagttacaaattggaatgaaaaccgaaatggaaattgcaatgaagttactggaaaaggacacccacgagaagcaggacacactagttgccctccgccagcagctggaagaagtcaaagcgattaacttacagatgtttcacaaagctcagaatgcagagagcagtttgcagcagaagaatgaagccatcacatcctttgaaggaaaaaccaaccaagttatgtccagcatgaaacaaatggaagaaaggttgcagcactcggagcgggcgaggcagggggctgaggagcggagccacaagctgcagcaggagctgggcgggaggatcggcgccctgcagctgcagctctcccagctgcacgagcaatgctcaagcctggagaaagaattgaaatcagaaaaagagcaaagacaggctcttcagcgcgaattacagcacgagaaagacacttcctctctactcagaatggagctgcaacaagtggaaggactgaaaaaggagttgcgggagcttcaggacgagaaggcagagctgcagaagatctgcgaggagcaggaacaagccctccaggaaatgggcctgcacctcagccagtccaagctgaagatggaagatataaaagaagtgaaccaggcactgaagggccacgcctggctgaaagatgacgaagcgacacactgtaggcagtgtgagaaggagttctccatttcccggagaaagcaccactgccggaactgtggccacatcttctgcaacacctgctccagcaacgagctggccctgccctcctaccccaagccggtgcgagtgtgcgacagctgccacaccctgctcctgcagcgctgctcctccacggcctcctgaacgtccgtcctcaggagcacagcctcacggacagtgccaaaccctgtgggtctccaggggcttgggaaatgtgttctttcccaagagaatcaaaggaaagaatcaaatttcttgcccggtcactggcattccagaagacagcgtgccggaaccggcagctctcacctttctgtgacttgttcggaattaactcctctggatggaaacttccatcttacttggttacatcacggctctggttcagatacaacttcatgattttgctactatcatttttcacttttcaaagaatttaacctattttacagcagttcagttctgctagtgagtagttttcctctcctaccttccttctaaaaacctgattcatgcacagcgtttgacacacatggagtctgccagtgtgccttctctgcttcagacaagagatctgccatttcatgcccttgtgactacctatcattggccctgcaataaaatcatttatttttcaaaaaaaaaaaaaaaaaaa

SEQ ID NO: 23652 - DNA, 4083 bp, Homo Sapiens
ctacgaggccaagaattcggcacgaggctgaagtgcgggagagtgctggaccctgagtgatggggccggcgccagctggagagcagcttcgcggagcgactggagagccagaggtgatggaaccagccctggaaggcacaggcaaagaggggaagaaagcatcctccaggaagcgtacattggctgaacctccagcgaagggcctcctgcagccagtgaagctcagcagggcagaactgtacaaggagcctaccaatgaggagcttaatcgccttcgggagactgagatcttgttccactccagcttgcttcgtttacaggtagaggagctactaaaggaagtaaggctgtcagagaagaagaaggatcggattgatgccttcctacgggaggtcaaccagcgggttgtgagggtgccctcagtccctgagacagagctcactgaccaggcatggctcccagctggggttcgagtgcccctccaccaagtgccctatgccgtgaagggctgtttccgcttcctgcccccagcccaggttactgttgtgggcagctaccttctgggcacctgcatccgaccagacatcaatgtggatgtggcactgaccatgcccagggaaatcctacaggacaaggacgggctgaaccagcgctacttccgcaagcgtgccctctacctggcccacttggctcaccacctggcccaggaccccctctttggcagtgtttgcttctcctacacaaatggctgccacctgaaaccctcactgttgctgcggccgcgtggaaaggatgagcgcctggtcactgtacgtctgcatccgtgccctccacctgacttcttccgcccgtgccgcttgctgccaaccaagaacaatgtgcgctctgcctggtaccgagggcagagtcctgcaggggatggtagcccagagcctcctaccccccgctataacacatgggtcctgcaagatacagttctcgagtcccatttgcagctgctgtcaaccattctgagttcagcccagggcctgaaggatggcgtggcacttctgaaggtctggctgcggcagcgggagctggacaagggccagggtgggtttactgggttccttgtctccatgctggttgtcttccttgtgtctacacgcaagatccataccaccatgagtggctaccaggtcctgagaagtgtcttgcagtttctggccactacagacctgacagtcaacgggatcagtttatgtctcagctcagatccctctttgccggccctggctgacttccaccaggccttctccgttgtcttcctggattcctcaggccatctcaacctctgtgctgatgtcactgcctctacttaccaccaggtacagcatgaggcacggctgtctatgatgttgctggacagcagagctgacgacgggttccacctgctgttgatgactcccaaacccatgatccgggcttttgaccatgtcctgcatctccgtccactgagtcgcctgcaggcagcgtgccaccggctgaagctctggccagagctgcaggacaatggtggggactatgtctcagctgctttgggccccctgaccaccctcctggagcagggcctgggggctcggctgaacctgctggctcactctcgacccccagtcccagagtgggacatcagccaagatccaccaaagcacaaagactctgggaccctgaccctgggactccttctccggcctgagggactgaccagcgtccttgagctgggtccagaggcagaccagcctgaggctgctaaattccgccagttctggggatcccgctcggagcttcggcgtttccaggacggagccattcgggaagctgtggtctgggaggcagcctctatgtcccagaagcgccttattccccaccaggtggtcacccacctcttggcactccatgctgacatcccagaaacctgtgtccactatgtggggggccccctggatgcacttatccaaggcctgaaagagacctccagcacaggtgaggaggccctggtagcggcggtacgttgctacgacgacctcagtcgcctactgtgggggctagagggtctcccactgaccgtgtctgctgttcagggagctcacccagtgctgcgctacacagaggtgttcccaccaactccagtccgtccagccttctccttctatgagactctgcgggagcggtcctcactgctgccccggctcgataagccctgtccggcctacgtggagcccatgaccgtggtttgtcacctggagggcagtggccagtggccacaggacgctgaggccgtgcagcgggtccgagctgccttccagctgcgcctggcagagctgttgacacaacagcatggtctgcagtgccgtgccactgccacgcacacggatgtccttaaggatggatttgtgtttcggattcgcgtggcctatcagcgggagccccagatcctgaaggaggtgcagagcccagaggggatgatctcgctgagggacacagctgcctccctccgccttgagagagacacaaggcagttgccactgctcaccagtgccctgcacggactgcagcagcagcacccagccttctctggtgtggcacggctggccaagcggtgggtgcgtgcccagcttcttggtgagggtttcgctgatgagagcctggatctggtggccgctgcccttttcctgcaccctgagcccttcacccctccgagttccccccaggttggcttccttcgattccttttcttggtatcaacgtttgattggaagaacaaccccctctttgtcaacctcaataatgagctcactgtggaggagcaggtggagatccgcagtggcttcctggcagctcgggcacagctccccgtcatggtcattgttaccccccaagaccgcaaaaactctgtgtggacacaggatggaccctcagcccagatcctgcagcagcttgtggtcctggcagctgaagccctgcccatgttagagaagcagctcatggatccccggggacctggggacatcaggacagtgttccggccgcccttggacatttacgacgtgctgattcgcctgtctcctcgccatatcccgcggcaccgccaggctgtggactcgccagctgcctccttctgccggggcctgctcagccagccggggccctcatccctgatgcccgtgctgggctatgatcctcctcagctctatctgacgcagctcagggaggcctttggggatctggcccttttcttctatgaccagcatggtggagaggtgattggtgtcctctggaagcccaccagcttccagccgcagcccttcaaggcctccagcacaaaggggcgcatggtgatgtctcgaggtggggagctagtaatggtgcccaatgttgaagcaatcctggaggactttgctgtgctgggtgaaggcctggtgcagactgtggaggcccgaagtgagaggtggactgtgtgatcccagctctggagcaagctgtagacggacagcaggacattggacctctagagcaagatgtcagtaggatgacctccaccctccttggacatgaatcctccatggagggcctgctggctgaacatgctgaatcatctccaacaaaacccagccccaactttctctctgatgctccagcattggggcaggggcatggtggcccatgtagtctcctgggcctcaccatcccagaagaggagtgggagccagctcagagaaggaactgaacccaggagatccatccacctattagccctgggcctggacctccctgcgatttcccactcctttcttagtcttcttccagaaacagagaaggggatgtgtgcctgggagaggctctgtctccttcctgctgccaggacctgtgcctagacttagcatgcccttcactgcagtgtcaggcctttagatgggacccagcgaaaatgtggcccttttgagtcacatcaccgacactgagcagtggaaaggggctatatgtgtatgaatagcccccattgaaggagcaaaaaaaaaaaaaaaaaaaaaaaaaaaaaaaaaa

SEQ ID NO: 23653 - DNA, 3168 bp, Homo Sapiens
ctacgaggccaagaattcggcacgaggctgaagtgcgggagagtgctggaccctgagtgatggggccggcgccagctggagagcagcttcgcggagcgactggagagccagaggtgatggaaccagccctggaaggcacaggcaaagaggggaagaaagcatcctccaggaagcgtacattggctgaacctccagcgaagggcctcctgcagccagtgaagctcagcagggcagaactgtacaaggagcctaccaatgaggagcttaatcgccttcgggagactgagatcttgttccactccagcttgcttcgtttacaggtagaggagctactaaaggaagtaaggctgtcagagaagaagaaggatcggattgatgccttcctacgggaggtcaaccagcgggttgtgagggtgccctcagtccctgagacagagctcactgaccaggcatggctcccagctggggttcgagtgcccctccaccaagtgccctatgccgtgaagggctgtttccgcttcctgcccccagcccaggttactgttgtgggcagctaccttctgggcacctgcatccgaccagacatcaatgtggatgtggcactgaccatgcccagggaaatcctacaggacaaggacgggctgaaccagcgctacttccgcaagcgtgccctctacctggcccacttggctcaccacctggcccaggaccccctctttggcagtgtttgcttctcctacacaaatggctgccacctgaaaccctcactgttgctgcggccgcgtggaaaggatgagcgcctggtcactgtacgtctgcatccgtgccctccacctgacttcttccgcccgtgccgcttgctgccaaccaagaacaatgtgcgctctgcctggtaccgagggcagagtcctgcaggggatggtagcccagagcctcctaccccccgctataacacatgggtcctgcaagatacagttctcgagtcccatttgcagctgctgtcaaccattctgagttcagcccagggcctgaaggatggcgtggcacttctgaaggtctggctgcggcagcgggagctggacaagggccagggtgggtttactgggttccttgtctccatgctggttgtcttccttgtgtctacacgcaagatccataccaccatgagtggctaccaggtcctgagaagtgtcttgcagtttctggccactacagacctgacagtcaacgggatcagtttatgtctcagctcagatccctctttgccggccctggctgacttccaccaggccttctccgttgtcttcctggattcctcaggccatctcaacctctgtgctgatgtcactgcctctacttaccaccaggtacagcatgaggcacggctgtctatgatgttgctggacagcagagctgacgacgggttccacctgctgttgatgactcccaaacccatgatccgggcttttgaccatgtcctgcatctccgtccactgagtcgcctgcaggcagcgtgccaccggctgaagctctggccagagctgcaggacaatggtggggactatgtctcagctgctttgggccccctgaccaccctcctggagcagggcctgggggctcggctgaacctgctggctcactctcgacccccagtcccagagtgggacatcagccaagatccaccaaagcacaaagactctgggaccctgaccctgggactccttctccggcctgagggactgaccagcgtccttgagctgggtccagaggcagaccagcctgaggctgctaaattccgccagttctggggatcccgctcggagcttcggcgtttccaggacggagccattcgggaagctgtggtctgggaggcagcctctatgtcccagaagcgccttattccccaccaggtggtcacccacctcttggcactccatgctgacatcccagaaacctgtgtccactatgtggggggccccctggatgcacttatccaaggcctgaaagagacctccagcacaggtgaggaggccctggtagcggcggtacgttgctacgacgacctcagtcgcctactgtgggggctagagggtctcccactgaccgtgtctgctgttcagggagctcacccagtgctgcgctacacagaggtgttcccaccaactccagtccgtccagccttctccttctatgagactctgcgggagcggtcctcactgctgccccggctcgataagccctgtccggcctacgtggagcccatgaccgtggtttgtcacctggagggcagtggccagtggccacaggacgctgaggccgtgcagcgggtccgagctgccttccagctgcgcctggcagagctgttgacacaacagcatggtctgcagtgccgtgccactgccacgcacacggatgtccttaaggatggatttgtgtttcggattcgcgtggcctatcagcgggagccccagatcctgaaggaggtgcagagcccagaggggatgatctcgctgagggacacagctgcctccctccgccttgagagagacacaaggcagttgccactgctcaccagtgccctgcacggactgcagcagcagcacccagccttctctggtgtggcacggctggccaagcggtgggtgcgtgcccagcttcttggtgagggtttcgctgatgagagcctggatctggtggccgctgcccttttcctgcaccctgagcccttcacccctccgagttccccccaggttggcttccttcgattccttttcttggtatcaacgtttgattggaagaacaaccccctctttgtcaacctcaataatgagctcactgtggaggagcaggtggagatccgcagtggcttcctggcagctcgggcacagctccccgtcatggtcattgttaccccccaagaccgcaaaaactctgtgtggacacaggatggaccctcagcccagatcctgcagcagcttgtggtcctggcagctgaagccctgcccatgttagagaagcagctcatggatccccggggacctggggacatcagatgggacccagcgaaaatgtggcccttctgagtcacatcaccgacactgagcagtggaaaggggctatatgtgtatgaatagaccacattgaaggagcaaaaaaaaaaaaaaaaaa

SEQ ID NO: 23654 - DNA, 3514 bp, Homo Sapiens
tgagcctagagctggagactagcgttaaccggcggggcggccggttttatgaatgaagctatggctacagattccccaagaagacccagtcgttgtactggtggagttgtggttcgcccccaggctgtcacaaagcagtcctacatggaaagtgttgtgacttttctgcaggatgttgtgccccaggcttacagtggaacacctctaacagaagaaaaggagaaaatagtctgggtcagatttgaaaatgcagatttaaatgatacatcaagaaatctggaatttcatgaaatacatagtactgggagtgaaccgcctttgttgattatgattggctacagtgatggaatgcaggtctggagcatccctatcagtggcgaagcgcaagagctcttctctgttcgacatggcccaattcgagcggctaaaatcttgcctgctccacagtttggtgctcaaaaatgtgataactttgctgaaaaaagacccctccttggtgtttgtaagagcattggatcttctggcacaagcccaccgtactgttgtgtggatctgtattcacttcgtactggggagatggtcaagtccattcaatttaagacacctatttatgatctccattgcaataaacggatccttgtcgtagtcttgcaggagaaaattgctgcctttgatagctgtactttcacgaagaaattctttgttacaagctgctatccatgtccagggccaaacatgaatcctattgctcttgggagccgctggcttgcttatgcagaaaacaagttgattcgatgtcatcagtcccgtggtggagcctgtggagacaacattcagtcttatactgccacagtcattagtgctgctaaaacattgaaaagtggcctgacaatggtagggaaagtggtgactcagctgacaggcacactgccttcaggtgtgacagaagatgatgttgccatccacagtaattcacggcggagtcctttggtcccaggcatcatcacagttattgacaccgaaaccgttggagagggccaggtgcttgtgagtgaggattctgacagtgatggcattgtggcccacttccctgcccatgagaagccagtgtgctgcatggcttttaatacaagtggaatgcttctagtcacaacagacacccttggccatgactttcatgtcttccaaattctgactcatccttggtcctcatcacaatgtgctgtccaccatctgtatactcttcacaggggagaaactgaagccaaagtacaggacatctgcttcagccatgactgtcgctgggttgtggtcagtactctccggggtacttcccacgttttccccatcaacccttatggtggccagccttgtgttcgtacacatatgtcaccacgagtagtgaatcgcatgagccgtttccagaaaagtgctggactggaagagattgaacaagaactgacgtctaagcaaggaggtcgctgtagccctgttccaggtctatcaagcagcccttctgggtcacccttgcatgggaaactgaacagccaagactcctataacaattttaccaacaacaaccctggcaaccctcggctctctcctcttcccagcttgatggtagtgatgcctcttgcacaaatcaagcagccaatgacattggggaccatcaccaaacgaaccggcaaagttaaacctcctccacaaatttcacccagcaaatcgatgggcggagaattttgtgtggctgctatcttcggaacatccaggtcatggtttgcaaataatgcaggtctgaaaagagaaaaagatcagtccaaacaagttgtagttgagtccctgtacattatcagttgctatggcaccttagtggaacacatgatggagccgcgacccctcagcactgcacccaagattagtgacgacacaccactggaaatgatgacatcgcctcgagccagctggactctggttagaacccctcaatggaatgaattgcagccaccgtttaatgcaaaccaccctctgctcctcgctgcagatgcagtacagtattatcagttcctgcttgctggcctggttccccctggaagtcctgggcccattactcgacatgggtcttacgacagtttagcttctgaccatagtggacaggaagatgaagaatggctttcccaggttgaaattgtaacacacactggaccccatagacgtctgtggatgggtccacagttccagttcaaaaccatccatccctcaggccaaaccacagttatctcatccagttcatctgtgttgcagtctcatggtccgagtgacacgccacagcctcttttggattttgatacagatgatcttgatctcaacagtctcaggatccagccagtccgctctgaccccgtcagcatgccagggtcatcccgtccagtctctgatcgaaggggagtttccacagtgattgatgctgcctcaggtacctttgacaggagcgtgaccctgctggaggtgtgcgggagctggcctgagggcttcgggctgcggcacatgtcctccatggagcacacggaggagggcctccgggagcgacttgccgacgccatggccgagtcacctagccgggacgtcgtgggatccggaacagaacttcagcgagagggaagcatcgagactctgagtaacagctcaggctccaccagcggcagcataccaagaaactttgatggctaccgatctccgctgcccaccaatgagagccagcccctcagcctcttcccgactggcttcccgtaggtaccagcaacctgcttctgactggccagccccctcccctgctggaggaggggagaagccccgctctggtcctacccttcagtctctgctcttccttcatcaaccaccttccccaagcttagtgacagcagccgcccatcctacctggatggagaagagacccttctccaagcacctcagcgcacttgccctctgccacacctgtcggtggaggctgtggccaggagagactgtagaagctcggtccctgtgtatgtttgcatatgacatcctgcattggatccgcttttgtattttttaaccatacccacggtggggcgggtggggggagcctggaacagtgaccagatctgggggcctgagtggggacagagttgatcgtccacctggccattttgaccctgagtggacagtcacagcctcagctcatgtctggctgtgacacacactgcccccagcttcccttggtcagccccactccagcacggggtgaacggaggcccagagtactagggaaggaggaagggaggacatgcctcttcttcctcctttctttccccatctgttcctgggaagagtttgtctttcttatctttaagcccctttaccctggtcctgtactgatcagtgaaggaaaccgtggttactgaggccctgttgaaaagtgcacgtcttgtccaataaatcacgctgcagttggtgtccaaaaaaaaaaaaaaaaaaa

SEQ ID NO: 23655 - DNA, 347253 bp, Homo Sapiens
  misc_feature (9928)..(9928): n is a, c, g, or t
  misc_feature (103829)..(103829): n is a, c, g, or t
  misc_feature (130955)..(130956): n is a, c, g, or t
  misc_feature (130958)..(130958): n is a, c, g, or t
gaattccttagtacatttccaggaggttttcttggggctagggaagtcatttacaatggccctaagctcaattttagaccatggagtaaaggtgattatggcaggcatgcctgcctgatcagagggtctcattttgcaagcatttgcctaacttcccttttttcattgtcttcagggtgaaagggtagctgggcaaaagggttagagaactcagaacattgaggtaaggacagataaagagaaggagcagtcagagttaattcagtcaaggtacagtcctttttttttaatgtcctgagtttgttgcttaagattttcctttgcctcctgtaaggaattttttagggaggcaatttttaattcattttatcttctagatgtttctttgtaccaattaaaaaatgcatcccgttgcattttggattcttccttttccaatgtgcctcacaggcgaacgattttatttaggttgaaagttccccatagtgaccactctaattctaagttatctttgtaagattaacccatttttctaaaaatgtgcaagtcctgagtctataattcttatacataaaatttgctggagttccagaagatagagtgccagactcatttgattcagatgaacctattgtcaacaggtacctagccaaggactgtatctggatctgatctggttaatcatcaaatccaatttgatcctggaccctgtttgctcaaatgaagtctggagagctcaaaatataattcatgaagctcagtctgagaggaaattaatcacggcctccagttacaaacaagagaacagtgagcacagtgtggtctgtgggtacctcccctggtagctctgtgttcccggggctgccatagaatgccttggatcccatttctgacaccaaatctgttaaaaataacacctttagacaaaataaaagtaatagagtttattttaaacaaagaacaattcatgatttaggtagcactcagaatcaaaagagattgggagtgcttggctgcagcagcatgagctgtgagcttttacaaggagggaagacaatgaaaatgtacctgattggtttagtgtgggaaggccctggttagaggtcagttggtgttagttttgttttattgttttatattgggctctgtttacctagaagctaaaatactggcctgtctctgtttaatgccctccctattatgatttttttaaacaattaataagagtgtactaagtaggccaggcatggtggctcgcgcctgaaatcccagcaatttgggaggccaaggtgagcggatcacttgaggtcaggagttcgagaccagcctggccaacatggtgaaaatccatctctactaaagatacaaaaattagtgaggcatgatggcgggcacctgtaatccctgatacttgggaggctgagacaggagaatcacttgaacccaggaggcggaagttgcagtgagctgagatcatcccactgcactccagccttggtgacagggtaagactccatctcaaaaaagaaaaatatatatatatatatatactaagcaaatattagttttagtatgattttttcatttcttctttcataactgacagagagtttttaatattttgacaaaacttcttaaaagttgcagaataatcataattcttcccactgagtattaagattgctttgcagtattcacgatagacaagatatggaatcaatctgtaaccatcaacaaatgaataaagacgctgtgatgtatacacaaaatggaatactctacagcagtccattgtgaaagagaaggaattcctgtcatttatcacaacatgggtgaatctataggacacgtaagtgaaataagccaggcacagaaacggaaattctttcaaacgtggaaaaagaaaaaaaagaaaaaagacaaattctgcatgatttcacttgtatgtggaatgtataacagagttaaactcataaagagtagagtggtggttactggagtctgggggataagggttggattggggagatgttggttaaagagtacgacattttagtcagggctgagcacagtggctcacgcctgtaatcccaacactttgggaggctgaggcagtaggattgcttgagttcaggagttcgagactagcctgggcaacatagggagacccagtctctacaaaaaataaataaataagccagcatggtggcgcgtgcctgtggtcccaggtattggcttggtgcaaaagttattgcagtttttgccattattacttttaagggcaaacctgcaataacttttgcatcaacataatacttgagaggcttagatgggaggatcacctgagcctgggaggttgaggctgcagtgagccatgatcatgccagtgcacttcagcctgggcgacagagtgagactgtgtctcaaaaaaaataaaaaaataaaattttagtcagacaggaggaaaaagttcaggagatctattgtacaacattgtgactatagtcaataccaatgtatcatagcttaaaaattgctaagatagtagattttaaatcttttcaccacaaagtgagatagtaggtatggtagcttgatttagacattccacaagatatacatatatcaaatcatcatgttgtatgccatagatcaagaatccccaagtccatggcctgttaggaaccaggctgcacagcaggaggtgagcagcaggcgaacaagcaaagcttcatctgtacttacagctgttccccatcgcttgcattaccatgggagttctgttgcctgtcagatcaacagccgcattagattctcatgggaccatgaaccctattgtgaactgtgcatgtgagggatctaggttgtgtgctctttatgagaatctaatgcctgatgatctgacactgtctcccatcacccccacatagcaccatctagttgcaggaaaacaagcttagggctcctgctgattctacattatggtgagttgtataattatttcattatatattacaatataataataatagaagtaaagtgcacaataaatgtaatgcacttgaatcatcccaaaaccatcccctccctggtccatggaaaaatcgtcttccatgaaatcggtcactggtgccaaaaaggttggggaccactgccatagatacacctaatttttatttgtcagttaaaaataaatttttttaatttgcattaaaaagagatttctgcatagtttcaggttgaacagttatttttaccatcctacactactatgcaaggtgaggactgctttttttttttttttttttttttgagatggagtgtcactctgtcttccaggttggagtgcagtggcgcgatctcagctcactgcaagctccgcctcctgggttcacaccattctcctgcctcagtctcccgagtagctgggactacaggagtctcattctgttgcccaggctggaatgcagtggcgcgatctcggctcactgcaagctccgcctcccgggttcacgccattctgcctcagcctctcgagtagctgggactacaggcacccgccaccacgcccggctaattttttgtatttttagtagagacggggtttcaccatgttagccaggatggtctcgatctcctgacctcgtgatccaccccgcctcggcctcccaaagtgctgggattacaggcgtgagccacagcgcctggccgaggagtgcttttatatgctcttggaagtatatggggactccatttctgtcactgtggcgattccacttatgcattcaccatgccaatccaaggcagctgatggcttaggaaagtcagagactgagatgttaaaatccttggggctatctaccaacatgtctccattccacctgttagggttaaaggtttttctaacctgggccctgaccttagcacagatctgcctatatttttttgaagttcagccacttggactattagccctaaactttttctgtactgccactgcagggctgaaggagctttgcatgcatccaccaagtctggctttcacacctgaatttcacacctcgctttcacccttagctattccatctttctgtggaacatcagtgtcacttagcaatagccatacaatcccattatccttatacctacctttcccttcaaagtctcggatgcctgatacattgcacctgctagtgcattcactcccattagtacactcccaagtccttccagtgaaagatgtaacaattgaatggccactgtgccaaaggtgcctgggctctacctgccaccagtgatggggtcctcacagccaacccagtggtgtatcatccatttccaaaaccatctcactgcctgttttcttggaccactcctggcatcaactgtttcaggttagagtgactgaaaatttgggttataagatatttattagagatcaatatctattaaaaatgtgaaaggaagcaggattgtgctgaggaagaagataaacaacaaagataaccacaatgtcagcccatcaaagcctttggccaacccagcagaaaaatctggagcaggtgtatcttttcagagtctccccagttaggtcaaaatggctgcgcctttacacccgcacttccctcaatcacgggcttcaggctgtcctgggcatgacctcagatgaagcggctcacacagctgaggctaacgttgtcggagctgacagctgaaagccgtttgctgaccacactcccacagccgagcagcatgcccttgcttggaggaggatttggatgacacagctctatgtctgccgtattttgggggtcacattcctcacacccagctctgcctcaaatggcaacattgacaaaaattcattccagttgcaaaccaattgtagaatactataaaaccagagtacaagtctaatagcataaatctcatcctaagtggaaaagaaagggtcatttattcacacatttttggggaaaaaaaaaacaacctttgctatgtctttattacaacacggatactcacaaaaaatagtcatatatattttcctcttttaaatcttacaggaaaaaaggctgggcgtggtggatcacttctgtaatcctagcactttgggaggctgaggcaagtagatttcttgagttcaggagtttgagaccagactgggcaacaggacaaaaccctgtctctactaaaaataaaaaaaaaaattaaaaaagccaagcgttgtggcgggcacctgcaatcccagctactcaggaggctgaggcaggagaattacttgaacccggttggcagaggttgcagtgagccgagatcgcaccactgcactccagcctgggcaacagagaaagactctgtctccaaaaataaaaaagttaaatttaaaataaatcttctagaaaaaaaggaataatttttccttttcagtatcactggaaaagcagagtcatctagtaaaccctgttactaacatgcagttacactgtacaaaattaaacacatctcacatgactgtcatgggttccctctgcagagctgaatcacatctacaaaagtaaactcccctaggagaataatagaaacatggaaaatgggaggaaggcccaccattacagatgtagcgggaaaggagctcagaggttaaccacagcatgaattcctaacatgctgaaataataaaatgatttcagtccaccaacaagtttacttagtgtcttcagcattgcctctgaggctccagaggtcctgagtggctgctgaggaccacagggactaaatgacttccccaaggtcatgttgctcatttctggcaaaattgggaccaaaacccagccctcctgacacaggatggtgcttgtttctctcttcaggtttctcttcagcgctgaatggtatgtgtggtatacgtaaggttataaaacaaagcgaggtaacagctttgcttctttttatatatatatacttttaagttctagggtacatgtgcacaacgtgcaggtttgttacatatgtatacatgtgccatgttggtgtgctgcacccattaaactcgtcatttatattagatacatctcctaatgctatccctctgcccagctttgcttcttttcatgatgctactccagtttcaagatcactgtagcagatgccatcagtgcgcactggctctgggcatgtcttcctcccaccctgaaccttctctgccagagcccacattacctatgatcataagagagccctgtgtgcctggagattatccctctccccatcccctaaagcagcccttaatcaatgactgacaggtatgaaatagaaatatttccattcctggaccaggcactgtggctcacgcatgtaatcccagcactttgggaggccgaagtgggcagatcacctgaggtcaggagttcaagaccagcctggccaacatggtgaaaccctgtctctactaaaaatacaaaaattagccgggcatgatagtgggtacctataatcccagctactcgggaggctgaggcgggagaatcgcttgaacctgggaggcgggagttgcagtgagccaagacctcaccatttcactccagcctgggtggtagagggagactccgtctcaaaaaaaaaaaagtttccattctttttcctctgaggggacaactctgagatgagacctaccccatccctgagacaactctgcttgcttatttggcctcttccctttcctgctcccttttcttatttacttaatgatttttcctgagaatgctctctatttaagccattttcatatgcattatcctcgtctcagaatctgcttctgaggaatccaaatgaaaaatactaccaactctggaattattattactattacaaccacgttttcttttaaattttattttggttttttattgcaatatcatggttgtacatatttgtggggtacaggtgctattttgatacagacatacaatgtgtcatgataaaagcagggtaaatgggatatccatcacctccaacatttatcatttctttgtgttgggaacattctaaaccttctagctattttgaaatgtataataaatgacagttaactgtgattaccctgctgtactatcaaatactagtacttattctatttaactgtatgtttgtaccccttaaccaatttctcttcatcctccacccccttcccttctcagcctcttgtaactaccattctactctctgtctccatgagatccacttttttagctcccacatgtgagtgagaacatacaatattagtctttctgtgcctggcttatttcacttaacataatgacctccagttttatccatgttgctgcaaatggtaggatttcattttttaatgactgaatactattccattgtgtatatataccacattttctttctcttcttttttttttttttttttttttctggtgatggagttttgctcttgttgtccaggctggagtccagtggtgtgatctcggctcactgcaaactctacctcctgggttcaagcgattctcctgcctcagcctcctgcgtagctgggattacaggcatgcaccaccatacccagctaattttgtatttttagtagagacagggtttctccatgttggtcaggctggtctcgaactcccaacctcaggtgatctgcccacctcggcctcccaaagtgctgggattacaggcatgagccaccgtgcccagccacacattttcttcattcatgcatcagtgggcatttaggttgattccctatcttggctattgtgcctactgctgcaataaacctgggagtgcagagatctctttgacatactgatttcctttccttcagatatatacccagcaatgggattgctggatcatatggtggttctatttttaatgttttgaggaacctccatactgttttccatagtggctgtactactttacattcccaccaacagtgtatgagcatttccctttctgacaaccaccccttcttgagcacttaccgtatggatctgggtatcagagaaccttggttaaaatcctggatctgttactgactcattgtttgactttggacatgttattgagtctcttatatctaaattcctttgtaaaacatggaaaataatctctctaaaggatagtaaggacctgttttatgtgggtgtgtgttgagggtactcaattagacagtgggctgggctgcagccttggcacacagtgaggctgcagctaaataactttccaaagtgtctatcactgacatctgtggccacggagtaagtaaattatttccaagctttctgatcactggggcaagagaaatagtgatttttctgtatcccatgggattagaccactgaagggtttttttattgttgttgtttgttattttgagatggagttttgctcttgttgcccaggctggagtgcaatggtgtgatctcgactcactgcaacctccgcctcccgggtgcaagcaattctcctgcctcagcctcccaaggagctgggattataggcatgcaccgccacgtcaggctaacttcatatttttagtagagacggggttgctccatgttggttgggctggtctcgaactcccgacctcaggtgatccacccgcctcggcctcctaaaatgctgggattataggcatgagccaccgcgcccagccactgaagggttttgtaagcatttattgacagactggtgaccgtagccagataagctccccaaggggataagagtattcttgagacacagggggaagaagaaactgaaggggagggagtggaccaggcacgaactggagcatcaagcttgtatatcaatatcaaagggaaagtggggcctggtccacggaggtccctccggagcagctgaagatttcaaaacaagataatggtgatgggggtgggatggcctgggggcacaaaaggaataggtgaaactggatgtaaagtgtgcgagtctgtatttttaacaagcacccaggtgatttggggataaagcctaagtagaagatcttgcttatatgagaatattgggctagaagaaaacgctgtagttttccagtgaaaacctcagctgcccttgacatgctaatttgtatctgaatttccaagaaatgattattgcaacccctgtggggttataatccagtcccctaccgcggcaggtggaccttccacctccaggaattttaattcctgtgtcattcatgaatgtatgctgccatatttttcaaagccctaggatggggctctccttggactagatgaatcttttaaaataggtctgagctcttactacacttcccatccctgttttataaaagtaaggtatttacttattaattaatacttatgtaaatcacaacattctaacattagtttaactgaatacagttttttctttttttttattttttagaagctctgaggagtgaatccacaatacagttcaaagagagatttaaattgctaatttcccggcactggaatgtggggaaagattgtcacagatttagcatgaaagccatgtatttaacattcctatgtaataaccctctcttaaattgcattttggtttgagaaacagcaagaacaaattcagcattagggggaaactttgctgttgatctcaaagggaatgagaatttagggagcacctctgcccaccaggaaggagctttctcttgagtctcccacatgactgtgtactatggatcacattggaagaacttctctttttcctaatgctgtctgagttttgcattttggtgccagaacagggaagtgaagggatacataagagacacacattatagaaatgtaaaagacaagcaataccacccagacgatagatgtaatttggaacaaagatatttttatttgcctaaggctcaganagtcgtgccaggcaatgctggaaggaattggttggcttcctctcccaaaccacttcctcagtgctcatcctctttcaggtggacaagatatggcattttgactgctagcaaatgtcactgtgacatttcaatggcacaattggtgacaattcagccaatttttgttgggcaccctccacatgccccagggtctgggctcagccctttacgtacgtgggctcattgattcttccatgttttctagaatgtgattttaccctggctggcacagagtaaatgcccaaagaatggtagctattgtttttaatcatcattattaattttataaataacttccatatcaggtgatgggaaaatttcagactttgatttgggccttggaaaacaggttcagtttcagtagatggaggtaaaaggaggcaaagagcgaccttacgtaaatccaaggctgaaggaaggaggctctaaggggtgtgtgggtgattaggagtaaagtatcttgtctgaaatgaagagtttctatacagcatgcttatttggagtcatgcctaacaagattactttgggtctaattttggaagcttggtactccagggagcttggacatgaatttaaagacaatgggaactcacatttaagtttctgaaacagccaggcgtggtggctcatgcctgtaatcccagcacttcgggaggctgaggcaggtggatcacctgagatcaggagtttgagaccagtctaaccaacatggagaaaccccatctctacttaaaagaaaaaaaaaatacaaaattagccgggtatggtggtgcatgcctgcaagggaggagaccaccccttatattgtcttatgcccaatttctgcctccaaagaaagaagaagtaaaaactaaaagtcagaaatggaattcacaagcagacagcctggcgccacactctgggtctggtagttaaagatcaacccctgacctaattggttatttgcataagaaaaagcactgtgaagatccctgtcctgttctgttccattctaattaccggtacatgcagcccccagtcatgtaccccctgcttgctcaatcgatcacgaccctctcacgtggaccccgttagagttgtgagcccttaaaagggacaggaattgcttattcagggagctcggttgttggagacatgagtcttgccgaagctcctggccaaataaagcccttccttctttaactcggtgtctgaggggttttgtcagtagcttgtcctgctacacctgtaatcccagctactcgggaggctgaggtgggagaattgcttgaacccaggaggcagaggttacagtgagccgagattatgccattgcactccagtctgggtaacaagagcaaaactccatctcgaagaaaaaaaagtttctgaatggggagctgttctggagtatgcaggaaggattggggtgggaggagaacaagaagaggaatacgttttagcgatattgcagttatttcaggttaaaagtgatagagtcaggggctgaaccaggatatcggccatagaagcagaaaggaaggggtatgtgtgaaagaaattaagaaagaagatgtcaggcctctgagcccaagctaagccatcatatcccctgtgacctgcacgtatacatccagatggcctgaagcaactgaagaatcacaaaagaagtgaaaatggctgattcctgccttaactgatgacattaccttgtgaaattccttctcctggctcagaagctcccctactgagcaccttgtgacaccccacccctgcctgccagagaacaaccccctttgactgtaattttccactacctacccaaatcctataaaatggccttatccctatttccctttgctgactctcttttcagactcagcccacctgcacccagatgattaaaaatttttattgctcacataaagcctgtttggtggtctcttcacatggacacgcgtgacatttggtgccaaaacccaggattatccctgataccacacctgacccctatgactgtatatctctaatccacctggcattcactcgatttccccatatttccttctttcctgttcctcaccctgatcatacttggtttattgatggcagttccaccatgcctaatcaccattcaccagcaaaggcaggctatgctatagtatcttcgacacctatcattgaggttactgctctgccccccttcactactgctcaacaagccaaactcatttccttaacttgagccctcactcttgtaaaaggactacgcgtcaatatttatactgactttaaatatgccttccatatcctgcaccaccatgctgttatatgggcgaaaagaagtttcctcactacacaagggtcctccatcgttaatgcctcttcaataaaaactcttctcaaggtcgctttacttccaaaaaaaactagagtcattcactgcaagggccatcaaaaggcatcagatcccattgctcagggcagcacttatgctgataaggtagctaaaaaagcagctagtgttccaacttctatccctcatggcagtttttctccttctcatcagtcactcccacttacttccccactgaaacttccacctatcaatctcttcccacacaaggcaaatggttcttggaccaaggaaaatatcttcttccagcctcacaggcccattctattccatcgtcatttcataacctcttccatgtaggttacaagccgctagcctgcctcttagaacctctcaattcctttccattgtggaaatctatcctcaagaaaatcacttctcagtgttccatctgctattctactactcctcagggattgttcaggccccctcccttccctacacatcaagctcggggatttgcccccacccaggactggcaaattggcttactcacatgccccaagtcaggaaactaaaatacctcatggtctaggtagacattttcactggctgggtagaggcctttcccacagggtctgaaaatgccaccgtggtcatttcttcccttctgtaagacataatccctcggtttggccttcccacctctatacagtcccagctgtatacaataacggaccagcctttattagtcaaatcacccaagcagtttctcaggctcttggtattcagtggaaccttcataccccttactgtcctcaatcttcaggaaaggtagaatggaccaatggtcttttaaaaacacacctcaccaagctcagcctccaacttaaaaacgaggactctgtcaaggatagagaccaaaaactcaccaatcaaggaagtaattatgctgaacccccttgggcactctctaattggatgttctgggttctcccaattcttagtcctttaatacctgtttttctccttctcttattcagaccttgtgtcttctgtttagtttcttaattcatacaaaacggcatccaggccatcaccaatcattctatatgacaaatgctccttttaacaaccccacaatattgccccttaccacaaaatcttccttcagctaaatctctcccactctaggttcccacactgcccctaatcccgctcgaagcagccctgagaaacatcgcccattatctctccataccaccccccaaaattttcaccaccccaacacttcaacactattttgttttatttttcttattaatataagaagacaggaatgtcaggcctctgagcccaagccaagccatcatatcccctgtgacctgcatgtatacatccagatggcctgaagcaactgaagaatcacgaaagaagtgaaaatggctggtttctgccttaactgataacattaccttgtgaaattccttctcctggctcagaagttcccccactgagcaccttgtgagccccaccactgcccgccagagaacgaccccctttgactgtaatttttctttacttacccaaatcctataaaatagccccatccctatctcccttcactgactctcttttcggattcagcccacctgcacccaggtgattcaaaagctttattgctcacataaagcctgtctggtggtctcttcacatggacacgcatgacagagaacttgttaggacttaacatcaggtgaaaattatgaggaagatggaaaaattaaagagggtataaaggtcttaatctggaaagtatggtagtatcatttccagaaaagggagatgatttttagatataaattggtaacctgactttgaacacattgatttcaattagagtggaccatctcagtgaaactgtctactaagcagttgcaagtggaggatgggtaaatagtgtaaactctaggggaacagaagaatgcagaatcttttgtgtggaaagactcatcttttgtgggtaaaggaggaagggagccattgaaggagaaggaggagaggtttgatatgtgggaagagaagtgacatagaaagtagcatcacataagtcaagagaggagatagattcaagccaggggatgggaagtggtcaaaaatgaggagaaaagcttgaggcagtagatatctgtggggggcactcctgctctcctgacctccctgcttctggatgatatatcagaaggtactacttctatgattctatgatacgtttttataacaccacactaattctgacaccaaatgtgtttgtggtttattccccaaacaccaaccaattcttcaactctccagatgcaaactggatgtcctaccatttaattcaattctgatactaattaccaggagttagtacaggccccacaggttaaggactcattcccaaaagactgccctcactttagattccagtcaaaagcctgggtaacctgtacttctgtcaatgaaaagagtcaaactctgtaaaatattggaagagatttattctgagccaaatgtgagtgaccaatggcctgtgacacagccccaggagaccttgagaacatgtgcccaaggtgatcaggctacagcttggttttatacattttagggagatgtaagacatccctcagtacatgcaagatgtacattggttcagtctggaaaggcggggctacttgaagtcggggggaagtggggaggggattccagcttataggtagattcaaagatttcctgattggcaattggctgaaagagttaaattattgtctaaacacctagaatcaatagaagggaatgtctgggttaggataggggttatggagactgatatttctactatgcagaggaagcctctaggtagcaggcttcagagagaatagatcataaatgtttcttatcagagttgattctctcctggatcaggaaaaagaaggaatggggattctctacaaaatgtagattttttcctcacaagagacagctttacagggccatttcaaaatacgtcaaaaaatataattttgggggtaaaatacttcaatttctttcaggctgctatttgtcatgtgatgctatactacagtcaggctgaaatttggtgtcttattgctacaaagagtctgttttgtctggcttgtctgtcttaagatctgttttaatgttaatgctggtcagctgtgcctgaattccaaaagggaggatggtataatgaggcaagtccaactccctcttcgcatcatggcctgaactagtttttcaggttaactttgggtaatgcccttggctgagaggaagggtccattcagatggttgaggggctttgaattttatttttggtttgcataaccaaccacttataaagtcagggggttcccacaattcccctttggattgtataatttgctagaaagtctcacagaactcaggaagacacattactactactggtttgttataaaggatattataaaagatacacatgaacaaccagatgaagaggtacatagggtaaggttgggaagggttctgagcatagatgcttctgtccctgtggagtttggggtgtgccaccctcccagcacatggatatatttaccaacccagaagctttctggatccacaaaccccacttatggtttttatggaggtttattggggcatgattgattaaagcattggacattggagataaacttaatctctagcccctctgcctccccataggttgggactaggggtggtgctgaaagttgcaaccctctaatcacttggtctttctgctgactcacccccaacctgaagttatctaagagccccagccaccagtcatctcattggcataaactcaggtatgattaaaaggagcttattatgaatgatgaagatgctcttcttatacctatccttcaggaatttacaagggttttaagagctcaatgccaggaaccagagatgaagaccaaatatgtatttcttagtgtatcatcatatcacaaagtgttctagggtcttagagaaagagggtagctctgtggagtcaagattgtaggtcttggattgataactttactcaaaacctcacaaataaatcttaatcatggtcagtagcaacatccttgaagatggcaattctatcattttatttttcacatcattgtcagcatcatctggaaccgatatttactgaccctcagttgggtgcaaatacagaaacacagtcttggccaggtgctgtggctcatttctgtaatcttagcactttgggaggccaaggcaagaagattacttgagcgcaggagttcaagaccagcctgggcaatatagtgagatctcatctctacaacaaatttacaaattaactgggcatagtggtgagcacctgtagtcccagctactcaggaggctgaggtgggaggatcacttgagtcttgggggaggaggttgcagtgagctgagatcatgccactgcactccagcctgagcaacagagcgagaccctgtctcaaaaaaaaaaaaaaaaaaaaggaggggggtaattaaggactcacttttttttccatttctccagtggaagccatccccagtggaagcttcattctcagggaggtagcaagatggctgtagcacttccagatcgcaacagaagcatgactattttgaggaaaaagagagaccacctcgtcctgtaggtctctcctaagagcaagagaacttcatggaagctttccagcacatttcccctcatgcctcatctgccagaattaggtcacatgcaaatacctgaagcaatcatttagaaccattcctgacagtttcctccaacatacttggctaaacagatgggtccctgaacaaaactgtggttctgttaggaagcaaaaagagggaattggactctgggtgggaccctgggtggagggtacattgcttatcagtttctaggactacaaagacatgtttacttaggatccctatttgaaagaggcttttaatctagttgtgggtagacacaccaaaaaatgacaaaagaatgtttagtaaggttctaaacacacagtaggcacctaaaaatattcactgaatgaatgaacacatactaatattacaccttgggtgctaagtgaataacacagctatgccacagaggctcagaagaatgactgctcaagaagttctagtgcaatgattcatcaaatttcacgaggtcttgtgacaatgcagatacccaggccacaacctccaaaacttggattcagtgttttcatggactgcagatttaacaagaatttcagtacaacctccattagtgttagggaaggtagctgcagcgtgtggttagggtaaataggtattgtttccccactcccaaaatcatttaataaatcatcaaattaaagacctacgagtttaccttctgatatttgtaaagtgattgctaagatccaaaaaatagtgtttggctgggtgcggtggctcacgcctgtaatcccagcactttggaaggctgaggcgggcagatcacaaggtcaggagctcgagaccagcctgaccaacatggtgaaaccccgtctctactaaaaatataaaaattagctgggcgtggtggtgcgcacctgtaatcccagctactcaggaggctgaagtaggagaatcgcttgaacccgggagggggaggttgcagtgagctgagatcatgccactgcactccagcctgggtgacacagagagactctatctcaaaaaaaaaaaaaaaagtgtttaatagttcttttttttttttcttttttgagatggagtctcactctgtcgcccaagctggagttcagtggctcaatctcggctcactgcaacctccgtctcctgggttcaagtgattctcccacctcagcctcttgagtagctgggattactggtgcccgctaccatgcccagctaattgttgtatttttagtagagacgagatttcactgtgttggccaggctggtcttgaactcctgacttcaggtgatccacctgccttggcctcccaaagtgttgggattacataggtgagccaccacgtccagcctgtatttagtagttcttatcaaagaaccatatgtacaaaggattgtacaacttttcccttctgggcctaaatagttattgactgatgaaaaggtgaattatatctgaataatgaaacaatattttcaggtttgaaggtatttgctttattttagaatacaatcccttaaaattatcaagttgctctttgataacaaatggaaaacattttctcatatttattgttccctaacaccaatttattccattggatttcttcatagtttatagtacccagcaaccttatagctgtagagagagactattctttcctcctggattgccaaatttttgtttattgacagaaaactggccaggcacagtggctcaccctcctttttacactgtcttgcttctggtgaagtttcccatagatatgccactggcattctccaattaacccagctgacaaagactgggaccaagtctgtttaatttgtcaaatatggccttattaaggtgactataaacaagaatccacaaagcaggaggaagctatttgtggcactgacctcaaatatgcctgtcagagtctcagaatcaactccttgaacaaattcaagaagccaccaaggcttcatttaagaagagcagggagtgggatctttccttaagtttctgtactgaccttttccctcagtccaagacattaatgtaggcatgacagaatgtattaataattgtacagacccctccgccttgacccacaaggaagaagtttaaagcaattgtattacgtataacacacctggctactcagttgaggcaaatgcgaatacttcaagggcaaagctggtatcactgatcacttcagctaaagtcaggggcaaattttgttctgcttcttctaatgggatgacttccactgcagcaacaagtggccactgatagtggataaataacaagcctgttatcactttggggagttcctccaggtaatcaaaggaagcttcattttggagaaatctccacaatcatctgagggctatgtgagctactagtggtgtacacttgaaggttttttatgatgacttacaaggtataagtcactatattttggggagagagtcaagataatgcctgccttccatactgtcctgggatgcacagggcagctctgggaacaaagtgttgtttaaaggtccgggcacggtggcttgtgcctgtaattccagcattttgggaagccaaggtgggaggattgcttgaggtcaggagtttgagaccagcctgggcaacatagtgagactccatctctaccaaaaaaataaaaataaaaatcagccgggtgtggtggtgcatgttatagctcctcaggtggctcaggggagaggaccccatgagcacaggagtttgaggctacagtgagctatgatggcaccagtgcactccagcctggctgacagagtgagaccccatctctaaaacaatttaaaattaaaattaaaaaaaagaaaatgttgtttacaattcttagcatcccccaaatgagacttataccattcggtgggcacagatcgacagtaacaccaacatgacctctgggtcagctgttaaatcaaaagttctaaggtcactttaaataactgaatctaatccttatttatggaggaactgcctgagggcagtcagcccagactctcctgtttgttcatgtcaccagcagggtgacattgtcaaccccatggaatgactgagcaatagcgataggaataaggctgaggaagacatctggaggtattgacagggatttgcatgggaggtgcaggagctggggctatcccctgctgttttggataggcttcttggtaagattaagaggagtgatgatcaaactgtggtcacagccatctggcaagagatggctgacccagcagtgagttaaatttaaggtgcttctcctaaggtgcaagtttaggagaatcacactaagatgttttccttcctgaagaaagctctggtgatgatttcaaaagacaatgatcattaaggtctccctccccagtcctggctgaggtctaaggtgttgttttccagatgctggggttgttgttctcaaactgtgcttaagatgagtattcattatttctgttggtaattttttttttttcaagataggctctcactttgtcacccaggctggagtgcactgccaggaacacggctcactgcagcctcaacctcctgggctccagtgatgctcccacctcagtccccaagttgctgggactataggtgcctaccaccacacaaggtttattttattttatttagtttagtttagtttggttttttgagatggagtctcactcagtcacccaggctggagtgcagtggcgcaatctcggctcactgcaagctccacctcccaggttcacatcattctcctgcctcagcctctcgagtagctgggactacaggcacccgccaccgtgcccggctaattttttgtatttttttttttttagtagagacggggtttcaccatgttagccaggatggtctccatcttctgacctcgtgatccgcccacctcagcctcccaaagtgctgggattacaggcgtgagccaccgcgccagctaaaggttaatttttatatttttttgtagacacattgtttcaccatgttgcccaggctgatcttgaactcctgagctcaagtgatcagcctgcctcagcctcccaaagtgctgggattacaggcatgagccatcaagcctggcctcctgttgataattttttaaccacaccctcccctttagtaaatcagttgccctatgtatcgttaactattttgaaagacatatgtttgtacattcaggaattaggtgtaacaacacatgggggactaaagggatgctgcttataatcattaaatacagtgcatcagtgttttgtgtttttttttctagagacaagttctcactctgtcacccagggtggagtgcagtgatacagtcatagctcactgccacccccacctcctgggctcaagtgatcctcctgcctcagcctctgtaatagctgaaactataggtgtgcaccactatgtctggctaattttttaatttttagtagagacaaggtcttgctatgtttcccagactggtctcaaactcctgggctcaatcttcccattttgttctcccaaagtgctgggattacaggcgtgaaccatcttgccctgtcagtttttttcttttcatttcttttttctaatcagattggtacattataactactaaatactaacttccagttctgtcacttttagactatttggtgtaaataagatgaaaattagatttagtccagaggcgactacttcttagtatagcacagtactaagaattgttcaaaatctttctcactgtgtcatttaagcaaagtaaaaagtagtaataaagggaacaaaatcctgaaatgaaggcgggagagcagaactaattttttaagaaaataacttcctatttctatgaacatttgctgctcctaagatttcataccatttctaaggatgcaatgacaaaaatgatgatttctattagttcaaggaccgacactatgaggaccagaggaaaggaactgacaggtttaaccactcagacaacacagtacctcttcccttcctcatcctctgtcataaaatgtttgaaatctggtctttcatttggttgtgaaatctattcagctacccttactgaatgcttaccaggtacaatgcatattcaggactctctggtacagggtggtcttgatgaggctgataaaatataatgcaagtggaattagctaaatgccaaaacatgccatgaaaattcagagtataaaaggagtatgtctgagagccaataaaataaataaatgaataaataagaaaaagaaaaagaaaaaaaaggaggccgggcacggtggctcatgcctgtaatcccagcacttttggaggccaaggtgggtgaatcacttgaggccaggagcttgagaccagcctggccaacatggtgaaaccccgtatctactaaaaatacaaaaaaaaaaaaaaaaaaaaaaagaaagaagtgagaagaggctttacatcacagaggacatggggtcatgctaaagcatggcccaagggacccagacagccttggtttagaattcatacctgccacttactaacttactgagcccatagcacaggttgcataagtgcatgaacatgaatagaaatattctagaagaggccgggcgcggtggctcacacctgtaatcccagcaccttgggaggccgaggtgggtggatcacctgaggtcaggagtttgagaccagcctgaccaatatggtgaaaccctgtctctactaaaaatgcaaaaattaagaccgggtgtggtggcgtgtgcctataatctgagctactcgggaggttgagacaggagaactgcttgaacccgggaggtggaggttgtagtgagctgagatcgtgccactgcactccactctgggccaaagaacgagactccgtcccaaaaaaaaaaaaaaaattctagaaggatgtgcccaagtgatttttcctgagtggtagaataatgagtgatgtttatatcttctttttgcttgtctatactttccaattattaaacagttaataagtattaattgttaaaacaagaataaagaaaaacattgtttaaaaagctggtattcactgcttgaaccaggcaggtggaggttgtagtgagctgagatcgtgccactgcactccagtctgggccacagaacgagactctgtcccaaaaaaaaaaaaaaaaaaaattctagaaggatgtgcccaagtgatttttcctgagtggtggaataatgagtgatgtttatatcttctttttgcttgtctatactttccaattattaaccagttaataagtattaattgttaaaacaagaataaagaaaaacattgcttaaaaagctggtattcactgcttgaaccaggcaggcggaagtcgcagtgagccaagatctcgccaccacactccagcctgggagacagagcgagactccatttccaaaacaaaacaacacaaaacaagacaaaacaaaaaaagctggtattcactaaatacttgacatttattgatataacaatttctgtttctagtcttctcggcaagggactcaatctgtagaaacgtgtgaccatgtcaagtcagaaattcactatgaggctggcatataggagcggatctcctagctagtgagtgaacctgaggtgggaggcgggactcgactccagaggcagggctccgaatcggatggaggactacctaaaccagggcaggggcaaaagcagctttcagtcagacacacctaccagtgtgccatgtcaatttaccactgccatgggaacagccgggagttaccacctctttccacggcaatgacctaatgacctaacagttactaccctttccctagaaatttcctcaaaaactgttccttaatctgaatgccattaaaagtgggtataaatatgacccaaactgccctactctgtctactgggtagcctcactctgcaggagtagtcaccaaactgtaacaatgcctcttcaataaagctgttttcttctacctctggcttgcccttgaattctttcctgggaaaagccaagaatcctcatgggctaagctccactttggagcttgcctgccctgcatcaaacctagctgacatctcaaagtggcgatgtgactacaatttattatatgattcaattttattctcataacaatagaggtagatattattgtctcaccttacagattaaaaaactgagggtattatacattatgcagtaagtcatgaatttgggaatctgagagtgttataagtcaagtaccaggtttctcagcatgagcacggttgacattttggatcagataattctgtttggggtctgtcctgtgcattttaagacgtttagcatcattcctggcctttacccaccaggtactagtggcatccctacccttaggctgtgacaaccaaaaatgtctcagacattgccaaatgtcctcaggttgagaatcatgggtctagtatattctattcattacccttgagcaatgaactccgaaaattcaagatataaacctcaataccattttcaacacttcaccttcacaggggcttagttcttaatgaaatctttaataaatggtgttgatgatgaaaacaaacataaataatgatgtaataaacatattttgcataaatacttttctatcttttgcatgattaacattctaatgacagtcaaatggaacaaacattttaaaggcctctcattcatactgttaattgctgaccaaagagttgtaccaatttacatttctactagtagtgtaagagtctatcttaccacaccctcaccagcattggctattatgtgtatatttctatctttgctaatatgagttatttctatttattttaatatttgtgtttataaaattttgtattgttcttatttatatttttgagcactagtaagagtgaatattccccgtatgttatagccaatagcacttctttttttcttaactgttttgtgctttttgctcatttgtcttttggatggtcttagtattgttcctttttttttgagacagagtcttgctctgtcacccaggctggagtgcagtgtcgctatcttggctcattgcaacctctgcctcccaggttcaagcaattctcatccctcagcctcctgagtagctgggatgacaggcatacaccaccacaccttaataatttttgtattttttagtagagacaaggttttgcaatgttggcctggctggtcttaaactcccggcctcaagtgatccgtcttccttggcctcccaaagtgctgggattacaggcatgagccaccgtgctcagcccttagtattgcttttatcaatttgttcaagctctctgtatattataacctggatagcatatatgtctacaaaagaattttgcataaaggcatttgagcgtagactttattaaagctctgggaagatggcaaaggatttaaatcacagcaactgaagtaagctcaaattgagttctaaatattcctctttttataagtcccttgtcatttgtctttctcttttctctttctttccttctcttccctatgcctctctcccatctcttcattctccaatttctgttgcttttcagtggaaactagctcaagttatttctttggtctttgcctccatttaaccatactctcagtttttcttccaccctagtggaagatattagtttatcaaggtattttcttaaacaaggacacttagtttcctaagggaaatgccagtaacaactttcaagatatcttgactattataccagagtgaaaaagagttctgaatcctgttgccctatttgcttcaaatactttctccactttgtttaactaatggatactaggcttaatacctgggtgatgaaataatctgtacaacaaacctccttgacacaagtttacctatgtaacaaacctgcgcacgtacccctgaacttaaaataaaagttaaaaaatatttaaaaaattaaaaaaagaaaacagtaatcaaaaaacaaaataattggttgctggtatgattccatcctgcacagctgttctctggagcgtggttgtttacctctgcctggcttctctcctacctaagtgcttgccgccacccatggaagatttgacggacatggacatcagcctcctgaggccccagaactatctttttggttgtgactagaggccaacaaagattatcactttaaggtggataatgatgaaaatgagcacaagttatctttaagaatggtcagtttaggggctggtagaaaggatggattttatattgttgaagcagaagtaatgaactatgaaggcagtccaattaaagtaatactagcaactttaaaaaggtatgtacagtcaatggtttatcttgggggctttgaaataacattgcctgtggccttacactcagtgtgtttcagggcctgggcatatgagtacacagcacttaacaggtatgaaggaagatacaaagcaggacatgaagaggagggagatgtgagacttttcagtatatctggaaagtgatctgcccctggaagtgggtacatttctacaagaaaaaaataaaacttcttgctgatgaaaatcatgatgatgatgaagaggaagaagattttgatgaagggaaaactgaagaaaaagctctagtgatgaaatttatacaggatactccatccaaaaaatgcacaaagatcaaaccaaaataaaaaagactcagaactatcaagattaagaccaaaaggtcaagaatccttcaaaaacagggggaaaaaacctcttaaaacaccaaaaggacctagttttgtagaagatattaaaagcaaaaatgcaagcaagtatagaaaaagttggttctcttcccaaagctaagtgcatcaattatgtgaagaattacttctggatgaccaactaggaggctattcaccatctctggcagtggaagaagtctctttaagaacacagtttaggccaagcgtggtggctcatgcctgtaaccctagcactttgggaggccaaggtgggcagatcacttgaggtcaggagttcaaaaccagcctggccaacatggtgaaaccttgtctctccaaaaataaataaataaataaataaaaatacaaaaaatttgccaggcgtggtggtggatgcctgtattcccagctacttgggaggctgagacaggagaattgcttgaacctgggaggcagaggttccagtgagcagagatcacgccattgcattccagcatgggcaacagagtgagactctgtctcaaaaaaaaaaaaaaatagtttaaacagcttgttaaaattttctttcttctttttttttttaaatcttttaacccaatagttcttttagagaaaaaaattacctgtcatttcgttaatagttcttttagagaaaaaaattatctgtcatttcatttctgtaacagttgatatctaactgtcctttttacaattcagagtgagaagttccctagcacgttggataaatattgtccaggttccattgccaaaaatgtgttgtccaaaatgcccctgtagtttttaaagatgaaactccatcgtttgcttgtttttttttttgagacagagtcttgctctgtcactcaggctggagggcagtggcactatcttggctcactgcagcctctggctcccaggctcaagcaattctcctgcctcagcctcccaagcagctgggattacaggcatgcaccaccacacccagstaatttttgtatttttagtagagatggcattttgccatgttggtcaggaaggtgtcaaactcctggcctcaagtgatctgcccacctcagcctcccaaagtgctgggattacaggtgtgagccaccacgcctggctctttgcttggttttcagtatatatgtatgtatggaatattatgataggacatagtagtagctgtggtcagacaaatggaaatggtgggaagacaaaaatatgtaactgaaataagctcaatattttaataaaggaaaaaataaattttttccccggaaaaagttgtaagaaaaaataaatcttctcccatgcatcttaggagtgctttaaacttagatgtttggagatgagtagtctttagataggtggaaatggaggaaaaggtgtgacatgcccatggctacctagtatgcttctatgcatagtacagtttttaaaaagtgagttgcttctctgtaaaaacatattactttactattagaaaccactggagagcaatcatgccctgcttatattaaacatctttgctagatttttatttgattttttgagatggggtcttgctctgttgcccaggctggagtgtatggtgcaattttagctcactgcagcctcgaactcctgggctcaaggggtcctcccacctcagcctcccgagtagctgggactataggcatgcaccaccatgcccagctatgtttcctaaatttttaagtgagatacattaaacctcataaaaattagagctaacatttattgaacactctgttgtactgcctcccaagtataacatggtaattaaaacactggaggccaggcacgatggctcacccctgtaatcccagcactttgggagggccaagtgggcagatcacttgacctcaggacttggagaccagcttggccaacatgaggaaaacccgtctctactaaaaatacaaaaattagttgggtgtgatggtgcacgcctgtagtcccaggctacttaggagggcaaggcacaagaatcgcttgaacccgggaggtggagtttgcagtgagctgagatcgcaccactgctctccaacctgggcgacagggcgagactccatctcaaaaaaaaccccaaaactaaaaaaaaamccccaaatgttggaaagttgcgcgaggtataattcagtttagaaattaagaatccaagacaaaaagtctgcctcaggaccacacacaagcacgaagaaaccaagatagttcaagcatggaccttaaaactgcactgtctaaggctgttgtcactggtctcatgtggctatttaaattttaattaaagtgaaataaattttaaaattcagttactaagtcacactaaccatatttcaagtgctcaatggctccatgtagctagtgggtactgtacagacagcacaggataacatttgcatcatggcagaaagttttagtggacctaaccaaaaaaaaaatgcctttaggctcatttcgtgatggcagataaaagcctctggaattctgataagtttctgaagccatgttatagaactggttattgtaattgcgtgaacttcatccaaaactggtgaaagcgtcaggttggggatagtctggtggttgttactttctgtccaacctaatactgaggctctgagaaattctgtggtgaatttctgtagggggacacagcagaaaaggcatagtataggtcagaaaacctgggtcctataatacatagtaataatgacgaccatttactggttgtttcctatgtaccaggcactgtgctaaccacaggcttcatttaatcctcacaatacctgtgtaaggtattattaccaccactttgcatgtgaacaggctgaaattcagaggagtaaggtcacacaactagtaagtaggagagcctggattcaacacctggtatctattcccttgcgctgaacaactccgtgccctcactttcttcatctgtagatctaaaaggattaaattagaacatctcaaaatttctactacttctaaaactctgtgttctaaattaggacattactatctatctccccaagctaatgaaataagcagggttcctgggaggagcttgttacctatttttctccaaaggagatgctttcccctgtctatgcctctgtcctaaaacctttggtttcccactatctaatgtggtttcaactatctatgaggcgctttcgtggcaaggagtgattctctccagtaggcaatcctaagaacgagcgcagtgcttggcgcacagtaaatgctccatggaccatttatgaaattaagtctaagtggacttcaggaaaatgtgaatctgctaaaatgaactactagccagtatactaggtagaaaacccagctgacgaagaaaaccccaagtggagaagcccttgtagggggttggagacaatttctgacccgcagaaacctgcagtggcgctgacgtttacaagtggtggacaaaacgccacttgcaacactggaagaagcggaaaaccccacccactctggaacaacagcgatcagccccgaatatagggtccccttgccgccccgtagcctcctagtcccgcccctctcccaaggcccggcagtggcagcggctgcggctgcgcagtggcgcgggcgtaggcggagcagcgcgcgccgcggtcagctgactgctgggctggcacgtgacttgttctgtgttcgcttgggtagaggaagccgtgaggccggagcttaggtcgggaagggatggatcgctgagccgatagcgtccgctaggctgtctgcctcggtacctgttactgctgctacttcctcgtttgacaccttcctgggtcagtgagcgatggctctccccggatggggagtcctggtcaggccgaagcttgagctgcggtcgctgcctgggagggacgcgggtgggtgcgggggcagagaccgtggcgttggagctggagctggctgggtggctgtgtctggtttctcggcgccaattcaccgtcttgggcctaggttccgtctctaaggaagagaaggagggaaaaagagaaagagctctcgtgggtagttaatgacaggcagaaaggagagatacagcggtctgggatctttcttcttgggtaggaatgcacgccgcctgattgattgaggggaatgaagtgataggtccaggtgaggctatggagtggtgtgtgtgaggtcacagctagcgcaagtgccttcactgggtgtgtgttggggggggcgcgggtgtcgggggtcgggggtggtgggatgacagtttaaaggcctaggagcccctaactgcaggcaaggaaccctcacagagtacacaaggtccctctaggaatgagaaagaacaggaatccagagaactcaactattttttagtagaatgggggagggtaggcaaacaaaacagaacaaaacaaaacaaacccctagaaaagaacttggtgagagtcacataaggcatattgaatcacttgagaaacaggagtaagggggaagctagtattcttttcagaggaaaattctggtatgttagggaaaaatcacatgcttcagtgcgagcccagtacttagcgccgctctgggaatggaacgggtgggatgtgaacagtctatccttaggagttagcactaacgttggagagaaaagtctacacacaggacacgttaaaatacgatgcagtttatgtatacttaccaaaaagagaatgcgaagtgctttgaaagtgtggagcaacgacacatgtgtaaactggcactatgggaagatattctggaggaaagaaaacttgagtcttggcaagccctcaggatttgaacaggttgagagaaatggggataattttacaggcagggaaagccacaggatttgaaagcctgaagatgggggtagggaatgcttctggtggagtcagaagtagcttttacagtggattgcactgcggagaagtgggaaagaaagttgggagtcaggtaacgaggacttttgaatggtagtcgtttacttattcatgcaaataatgtgtactgaatacatgctgtatgcaggtacagtgctgatggtagggtttagaaaattgtctttatagagcttacaggcaagcagaggggatggattttaaaaatcaagcaagcgtgaaatgtgctttgaaggaataacagtggtatgaaagagtgtagtaggggcatgtgtattatggaagattttaaaaaggcattgctaagaatatgactttttaaagattaaaacaattttatttatattcttcataccctctcgctctgagagggtatgacttttgacctgagatctgaaaagagactgaaaagggaatgtgaaggtgtgagtgaaaagaacattccaggcctggcagggtggctcgtgactataatcccaacattttgggaggctgaggtgggaggattgcctgaggccaggagttcaggaccagcctgggcaacatagtgagaccaccgtctctaccaaaaataaaaaaataactagctgggagtggtggtgtgtgcttgtagtcctagctgctcgggaggctgaggcgagaggatcatttgagcccagtagttcgaggctgcagtgagctgtgatcatgccactgcactccctcctgggaaacagagctagaccctgtctctgaaaaacgaaaaaggaacatttcaggctgaagcaacagcgtatgtcaaggccctgaaatgtgaagaggaagaaagcttttcagcctttttgaaaggctagcatggctgaaacggggagggagagaggcaggtggagaaagctggggtcacgccaagcagagcttttattctaaaaacagagggaagccagtgaagattacaggcagtggattgagacaggttgtggctttttttttttttttttggtgggggggagataatgtggagggtggcaaaagtgaatgaggggagacccgctcaggggaacattgttgtaatccactgaaggatttgaagacaagataccttctctctccactgaggacttcagaatgtttaactgtattcacttttagagggttcaggacttggggaagggaaagaatgattcgattctatttgtacccttcacagggtagtcgtaactaccctcgaggcagtcctgaagtacatagcagaggctcttttgcaaaaatttgttttggcttttcaaatttatccttttgtaaggtcatctatttcagaatatcttttattgaaatatagttacagggagggatcactttcatatttattttgttctcacagttctttgaaagacagtggatgaaaatgctattcattgtatagatgggaacctggagctagagaaacacgtaaagtgatttggctgagtccggagtaactgccacagttttctgactgctgatgtattcctgctgattacctacacagtactaaccacagtcacatctagagaaaagggcgagttttttgaagtgcacagtagtctttgattcagcatttttttttgtgggggggaacttctccctgaagattcagcacttttgatgaactttttctagtagaacagcttcaaaggaattggcagtggtgggctatgtcttatctataatcttggatagagctgttcaatttacagttcatctggaggaaataatgaacaataaggtgaactgaaagtgctcaggttgtcaatcacagttctttggcaaaaagtgagtctcaaattatgctgaagactgagcctcagggttctgtctcagaagtcctggatctttttctcttttggtataccttgtagggactagataaaatctaaagaaacagtactcaggatctaactaaatgctgagagctagatagtgtaattcagcttttaaaacttggcacaaaatactcatttttatttttttggtatattagtcttaggagcctcatgtacattagttttttcaacctaaaaagaaacttcagggcttcaaaaatctgattttgtgattatttccacaactcacgagataataccattggccaactggaatgccaaagtaaacctttgccaaaggtctccatgtagtttacccgtccctaagtagcaagtcttcttttgaacttggttctgcttaggagtactacagttttgactgagtacctcctacttaaaattttgctcttgtacatatttaaatctgtctacaggttacatctttttcactctttgggtgtggaattatatatcatttataaattaattcatgttagatttccatttttcatcaatttttaaagacagacatagtataaacattagcatagtgcccttgggacgcttaggcagtgaaccaaggcagtctaaaatttcctattgacatgagtgattcttggaactagaaatttcaaactatattcttgatgctgaaacaaaattttttatccagcaggacatctacttctaagattataccatgtgcaaatgtactatgcgtttattgagttaaaaaaatgagccaggtaggcagtggaggagaggtgctttggttactatgcatttattgagttaaaaaatgagccaggtaggcagtggaggagaagtgctttggttacatcggggataaaagagtattaactgtatatctaaaatgtggggtgtgtgtgtgtgtgtctgtgtgagtatgtgtgtgtatttgaaaataaaatgctaggtaagtgatgttttatagaaagggatcgatggatcttctaagatattttaaacagactatcaatgaataggaagttgtaaattaaggcgtgttaacaggtggtttaactttaccatgaaaggttttccttttgaatcagcccatagtttagtgtttctatgtgggtgctattggcagtttggaggtctgtttcgcccctacccactaaatgctgattagcgatctccacattgggacaacccaaaatgctcccatacatttccagactcctcctggaggagagaggcaccatttggtgcaaaacatgcatgtggtgtcagtttatttgttggacaaatattaagatgttgaggatacagaggttaaaagtaatattttaataaactgcatataatggaattcaagtaatttaaaatctagtgtttgatgttttaatgtaactcctttagtgtaaaattactgaaactatatcctaatatttctttgaggcacttgtcttttgtaaaactgcatgaataactcaaatagagtccccttaatcccaataaaatgtagtcactaaatgtctttgggcaactaatttcaccagctgttccctcatttgcaagtgggggtggtgataacacatcttgtgagggaattaaatacaaaattgctttagtagatgcaagtgcttatcactgggcacaacatgtggtacatattcagtgatagttgttaccagtaaacagaatctcaagcttacttagggtcatgagttggagaaaactaatcttaaagtctttaagttggtgaatttcaggccaaaatacattgtattggagataccagcaccttctagcagaatgtggtaccgtggtccagtcactattataaattgccagccatgaagaaaagggaagtcatgttttgggagccatgagtgtagattcagggaatcccctggcatggaaggaattatttgcccactgggtcactgctgagttgcctgtgcagaggaggagtctctagaagctgagaaggttttggtgattacttgcagtaatgggtgtacgacagggccctcctggccatgtctgccaattcagtagctttaccagaagttactagaaattttccaacattgtattatgtattacatccccagcccccactccacaatgtcacagtgtgtttccagtttttgtgataggtatctgtgtgaaagtaaggctttgcttttacagattgctttctaggcaaatgtggaataaaaaaattgtagttgataaaatgagtctaataaagattaaattgcctttcatatttaagtatatttatggcaagaaattatggtagttttaataggattatagagcatttatgggtattgtttccattgaaaacaaaacacggaatatttaagatttatttaagaaaggcggggctgggtgtggtggctcacgcctgtaatcccagcactttgggaagcggaggcaaagggcgggcggatcacttgatgtcaggagttcaagaccagcctggccaacatggtgaaaccctgtctctactgaaaatacaaaaaatagctgggcatggtggctcgtgcctataatcccggctactcaggaggctgaggcagaagaatcgcttaaacccaggaggcagaagttacagtgagccgagatcgcgccaatgcactccagcctgggcaacagagtgagactccgtctccaaaaaaaataaaaaggcatattttctgacagttttaaaatctcatttcgtatgaatcatggacgtattccttgaaaggtaaaatcccccttctagttactgaaaatgtttaaacaagttgtattatgagcaagcccctcccacaatcccaattaagatgcttctgtttcgaaggatagaatttttacattcaaagaggaagcagttatttttactttttatatgtatggtgttagtgatttctagggtaggatgtggcaactttttaactgagtggattgtggtaaatgtttcgcacagatcaattctgttaaaagttgatgtgcacatttggaaggctatgtgatatttcactgatagctgaggtatgccttcttgtgcttcttaaaataagctgctttagtaaacttggtattttcaagtactgaaaaggaagttgttttgcatggagaccaccttctaggcttaatttattgtgaaatttaatttactgtgaaaggtgattgcatttcagagaccacggtttggttttcttgaaagcattgaaatcagttaagtgtcggagcacttagtggagtgcggtactgttttctgtggttgcccctatcttgggtcaatcccataccttccattcacagaagcagtgccagcagatgtcttgttcaggcttataaccaaccccccctcaccttttatgttgtaatagttattgttttattgtctttatatgcaaatcaattgtggtaggaaaataatccatagccttcaaactctcagaagtgggagataaagtaaataaaattaacagtcccatagctttggatctagggttttttttttttctcctttcctcccacttttttcccttccatgttgaaaaataattgttacttttttttttaagcagcacacttattacagtcagacaaaatagaagtgccttcagaattgactagtgtttcccttgtgcctccctatgttcttcagtgtttttttctgtcttgacatctacatgaagtcttcctcccaccctccctgcacacacacagacctgcctgctcgtaagacctgccaccctctcccacccccaattgtaagctccatgaggacagggtctacattttgtttgttttgtttctcagagtctattacagttttgggaacttaagtacccaaaatattttgtgagatgaataagagctttaattgagaacagttacagtcagatgagatgtgtgacaaaacataaaatagatgtctgcctaatgctgttaatgacatgagtgtaagtagacatgtgggagaagtagtgggattatagtaacaggtttggtgcatggatggacttagttgggaaaatcattttgttaagggaggcttgggttggcttaaactggaagagagaaatttgttttgtgcgaaacgagcaaaggcagggtaggaaagggaaggaggcctgaggtcaagatggataaagagagctcaggaggaatgcgaggataaggcagaaaaactcagacagggatgctagtagtgatgacagtgaagattggcagatttgagttttgtttccaagaaagaagcaggactaggggtgtctgttttggtgagttgttcagccttctgtccatagccttcaagagtattgccatttcttgtaacattaaatatactgtataatcatagaaatgcctgtcttgttacagtggttctgaaatttgggtgaattacctgagggacttaaaataggaaaaaagaatcctgggcctcacctagtataggttcaggtagtgagtataggagcagaagaggatcctggatattgtaatccaatcctctcattttacaagtgaagacatttatgcagacaattatatgcagaactgggattagattccaagtcttcatatcctcagcgcagtgctctggcgattacattgtgcttcctgaaattgacatttgggttttctttgactatgattcccagtgaggtaaaagggccgtttaccaactttgatcacatcttcagaagtagctacaattaaccagctttgcccttctcttttgtatgaactccagggctctttgttatgatgccatttaatggtctctgaacttttcagtgttttcaaatatgaggatactgccctaataaggatgcggtgggacatttttttgtttgtgtttacatgtaataatttattatttaaaaattaggaaaaaaatatacagaaaggatgaaaacaaacattcataatcactcccaagagataattgttgacagtttttttttttataatttaatgtttatacctatgcatatccttattttctttcttaagatcggcatagctaggccaaaggatatgcacattttgtgggttttgataaatattgccaaattgtgttccagaaattgtctatcttttgttctttcttccttccttccttcttttctctctctctctcttctttttttttttcaagaccctctgtcacccaggctggagtgagaggcgtgatcttggctcactgcaacctctgcctcctgggttcaagcgattctcttgcctcagcctcccaagtagctgagattacagatgcgtgccatcgtgtcttgctaatttttgtatttagtagagaaggggtttcaccctgttgcccaggctggtcttgaattcctgacctcaggtgatccacccgcctcagcctcccaaagtgttgggattacaggcatgagccactgcacccagcccatctgttgtttctcatctgcagaattttcttgggctcccatgtgatgtgtaattattttagattattttagaaatagatgatgtagtatatctaagatatattttagatattttattaatgatgacaaattgttacagctgtattcatgctttattttatttaaaaaaaattttttttttttgagatggagtcttgctttgtcgcccaggctggagtgcagtggcacaatctcggctcaccgcaacctctgcctcccgggttcaagtgattctcccacctcagcttcctgagtagctgggactataggcatgcaccaccatgcccagctgatttttgtatttttagtagagacagggttttactatgttggccgtggctggtcttgaactcctgagctcaagtgatccacctgtcttggcctcccaaagtgctgggattaaaggtgtgaagccacttcacctagcctattaatgcttttaaataaattcatgttttacttatcaagatagcacgccatacatttgcaaattaatggcacataagtgaatgttggagacatttattcaagctgcagctgttttttttttttaaacaaaaatgaacatttttccttgttagtacaaaagcaatacatgttcattgtgttccatttttcacaaacacagtagtactccagtcttttagcctagatttggtaaatttttggcatttattgttgtcagtcctgttttctgttaaatgttaaaacatggggctgagagaggctgtgaggttgtggctgaatccctgcatagaaacaatcagaacaattagaaaaaccgaacacttgtgaataatacatacaacaaaaccagatgagacttcagtttttgtctgcgatggagtaactggtaccatatttgctttcccaccataaacaattacaaatctggacaagatatattaaaaaactgcttccagacatcggacaataggcagtacaggagctgagcgaaaggaaatgagctgtgtaattcctcctgctttttcctgtagacactctctgcaccgtgttttaggaagggaacacccgtgcagagcatcttggtcttgctgagtcgaggagactggacttggggaaggtttatctggctggaatttgcaggtgggattgacagagagagggagctaggcagagaaataaacaccagaaacttatgggggggtctctgcaggagatctaacaaagaatgaccagagagctttaaactgaagaattgccagagcttatggtgctgggaggcatttgaattctgaccagatatgggagagagaacttattgaatacctgggacattcaatagaatccccaaaaggttagaccttagtatcagagactaagttagccctagagtaaggccttagatctatcctaacaatgtttgaaaacaagccttgggtggatcaagctgatcctcccctaacttacctgcccaccacaacaaagtacaacactcttaaaaggaagacagcaaagtccagtgatacacagtgcagcatttttacaaatatgctcagtgttttaacagaaaacatgaacataatgaggaaagaaatggaagatattttaaaaatggaacttaaagcagaaaaatacataagaagtgaaatattcactggtgagaagaataacagattagatactccaaagaaaaggtcagcaaactacaagatacagcaagagactgtgttagtcttatttgttgccataaaggaatctgtgagactgggtaatttataaagaaaagaggtttttttggcttacagttctgtaggctgtgcaagcatggcatccggatctcagcttctcatgaggcttcaggaagctcttgagtcatggcagaggggaaggggagcaggagtgtcacatggtgagagaaggagcaagagtcagggggaaggtaacagtcagatctcatgataacttcttactatggggagggcattctctttttaacaatcagatttcaaggtaacgttactacagggagggcaccaagccgtttatgagggatctgccccatgacccagacacctcccaccaggccccagctccaacattggggtttattcaacatgagatctggggaggacagacatccaaactatatcactatccaaagtaaaacacagtgagaaaaacaactgagaaaaatgaatgaaagctcagtgacctgtggagcagcatcaagtggtttaacatacatgtgatcttgtttcaaaagaaggaagtgaaggcaaaaaaaattgaggaaaaataatggctgaaaacatttcaaatttgatgaaaactatgaatggatccaagaaactcaacaaactcgaagcagagtaaatacttgtgaccttgggataggcaggtttttcacatgctacagaaagcatatattgtaaaaaaaaacaaaaaacaaaaaacaaaaaaaacccaaaaactgataaatcggacattggcagaattgcaaacttcttttcaaaagcatcattaagtcaagccacagaatgagagaaaatatgtaaatatgtatatatatttcacaaggaaattgtgtcaagatcatataaaaattttgtgcaactcaataagtgaatccagttttttaaaaactgggcaaaagacttgaatagaaaatatacaaatggcaaataacatgaagagctcctgaacttcattagtccgcatggaaatgcatcatggaaatgcaacataaccctgcaacccactggaatggctaaaaatgaaaaggccaagaacactaagtgttggtggagcatctggaggctgaatactttgctaataggagtataaaatgttatatatctgctttggaaaacagtttgtcagtctcccctctcctcccctccccttcctttttttctttttctttttcttttctttctttcctcactctgctgtccaggctggagtgcagtggcatggctcactgcaacctccacttttgggttcaagcaattcttgtgcctcagcctcatatgtagctgggattacaggcctgcaccaccgcacctggctaatttttgtaattttagtagagacagggtttcagcatgttggctagactggtttcgaactcctggcctcaagtgatccacctgcctcagcctcccaaagtgttgggattacaggtgtgagccaccacacctggccaatttcttataaaggtaaatatacattgatcattcaacttagaaattctacttttagaattttttatccaagagaaaaatatatcttcacaaaaagctttgtagaggaatgttcatagaatctctattcttagtggtcccaaaccagtagtaacaatccaaatgttcatcaactggtgaatgtatgaacagactatagtagatgtatgtggtagaatactaagtaataaaacagattgaactactaatacatacaacacggacagatatcaaagacttgctgagcaaaagccaggtacaaaagagtatctaatgcatgcttccatttacaaggaaattctagatcaggcaaaactaatctatagtaacagaaagcagaccaacatttgcccagggctggcagtgagatagggattgactggactgagtgtgagggaaggtttggggatgatagaagtgtccttaatcttggttttgacagtgctcacacaggtgtatacatttgtcaaaaactcatcaaactcttacaatgggtgcatttaattctatataaattatattttaataaagttgattttatagaaaaaacgggaagtgagggaagctaaccaactataatccaggtgcttgatgttatctcatttaatcctcacagtaatttttattgaagaatattcagcaaatatcttctgagattctaccatgctggtctctgtgccaggtactgaggataaagtggtgagcaaaaactatcatgatttccacttaccgtcctgggcagtttatttgaaagacagatactagtaaaaagtgctcccccacccccagagaaatactacaaagaaggttctatgagagcatataatacattcatccttagcatataatatatgctgtcatatgatatataatgagacacatactacataatataccttgtataatatataagatgctttatgtgccctggtttctttgtaactactacccctctaatggggtttctctaactactaagtgagttaatacacgtgaagtgttttgacttgtgctagtagataggaagtgcccagtaagtgttggctgctatgaacatttgacagttctaattgtctaatactgcaggggtacacctatactaactcagggaacagtggagtaggactacatattggggaagagatgataagtttgactagaagtgttgggttttagctgcttttgagacattcaggtggaaaatgtcttgtagtcagatgtggatactggttgagtacaactctagatgctgcagagggccctgggctggagacatacatttcagaaagtgtccagcatctagactagaattgcctcaactgtagagatcatcatcaagaaaggtgctatacacacacattcacacacacgcagaaagagaagaaggacatagacctggatctgagccttgagaaactacgatttaatcagggtgcctttttgatcatcatctcctctgtttagcatatgattttgctacatttaggcctgacttccttcgtattcaagataaaataaagggaaataattacgagtaaaaacaagcagtggagaaggtggtgtcaggttcttggcaagttgataacaaatggccactaattttgacaatttgtttccttgcagctgagagaaaaagggaaatatgtttagcaatatggattccattttccgatgaataaagacatacatattcatctgcaaagataaattttgtttgaaactaaacttaaattgttcttaaatttcaaggataatttttttttttttttttgagatgaagtcttggtctgtcacccaggctagggtgcagtggctccatcttggctcactgcaacctttgcctccagggttcaagtgattctcttgcctcagcctcccgagtagctgggattacaggcgcatgccaccatgcctggctaatttttttgtatttttagtaaagacatggttttgtcatgttgggcaggcaggtcttgaactcttgatctcaggtgatctgcctgcctcagcctcccaaagtgctgggattacaggtgtgagccactgtgcctggcctcaaggagaaatttttttacctgacttgtgtaagtgacaagttgagagcggtcatagtttaaaaatggaaaaaacagattttgcaaaatacttatgatgttaactgtcataggaagttgttacattcctccttaggtacttaagtagcttgtctttcctgttaggctctttacttagagttagtttgctttgacgaggggtagaagaactgaggccatggctttgcctgaagtacagataggttctttatcaaaccctcttttttatatttttgactttattcacccttgacataaaagacaaaggcttacttaggaacctgcaactctaccaatttttaatttttactgtaaaataagggttttctggaagactaaaaaacacttttaaaaaacatgattttttttgcgtttatctctaaatcagacgttttgattggttccatcattgttgtatttgaatttgaattttatttattaattcaacaggcatttattaagtccctgctgttgccaggaatttagtgtattctggctctcagggtttcacagagaagaagatatgattctagctcttcaggatttctcagtaaggtggagaggaaaatatgttataaaaatgagggagaatacgatgagtgcgtagtaggggcatttataaagtataagtaagcaaaggatatttctcatctgggatacgggggagagtcttgggaggtaggatggggtggggcagcagctaatacaatcatccgcaggaagggcggccgcatggaaaggggaaggtctaggtacattattttattcatactttccaacagctgggtgaaaagatgtgtcgtgttcccactttacagatgaggaaactagtaagggggtagagtcagagttttaactgttgcaggactccaaagtttgtgttccttcctccatgatctggcaggtccatcgaatctctagtatctgatctctagtctcaaagtatactttgaatctcgaattttgtgtgtgtgtcctttcgtttggaggaatcgttgttccttctagaaggtaggatagttttggatgctgggtgatgctactttagaaattgtgatgatcctggacgaagggaacaaggaaaggaagcttggatccctttatcagaattcactggaccaacagggtgccctgagcctggaaccaaacagggtgaaggtgttgaagcttacatgtggatttctcttcaaataggagagcccaggtgcaccagagcacagaacatcttttctcctagtgtgacacaatagagagaacatggtctttagagtcaaacacaactaaatttgaaccccatctgccagtcgtgcagccttgggtaaactactaacctctctgtgtattactgcctatctcatgggttgtagtgagaatggaataaaatgatgtatgagaagtgaaaagcacaacatcagacttagaaggcaccttttccttcctttcctcctcatcttccaacacctaggctctagggaggtctcagttaaaagctagaattatgagcacagtggctcacacttgtaatctcaacactttgggaggctaaggcaggaggattgcttgaggctgggagtttgagaccaacctgaacaacatatcaagactccatctctacaaaaaataaattttttaaaagctaaattagagaacttctatcatatttttagactgtagttttgatcagaatttatcatgacattatttcctttgatcctaataaaagctcagtgaagtagatagggcaggtattatttatagatgagaaatggggtcctctttcctattccttgaaatcctttggaagcctgttagaagaaaagattttctggaactctaagtagtatgatagtgtcatctactgtaatagcttgtattattacaatctttgaggaagctgcagtttagataatttagcacaatcatcaggaagaatttaacagttgattttattacctgccattttggggggagaggaggtataaaaatgtatcctttgatatactaacagaaaaccacttgcataaaattattataataaaatctcaatttttccagaaaccacgatcgcttagatctggattacaaaaagaggtttaaagatgctattagattttctaataactgaaaatgttaaagttcgagacagtttgtgctaaaaaagctagattcgctaagtgcgagagtattaactggaagcaaccggcgataggtggtgatgtgatccaggtgttgtgaagaacagagacaggatgacaagaaggcaggatataggtccacgagatttcagcagggatttatttttaaaagcaacttcttgagataggttctggagttagtacaggtgtagcctgaactcccacacttgcaacattatgcagttagattgttggacatattgacccccgaaatacttttttaaatttattttttaaaaataaaaataattaaaaaaaaagagagacagggtctcgctatgttgaccaggctgatcttgaactccagagctcaagtgatcctcctgcctcaggatccaaaaatacttttaaaataaatcccaaactctaaaagcattgtctgcaatgtattatacttggtcataagaagatataaacaaactagtaagcatttctactaggtgtaaaacaaaaaggttgtactttgaggattaatttggtatctagattattctctgaatatccattttaaagttcactaaaattttatttttaataaatttgccatgcaatgttatgttttaacttgtaaattaaatacattctcataaaaattttaaaaatatttagttttgaagtatttcagatatacagaaaaatgttaaatattgccaattatgtcatccatgcagatttagcaagtatgaatattttgctctatttgcctgattttttaaatgaaatcttacctacaaaactaaagctcctttctcctatgcatattttagtattttctgtaagtatatataactctgaacactatatactattatgtgtttttcagttgtggaaatagaaactcttactctgctggcaggaacttaagttggtaggggctttggagaacaatttggcaatacccaaaagagttggcagtggtctgtgtcagttgtctcatgctgcacaacaaactaccccaaacttagtggcttaaaacagtgatttcttatttctcctaattctgtgagttgctggggtagtccctctgcttgttttgcctggactcattgatgcagccgcattcagctgggagattggctgggctggagggctcaaaatggcctcagtcacatgtctggtggttcatgctggttgttggttctctacatgtggccttatcacttgcaatagacttccttatgtggtagtctgagggcagtggtccaagacgcaaggcctcttgaggtctgagccctgaactcgcatagtgtggcttccatgcgttttgttggtcaaaccaagtcacaaggccagctccaccttttgatggaaggagtggcaaagtcacactgcataggagcatggaaagacatctcgcctccatctttgaagacatatcctgtaattcagctattttacttttatctatcccagaaaaaatctttcacagatagagagatatgtacacattgttcacagcagaattgtttataatagcaaaaaagtaaaaacaatttaagtcattccaggaagaagcagataataaattttagtttattcatataatggaataccatatatcaattaaaattaatgatcactggataattctaaaaataggttgaatgaaaaaatcagattggaaaagaatatgatagtataatagccttaaagttcaatatttgaagtttcttgggtaggctaatgaagattttgcttttgcttctgttttgaaatcaaaacttatctttggatggcctcattagagcatggtgcttatgagtagcttccatccttggatggccagttaagctgtgctgttctctgaccagacgggctgtcactaaaaagcttgtgtttagcttgttggccatttgggaaagtgtagctctttcatttgagaaggtgtaggtagagctgataaaggtttaacttcatcagtaatgttagaaaagtccatatacagtacagtttcttttttaaaattttttttctagaatatagtttcttaacattcatttaataccactgtctgcatctgtaccaggtttaacctgcatttcttatctgtaaatgggaagcatgatatttacctcgtagaggtgttgggaagatgaattgagataataatgcatttaaagcagtaccttttatatggtagatcctctataaacagtagttagaaaaattaacaagtatataggatggcatctatgttaagttcactttcaatggtattgtagtgagtaggtagcattgattacctactcataggtactttaagtaggtactttaattaaattttaggactactgtaattatgaaagtccattattaactataatactttacattttaaaggaaatttacatttataaactcttttcacattaattatctgattttgttctcaggacaactttgtaagatagttatattcaatttagagacattgaatattagtttcaggagaggttaaataagcagtgttagcagaaagcttatgttggttctcatgaaggcagattaaaatggaaataatgataccataatactttgatttttatcatttgtgtttatgtgctttacctacctagattctaaatagatttgtctctgtacttttttcccccttctgtgtgtgtgggaaggggaaggaggaggaggaggaaaagagattatagaagagggttaggtgaatcttaatgggactctttggaaagggagaactgcagcctgcctctcagatccaaaaatgttatattaacgccaccctctcagctccctatattttaaaatagccaagcagattggcaagattttttttttttcagatttgtaaatgttcgatggcaactaagtctatgcatcaaagatttgaggagatttctctaggttgactatggattagaattaaccaccaaatttactagccatgtaggatttgctaagccaatgtgagaaatttatttggtgacttctgtttataaatgcattgattcaattaaattctttctccaagataaaagttatgctttttttttctttttttaaatttcctattttggttgtatgctttaaaagtttgagataggttgggtgtggtggatcacttgaggccaggagttcaagaccagcctggctaacatggcaaaaacctgtctctactaaaaatacaaaaattagctgggtgtgatggtgcatggctgtaatcccagctactcaggaggctgaggcacaaaaatcgcttgaacctgggaggcggaggttgcagtgagctgagattatgccactgtactccagcctgggcgacagagtgagacactgtctcaaaaaaaaaaaaaagtttaagataaacctataaatttgtaactctccagctttgttggttgaaggaaactattggtggctggtattttgggtaatctcacttcttggctaactcccgttaaggatgttttataatgaaaaaaagtaggtacttcacatattaggtttttatcacctcactttcctagtatcataaataaatcgttttttcaccatttgtgtagatttatttcgaggtaggtaaatttcactttgcttgagatcctatgccaacattagattagttttgaaacaggttatatgttataacttctcctatgattctgaaacactttagaaacaaatgattttaaatgtgattttttttatttgttttacatttcagaatctctcttgatttttgaggaaatacctagtaacaaacatgactgagttctggcttatatctgctcctggggagaaaacctgtcagcaaacatgggagaaattgcatgcggcaacttcaaagaacaataatcttgctgtcacttccaagttcaatattcctgacttaaaggtgaagctgcactgtgcaaaattatatatgagttcatcatccaggggagggccagttctctcttttagtggaaatgagatacccaggttccttccaaagaaaacctcctctccagccattggcatgatttaaaatgtgtcttctttgaaattttagaagtaaactaccaaattgaaataatgtctctctacttaggctttttgtgctcttctaaattgcaatgaaaaatcttatgaaaatgtttgatgtgttacattcacaaatatgattttcagaaattaaaactcttagtaatatatattcttaaatatcatagtgaagtttttgttagtacatttatattatgctgattcttacattgtaaatgtgttaccatggcacctacttaatcacacttggcaaatctaacccagttatttaatccggttaatctatgtaagattcactcttatcaaagatcagtcatctagcagcctcaaagtaaagcaggtgtccagtaatcagttgatggaacatttgtaaagaatggaaaagatcatgatactgacattttgctggttaactgaatgagggagtcgtaggcagcattcatttaagaaatatttaaaatgactgattcttggtggggcatcatggctcacacctgtaaacctagcactttgggaggctgaggtgggcggatcacttgaggtcaggagtttgagaccagcatggccaacatggtgaaacccagtctctactaaaaatacaaaaattagccaggcatgttggtgggcacctgtaatcccagctacttgggaggctgaggcaagagaatcgcttgaatctaggaggtggaggttgcagtgagccaagatcataccactgcactccagcctgggagacagagtgagactccgtctcaaaaatataaataataaatgcaataaaatgaccgatttttaatatttttggagttacggatacctttgagacaagatgtttcctccaaaacgtactcacttatgcacagttttgcatgcaaatttaattacagaccctctagcgcacatccgtggacctcctacttaagagcctgtgttgtaaactaagacttcaaatgatccagtgtcattgaatagtacaagcacagacctgtctttgaggagtcttcaagtcttaagtggtgcttataaccatgaattaaaggattatcttgtacatataaatagctttgaaatgtctggcaaacatcttttaactgtacttacacattatgaaataaaatagggagaatttaagatttgtgagaactttaggtcaagatgaatcatcttgttttttttttttaaaaaagcatgccacctaaataacaatatattttccttttaggttggcacgttggatgtcttggttggcttgtcagatgaactggctaaactggatgcatttgtagaagggtaatgtacttatatgcatggagtagagcaaaatgggagacactattatcaggcttcatggacactgggtttattatcacatgtatactctgcttattggaatggttttagaaaacgacttttttcccttcgtatatcaattttatgaaggtacaatttacataaaatgcacctgtttgaaatatgaaaatgctgattctctttttactatctttaatgggatatagtttacatgccatgcatttcacctatttcaggtgtacaattcagtgattcttagtgtattcagacttgtgtaaccattgccacaatcagttttaaatatttcatcatcctctattcctgttcccattagcagtcacttaccgtccccaccacccacaaattgttctgccactatagatttgcttggtctggacatttcttgtaaatggaatacaatacgtggtcttttgtgactgtcttcttttgcttagcataatgttttgaagtttatcccagcagttgcatgtatcagtatttcatttctttttattactaatattccactatatatgtatacatatatatcacattaatccgttcatcagttgatgggcgtttattttgtttccactttttggcttataagaataatgctgctgtgcatatttgtgtagaagtttgtgttcttaaatgttttcatttttcttgggtatgtacctaagagtggaatttctgggtcatatggtaactctatgctttgctttttgaggaactgacaaactgtttcccagagtggctgtaccgtgtaatattcccgccggcagtgtatgaagattctcatttctctacatccttgccagcacttgttattatttttattatttgtctttttgattatagccatcccagggggtatgagataatatctttgttttttttgttttttttgagacggagtctcgctctgtcgcccaggctggagtgcagtggcatgatctcgtctcactgcaacctccacctcctgggttcaagcaattctcctccctcagcctcctgagtagctgggattacagtcacccgccaccacgcccagctaatttttttttttttttgtatttttagtagagatggggtttcaccatgttggtcaggctgatctcaaacccctgacctcgtgatccacccaccttggcctcccaaagtgctgggattataggcgtgagccaccgcgcccggctgataatatctcatttttaaaaatttgtgtttccctgttggctgatgtgatgtgatgtgttgagtatcttttcatgtgtttttttgccatttgtttttcttccttggagaaatgtctattcagatcctttgcccatttttaattggctagcctttttattattgaattgtagaagttctttatacagaatatgcaagagataaatcccctatcagatataacttgcaaatattttctcctgttctgtgagttgtcttcattttctttttttcttcttgagacagagtctcgctctgttgcccaggctggaatgcagtggccagatgttggctcactgcagcctccgcctcctgggttcaaatgattctcctgcctcagcctcccgagtagctgagattacaggtccctgccacaatgcgcagctagtttttgtatttttaatagagatggggtttcaccatgttggacaggctggtctcgaactcctgacatgatgcgcgtgcctcagcctcccaaagtgctgggattacaggcgtgagccaccgcgcctggccatgtcttcgttttcttgattgtatctgtgaagcacaaaagttttaaattttgatgaagtccaatttatttttttcttttgttgcttgtgtttttggcatcatatctaagacaccattgtctaatccagggttgtaatgtttttatgtctatgttttcttctaagagatttatagttttagctttcacagtgaggtctttgattcattttgagttaagttttatgtatgttgtgaggtaagggtccaacttgattcttttggatgtgaatatctggttgtcccagcaccatttgttgaaaagactgttttttcccctttgaattgtcctggcacccttactgaaaatcaattgaacataaatatgagggtttatttctggactctcagttctgtttcactgatctatgtttctctcctatgccagtaccacattgtcttgattattgtaactttgtagtaagttttaaaatcagaaagtgtgaattctccaacttttttttttttttttttcaagattggccattctgggttctttgtctttttgtatgaattttaggatcacagtgtcaaatttctgcaaataagtcagctggaattttgatgaggatagtgttgaatctatgtatcagttggggagtagtatcatcctaatattattgtctttatccatgaacatcggatgttactccatttatttgaagatggttatgcttttgtcttcaaaattcagttggaagagtttttctaaattgcagtttttattacttttgaaattcaggtacatgtgtatttgagctgaaaatggttataggctctttgataactgcattttgattagttggcagaatcagtctacagttccttcaactctggggatacaaagattttattttagagtttagatacacaggtgtaatttgtaaagtacagaatttggagactctcagaaatgtacatttgattgaagctttaagggaataataggcttggatagaagggaattttttcttgaaatctatccagaagattttctcatttctgctgttaaaatgcttttctgaattgatagaaccacctgaaagcgatgctgtggcaatagagactgaggtcagggttacagagagagagagagatcttttaatataacaccatgtagtgaggaagtaaacagatctaaggatgtattgatgttctttaatattggagtcaagaaggccacttagcagtttcacagtaggttagttaagagatagtaaaagctcagttgggaccagacacttggctcttagaatggaaagagaagatgaaaggaaaagcaacttttaggattataattccatatattcatatagagcaaattattattatgaattattataaatatagtgaaaataattatgatgcactcaaagcactaactgatggaaagaatagtctcttggttccttgcttatacatttttaattaagaaaaaaatgggccgggcatggtggctcacgcctgtaatcccagcactttgggaggccaaggtgggcggatcatgaggtcaggaaattgagaccatcctggctaacacgatgaaaccccgtctctactaaaaatacaaaaaattatccaggtgtggtggcgggcgcctgtagtcccagctactcgggaggctgaggcaggagaatgatgtgaactcgggaggcggagcttgcagtgagctgaggtagcgccactgcactccagcctgggtgacagagcgtgactccgtttcaaaaaaaaaagaaaagaaaaaaatgtaagggaacttttttttttagttgtcatccctggagtgagtcttccctgaggtctcatctacctcattacagttacaagttatgacaaccaaagagacactgagaaaggaggtccctgagaatataattattaacatttatttatacccttattagtcaccttgatggctttatagttctttatctttaaattgttaatgggatgtcctgaatataatttaaagtttgctcagattttaaattttatttatttttttttcagagacagggtcttggtgtcacccaggctagagtgcagtggtgcaatcatagctcattgcatcctggaactcctgggctcaagcagtccttttacctcagtttcctgagtagctaggactataggcttgcaccaccacacccagctaatttttttatttttatttttgtggacatggagtcttgctatgttgcccaggctggtctcaaactcttggcctcaagcgatcctcccacctcagcctcccaaaatgctgagatttcaggcatgagtcactgtgcctagccagctcagattttttagggaaggaatctgaaaagtattaaggacaaatgtagttagtttggtgagtagaatttaaagttacctaggcagtgtgtcagctgttcttttcttcattgttcggcaagcacatcttcttcagtcctcctgaatgataagaggaatttaaaaatcatgtcgttgttagactttggtagtattgacagatgatagcttaatgacttaaatgctccaagtgttaaaggccaaatattgtagaatatggtatatgtggtaaatcatagtttgtactttcttaaaaatgtaatcattagagcagatatttttgaggtgacattgtgtacattgacacagatcctcttgtaaataggcatacggagatcttgaagttctgggttatgcaacattacgtttataaatttgacaccaggtgattctacactctgaagtacttctatgggtaaacatgcaacattttagaatgttcgtagcaaatggttctgtttacaagatgcttgccaaattttatgagaatgatttgtcccttttgaaggaatgggtgaattttggagacataggcaagtatatgtataaacctcaagttaaacatgttgaagatttaggacttacatcattatttctgaaattgttctgatttttaggtttgagaccactcagcataggattgtcatttaaatttagctcttctgtcacctttcctggctcatattggctcttgtttaaactgttaacaagccaggcttgtggctcacacctgtaatccctcctgcttgaggggccaaggcaagaggatcgcttgagcccagatgttcaaagctgcaatgcactgtgattgcaccactgcattccaacatgggcagtagagtgagactctctcttaaaaaaaaaaaaaaatgcgcgcgcacacacacacacacacacacacatttttttttttaaggaaaaaaaaccattacaggaatttcttaatttgtcttccagtttcccctcctagctgttgagcatgtagtcatcagaatacttgtcctgagccctgtttcgactgtgttatgtccctgtctagagtgtggcttcagaggctgtgtatctgcaatctggcatcccactttcctagcctaagctcccctacttctcggcctgctgcttccatcagtctggacttctcaccattctctggatgcctactgcttttccacctcttatcatgactcataatatgccccatggcaacgatatgctttcttcccatgtaatcatccttgtaaaaccatttctgtccttcatcgccctactcatgagcctttgggctttcttgattgggtagctgctagtgatccctttttcctttctctctctctgtctgcaacctggcaatctcagctggcactgacctcagattgctttgtatttagtaatttatatatttttggatctttccaatgagattttaagcaatgtgtgaaggtagtgattttgtcttgtatgattttgaattccacccagggcctagaggcagacatggaataaggaagagaacgctggactccaaagtcaggacaacatgtttctagtcacagctctgccgttaactggtcttgtgactttgaataagccacttattcttttatacctcagtgtcttataaatgaaagaactgacaaggtcatatgtaggtgacttggtttaggttggtgcaaaagtaatggagtttttgccatttttttcccccctaaagtaatggccagaaccacagttacttttgcaccaacctaatagttttggcattatggcttcctctatagcatagctccttgtaaatagtagatgctcaataaacagttaatgaattaataatgtaggacttagtttttcatcatgactattgcttacgttctcttgcctgtcaggtccctttcttcctaagggaaagcacagtgtcttgcatgtcataggaacatagtgaatgctagttctcagcctcctcctttgttctcagtccttaaattgtctagtttcttggcatataaatatatggctatttacagactctttctcactagcttcccatgacttactttctagactaggagacacattgcatgtagtctccttaaaaccctacagttactctgttgatttttgcatgtaacaaagtcttggtccattttatccttaaaacattataaggtaagatccatttattgtgtattatatggatagatataatgggaacatatagtcaaattcatgtctttatgtaatatgttcattgtatagaatggaatttagatctttttcctgagaatggttgttgatattttttcttccccagagtggttaagaaagtagctcaatacatggctgatgtattggaagatagcaaagacaaagttcaagagaatctgttggctaatggaggtaagctaatgctcatgattgatcattattaactcatacaaagcaaataactaagctacagaaacaaaaagtaatgtaaaaaagtctacagaaaaggacactaaatacaatagaaagccattaaaatacaattattattactgaatttggtgatacttccaggtacatcctgttccctgaaacataatctcatagaagacagtcttacataatatgtaatatagcttataatatgatgccaagtctcctgcaagagcagtattgtaaaggtttgtcttagttctttccaggttctatttattcactcatttacaagtaagtttccaagttgtatatctcagcattgttccagttgaatacctgctgtcttatgtaggtttttgtatttaatagtatgtaactgttaaagctttagaacagaaattattaattttattgcagaatagtgccccctcagtatgattttggcatttctttacttaatacccgtaaaatagcctactgacttctctgtagctagaagccagtatttacatagagtttgctctatgtagtaatgactttagaaagatgattctgaccccattgttgtcatttgtacttgcatttcttgttttcttatgaaatgtcattttagcattttgcttcatttaaaatcagcccatctctagtgatacgtttttataacaggaaataatgagctgggcatggtggctcatgcctgtaatcccagcacattgggaggctgtggcaggaggatctcttgagtgtaggagttcaagacaagcctggacaacatagggagaccctgtctctaaaaaacccaaacaaaaataaagaaaaagaaaaaagttacctggaagtagtggcatatgcctgtagtctcagctagtcaggaggctgaggaggggggattgcttgagcccaggagttcaaggctgcagtgagctacgattgtaccactgtactctagtctgggtgacagagcaagaccctgtctcaaaaaaaaaaggaagaaggatataaccctttataaccttttcctttcattctctacaggatcacctactctaataaggttactatattttaaatccagtgttcctgaaatctcatttcttcttgcaaataatagctgctcaataaatttttaatcagttaaaaatgtagtaacttattcttgctctttgttatcaagtaattctgatctcattgtttgctgtgtctgttaatttgtgttttgagaaacaacgaaggtatgttagatattaataagttaatttgtgttgcctttactgatcttctacgtattttatgaactagggcagtcagtctagtaggtggaatggtggttgaccaagaggggcagtgcatctagatagagttgcttttggaaataccatccgtgttgttgactgactggtattatgtaaggagatattgagaagagaaagatatttttatatgaattacttccgtcagttggcgctgccataattaccatttggtttcaccgttcttgatccctttaggggtgaagtcactttgattactaaacttccaaggaataagttgttgagtatttttttagctctacatgttttattctttccatttgaaagtgaaagggtccatgttttgaaaattgttaaaatgtggactcctggaaacaatcatcacatggttttaacagacaagtttattttcagtttgtttgggtaagttatcaaagaaagaacatacttttatgaaattctacttattgaggagataatttgaagtagtttcttaatctttatgtctcctacatatgaggcatattaggaatatgtacatatttcatttttaaagtaatcaaattagaaggagcatcttaatatgtattaaagtttgagtaaggagaagagattacaaggtagaaattttgattaatccatgttacttaatatagttcacatttaatcaggattcttcagaaatgacatctttgctgatttcctcaatgccaatttcagcattaaaatatatcgctgtgtaaaaaactgaacaattctattgtttttcttcagtaattaatttattcccttatttcagtggacttggttacttatataacaaggttccagtgggacatggccaaatatccaatcaagcagtccctgaaaaatatttctgaaataattgccaaggtaagataatacttgagacaagtaggacacattgatttgtagtggctttgcttattttataatttcactatgaaatactttttaggttttgataaggcaacttaattatatttcacagaagaaatccttacaacttagacattaaaagatgttaaaaagtataacactttaatgtgtagattatctaagttgaatacttagttatgtaattaacttaaatattacatcaacagtgtttaagaaagtgtgaaaattctgtatttatacaaattttaagggtacccaagattgtgtagaataggaaattggagtctattaagatttcttagtcattcaggtaggtgatagtagtcactgaagtatgtttatgtgcatacaatacttgttcaaacattaaactctatggattctctgaccccttcggactatttagttttgatcctctgcctggaaaaattcccgtattcgtgtgccacataattttatgtagtttcagggagtacatggaccttgaagccgatgcatgaacccaccaagttaagagctccttttatattgagaaatccttgaacttgaaaggaaatcctagaacttgagaggaaaaaaaagtctttttccccccaagatctgtttgtggaataaaagtcttaacagtaactataatgagacaaatagacaaggacctgttaattgtttgccagcatttgacctggctggggcaagaagtgtagtttaaattattggacagactttccttggctcccagtaactttagttatgcggtgtgctgtatagttaaatgtaaataaatagactatcaaagattttaactaaagtcatcatgtaatttgatgactatagtttaagaaactattatttacattacttgataatataaagtggtgttcttactatgactgagcctttttttctgtatccttaaggatttgatcatctgcttcctgatgctgttgtagataggaaagcaggcttagagaggtgaagtgacttaccctcgtgctacacagctaataatgctagagctatgttaaagtcagttcttcgaatgttgtttacttcacattttctccccatgtagttagtttagtattcttctgagaaaaacagcttttgtaacatttatgaataaattcaactataattttaatttcatagaaaaatactctgtgtaatagtgatgtttgcagtagtcaaaactcttcatgtaatttagtttactttggaaaatatccttcagtcttgtgaattgaagccttgtaaatagtaatctccaaacccagtggcctagattccatttccatggtttaagaagtaatataattaaaatacatgtggactaaaacattatttttagttgaaaagatttatgtggaaattatatttaaaatgaagtcggctgttttttaaatgacctcctaaagtcgtgcttttaaaataatagaatattcttacactagaaactagtgggtttttttgtagaagttaaagtttagctactttgatagtattagtagaggcagatttaggaaaattttatctatttttcttctttttctttttcaaagggagtaactcagattgataatgacctgaaatctcgagcatctgcatacaataacctgaaaggaaatcttcagaatttggaacgaaagaatgcgtaagcagatcaagtatatttgagtactaagaactggggaagcatactagcatgcaccgaaggagatattgttgggatttagttagtttcagtttatgttgttctgtaatcaaaatggtatttcttttacttcatggagaaaagctcactaaggtaagtttatagaattcagactagtccaaacagatgtgaggctgatttattatacttgttttataaataatacttgtgaactgggtcctggcttattcctttatccatttgatatttcactgaaaaatagtctaaaattaattgttttaaatgaaatcatagtttaactgcatagtaattacctatcacttaactatagaataatccttttatgatgtaatagttattctcttatctgttttcagaatttaggtttttcacttgttaggttttttaaaataggactgaatttttttggttgatccccttgtactatgactacttcaagtgcaactttaagcatgaaagtattcaagttgtgccttcatatcctagagggaaagttggttggatactgtgagtgatacaaacagggcaagacatatttattatgggaaagtgattactggaagacaaatgaggactgatttgaaagagttaattattgggttagctaccaaaattgcctagtatcaaatgatacccaagggagggaagaacactaaaggtattgtgcttagatgacatagtttcataattatatgatggaatagactttaattgatatctaatgagtagatagttttccagtcaagatattatatatgtaggcaagagaagagctgagttataataattaaagcaaacacaaaacactagaggcaaattttggtagaagatatttcgttggttgcaagggtaggatatattcagctaaatggtgacttcttacaaagtaaaaatgttgactaagactaatccctctcaatgtatatatagtatatgtgaaaatgattagcctgctgtttctttacttgtgttacagaagcacataattatcagcctaatgatttgttttaattcctcagaggaagtttgctaactagaagtctagcagaaattgtgaagaaggatgactttgttcttgattcagagtatctcgtcacattactggtagtagttcccaagtaagtctttctattataaaaggttttacttgttaaaatacaagaaaaatgttagtatctagtattgtagtttgaagttttccataaaatccaagcgtaaaaggaatataaccttgccattcattctgtcatcaacatttgctcatgtggcacataaagtagaaattagatcataacctggcaatggagacttcagttataaattgagtttccaaatcaaatttagcagcttggtagaattggctcattcaaacataagtaatgctaaattattgattgtttaaaaaatacagattttagatttctcaaaataggaaggtctttgcgtttttttcctgaaaaaatctttatgactggttaggtttaattaagcactgtaagaagcaaagaatggattagatcagagattagcaatttttttctataaagggctagatagtaagtattgtaggctttgtaaacaatgtgatctttgtcacaactactccactgtggcaactttgtggttatagctgaagtagccatagatgatatgtgaacgaatgaatgtggctgtttcaataaaactttatttacaaaacaggcttggctatgggcatagtttgctaacccctggactagataacctttgaaatctccttaggattaggccttctatgttatttaatatttgatcatagttaatcttaaatgaaatgaaacctttgggtacttgtaggaagacctggactttgtgtgtgtctgtgtagcactattaatggtttcacttttgacttacactgagtcttgctatcggggaatgtttgggggatccaaactcaggtgggagatttgggtctttttcagagtatcattgtgtgaagacttccttgctgtgctctgcatttttatctggttcagagatttggagtactagaaaatgatgcctccatggaatttacggtggctacagtagtatctcaattctgcatttttttcccctttattgcagtatgctggaaaaaattttggatttttctttgcacagggagaaggccttaaatctaaggatttcactccagaaattttattttgtgttctagttacataactcccgtctgctacactgaaacactgattatttataacaaattctgtgtatctgtgcttttatactatgtaggaaaataacttttgcccagatgaaatatttgactcactcaacctttatttaaaacttgggttcaaaaccagaaatttttacagttttctgtaccttgtaattgaaacataggacctaggacatcttacatgatgaattattctctattctggcctatacacactataattctttgttttcaatctcaaacatagttgtctctccccacacccctggaagccagtggcctctagagaaggttgttgcacaatgttttgtggcaacatagtttactgtcacttcatttacttactacctcatggtactctgtgctttccataaatatagttttttttcagtccttcataatggccactgagcaggaatgatagtgattttagcatgaccatttttaaaaaatgaggcacaatacatatgaactatgcagcttgaaaacaatttagaatctatactgtgctttacttcctttccgaacatagttctaggatgtgcctcttttgcaatagttactggaggtagggtggtgatctgtttttcctgcattactcagtgtatttgaaattcattctcagtaggaaacccgaattttttttgttaaatagagttgaagtatacttactatagccagatttcctatttgtctcataattttttctcttcctggatatggcaggaaataggacttgtttttcttttccaatgtgtattgtaccttttctgcaggttaaaccacaacgactggattaagcagtatgaaacactagccgaaatggtagttccaaggtctagcaagtaagtagaagtctttgtaaaaccatttgtttcctagaattccttttagagtttggatgttggcttaggaaatatgtttgctgtcttgcctttgtgataaattaacctcatgagtgagttctatgaactctagttgtaataattttagacctagaagggacttggcacagtctgtttgacaacctcctgtttatagacttagaagtttgaggccagtgaggtattaatagtttgcccaggatcacacatctcatttgtggcagggctagaactagaacctaggtctttggtgtggtactttttctgcctcactgtgctgccttttgaaaattctttattcattattgcatacctactatgtgtctataattcctcattttacttggcaaaggaagtgtaccagaatggctactggactgccgtgttgatctccagatgttcaccatcactttgagcttagattttacctaatttgtgtgttccttttatttaaaaaacaaacctgtttttattaagcactttttaaatttatagatttaacatgcattgtctaatttgaaatttacaacaagtctgtgaagaagtatggacagttatcattcttattctcatggaagaagaagttaaaatgcttaaatagttgcctgaggcatatggctgtgtaaagtgtccaatggcagagttagggctagaactcacatcttttagctccaggtcctgtacccttttaacactattccatgtcatttttctgtgttctgccattgccacaccagatattctttgagaaaatataaatacagtgtatctccaccccaaaggattcttatagatatatatgtgcttcaaggggaggcagcagggtggaagatataggaggcagtaaagaagtggaattagtaaggtcaggcccatgaaatattttcttttccagtttcattgtgtcatgtgggaagtagcttagtatgatggaaagagtcctggacccagggatctgagttctattgctggttctgtcaccagtagagtctgtcactggtagggtccgtcactggtagggttgtgacttcgagttgtccaggttcttggtgttttgaacaaaaaattggacaaaatgcccagcaaagcaaaataagaatgaagcaacaaaagaacgaaagcagggatttattaaaaatgaaagaaagtacactccacagtgtaggagcagacctgagcagtggctcaagggcctggatacagaatcttcttgggtccaaataactcctacaagtttcccattggccacttcatgctcacctcatgtaaatgacgtggtagcctgcagtgagcctcattggttgcagaaagcagccaaccagaggctgaagtgaagttacaaaggtcacactcctgtgcaaatatctgattggttgcagaaggcaactaatcagaggctagggtgaagttacaaagttatacttctatgcgaatgaagactcggcctcccaatcagtctgatttattgcagacagccaatttcccatctgccatgcaggaaaggtcaaaaggagtagcctctggtccttttgttacttaggcgtggaaagttagggttttcctttcaatttagttctaggaaaccggggtgaaacaaccttaggttccctgcctccagaccctatttcctgcctcagttctgctaccaacttgctgtgtgacctggggtaagtcttttaacttctctgggcctcattttctttgtctgtaaatggagcatagcaccttccttgtatatattatgaagttattttaagacttaatggagtattcaaaatacaagataatgttactgtattttcacaaatgttgatcttttaggaacttaacaacaaacttgtgctcatcatgaatgttttttttttcatttggaggaatatctttccttcataccagctcttcacatggtaaactgaagactacagttgtgtcttgatattggtggctcacttaggctgttgatactgacagatctttagggcattagagccgtagaggttgactctgtgtctaggacgcaggtagaggaggagagtgaggacgtggtgcacacagaatgtcctccagagatggacatacgccaacccagatgtccagggggatggtctgtaggctcattaagtaagctcagatttactctgatagaaagactttaaaaatattccatcagagatttagatctttggacagtcactttagtagtttaaagggcaaatttcaggaagggaacagtttaatgcagtcaagacttgtttgcaagtgacttgtaagtgcacactaatcttccgagagcttccagcctttccttgctcagtgaaaacatcttttctacctatttctcagttcaaagtacatttggaatcactgactcaaaaacttacctgtttaaatttagtcagagagaacatagcactagctcaaatagcaccatcaagagtatgtgcagttcatgtaggggcaaataggcttttttgagtgagcctggaatattgtctgccatttaggaaagatctctatgacctgatgctgaatttttggcttatcatcacaaccagcatttttgagtaattactgtgagctagtctttgttctatgtgctttacacaagttaattaattataggtagtaacacattactttttggtatgataacttgagtgattattgttgggagcagtgaagatgaaagtggaattttgaggtagattgaaaaatattcactttaatattcaatctaatatttttcaatctattcttctaactgtcctcaaacctgaaagaattttaaagttcacaaaatataactatttataaaatattctacaaagattggacggttttgaaatactaccattgctgtgaggctaaatgcagcaatgtgtataaatgccatgccaaggctgtggccaaagaagtggaggctgtgctgctgttctgcttttttttgttgaaacactgttcagaaagaggtgcttttcacttgtcctttcagaattaccactttcctattttttttttttttgtctgcttttgcttgttaaaatagtctgattgagtcagatcactggttaacttttgccttttctctgtcattggaagcaacatcacaaactcatggatgcttcacagaggtttttctttagggatctggagtccccagtgaagcagaggagcctagctaagaagtgcaggaagaatgatactggccactgtccagaagtttctctatgtttcagagtttctgagggagatggtctgttctcctgtcagtaccacttcaaccacacccatggctctagcctcacctgcagttttcggactgctaaatcttcgtctgtagccagccttccccccaaccacatacctggttcctactggaccactccatgtggtatttcctaggtaactgacactatcaccccaatctcagactcaaactctctagttgccctgtagtatatggcagcaacatctgcccagtgatccaaaccgcaagtgtggtagtcagtgattttggaatcttcctttgcccttgcacccccctccccccaccggccccccacctgaaatagtctaatcagttatgtcatttccaccttccatagtatttggttgaaccgttaaaaattgatgttttgtaggtcagaaaatggtcaaatatctacaatttcatagggttaaatctactctccccactcccccaagacccactgccactgctccagctctgactccctcatcccttgcctggaccatggtaattgaccctagctggtctccttttctcctctcatcagtcctccacattgctgctgttttcatctttgtgacatacaaatgtgttgctttcccgtctaaaaccctgcttgtccctccccattttgactgcctgcccccagcaagcacacacacacacacacacccacacaccctcttcttgtaccctatgtcccagccatatatgtatatatatattgtttttctttctttctttttttttttttttgagacacagtctctctcacccaggctggagtgcagaggtgtgatcttggctcaccgcaacctctgcctcccgggttcaagtgagtctccttccccagcttcccaagtagctgggattacaggcatgtgccaccacactcagctgatttttgtatttttagtagaggtgaggtttcactatgtcggccagactggtctcgagctcctgacctctaagtgatctgcctaccttggcctcccaaagtgctgggattacaggcatgagctaccatgctgagccccggttatacttatttctggcaattcctcagatgcaccatgttattccacatctatattcatttgcatatggggttctgtctggaacgttcttctcttttttgtctttctttcaaacttccacctggtatcaccactttggtgaaactcctttgaatcccctcagataaagttactaattccccagtgtatcatgtatattttctattgcagcacttacaactctatattgcagttacttgtgtatgcctgtttcctttactaaacccatacctggagatcaggaaatgctgtcttagttttatactaatatctagcaagtgcttgcattacagagtctcagtacatgttaaatgactacaagtctgttatagtaaggactcgtggtttattttttaaacagttttaagaaatacctttccttaggggaaagagggaaagcaagtggcttttatttgtttttcataataaggtggcatagtaggatttagttataagataagatggaggttttatcttggcttttttcaccattaggattttgagtaagccataggaatttgctgtgtcccagatctctgcacaatagctaggaacctgcttaataggtaacctgttcattgacacagggccatgtcaagcaccaaatgcttttggaagggtcttcaaaacagcaaagtgttggataagtttaaaagattactatgataacagtaaaacattatttgtggccctgaaatagcctgtcaagttagatttggatttgttttgatctcaagcagttcacacatcactgagtaaatcttggcaaagcagaagatccttaaacggttttttaaatcgagctctgtccacttggtagctgcccttcattgggtttgatggacaccaggagcaagaattaagggtaatcattttgagaagatacagtttaacaggaggttctaaatccagagtacttgagttttctctgcatgtcagcgattacagtgatcagtactcctggaggtctgctggtcatacactagggaggtgcccctgctggctggctgacgaggagtagggtagattcagtacttaaagccattctgtgattaacactgtaattgcctcctgaatttacttggctaaacaggtggttcttaggcttcaggaaaaactacacttgctttaaacatttttttaatatagtatctttaaattccccagcattcctccattttgtaaaatttcctttttctgatttcagaagtaccacattgtaaaactgaacattaaaaaacaaagaaaacaaccaacaaaagggcacaaggacccttttggtagtgaggggtatgtttattgtctagattgtggtgatggtttcatgggtatatgcgtatgtccacacttcagattatagacattaaatgcgtacagttttctgtataacgattatatctcagtaaagctgtttaaaaaacactaaacattagaagaactccagtatgtgaaagacagaaaggagaagagattcccctcagtaacattcccctgccccaaggttatcgctgtggaacagctgcctgtgcagccttgtggacctcacataaggacttctatacaggaggcactataggtaaattctgaaagccaaatttggaccatactatcacaagcgataccattcacctttcaaacagtggactttcacccaaggtattacagatttaaatgaccattaaaattacctggcagttgtgtctggaaaggtctttctagtgatgtccatggagctgtgactgaatggaagttctgacctcactgggaccttctaaagcctaaaatggagccatgagatgcatacaggcacttttattcagagattatttagacagttgtgttcatcagggttttttttttttttttttttttttttgacagggacctcactctgtcacccaggctggagtgcagtggtgcaatctcagctcactgtagcctcaacctccccagctccagtgatcctcccacctcagcctcccgagtagctaggactacaggcatgcaccatcacgcctggctagtttttgtattttttgtacagacacagtcttgccatgttgcccaggctggtctcaaagtcctgaactcaagcaatcacccacctcagcctgccaaagtgttgggattacagacataagccactgcacccagcctgtcagttttttgattgagagatgttatgggagcaaaggaaagatccaaggtttaaggtactggcaatgcaagagaggctaggctgggcatcagtggggctgagttggcctggagaaaaggaagaaagaattaggcttccagaaaagaagagtgtgctatcaaggagacactggaaacaaagcagcttggcgctgatgttgattgaaaagtgtggttcttagcgtttggatgctttactggagttaatgtctaattttgttggttagtaagaaataaatgtagagtgttaaggtatcataagcaaaataaatcataaacattcagtatcttcggtgtttgaggcaatccagattgaaaagcattgaggtgatttgggaagggctattataccctacttttctcttccacctgtttctgaattttgcccttaatatgaaagacagcaatacgtataaatctttaaatggactttttttttttccatagtgttctttcagaggaccaagacagttacctgtgtaatgtcaccttgtttaggaaggcagttgatgacttcagacacaaagccagagaaaacaagtaagattattgtttttttgtttatttactttgttagatcagctgtatacaatgtgaacaattttgttttttttcccccaaatttagattcattgttcgtgacttccagtataatgaagaggagatgaaagcagataaagaagaaatgaacaggctttctactgataagaaaaaacaatttgtatgtgtttttaatatttagtattatcagtactaagcagaagaaaaagtggtattgctttcctttgatttaaaagaaagtaaaaatctgctttggttttaagacatttgattttagtttttttttttaattgaataatcagaatgaatttcctctaaagcttaactgttctagagataactattctatttctaagaaagctttcttctaaagcttatgtctatctgagatagaatagagtagatagaatagttatcctaaaatacatacttaaaaagaaattactccacctaaatccatatcagacattaattttaaatgcagtattctggttaacatccttgtaggtgaagggtgattttagttaagtaacgaagttcttttcagtaagacttttcactttcttgaggcagattttttcaatgcctcaatcttttattgaagcaatttgtatttaagctattggagaattggtgtgttctaggtgtaatgggaaacgagtggaattgtgaaaatcaaagatggtgttaactttcttgccatcttcaagtgtgggattactgtgaagactaaaagcttgtttggaaagggaaacataatgagtgaaaatgtgtttctcttaataatgtaagaggaaattaagggaaatattgaaaattatttccaagtactttataagccatatcatctcaactaggaggaaactcattctaaccaagtaatgtcaaaataaccagctttttagggcaaacccaaaatccttttaaaaaatagatattttgacaagattttcacttgttttgctatccttttgcttaaattaattgtttggtacatccaaatgagcctaataatgttatccaaggaagtgttagctgaatcttttaagtatggagagaggaggtatttgaaatccgcttaatcctactaaatatttgaagtttaaaaagaacttaacgctatataatttagaatgtaaagaggttttagatgtctagaccaactcccttttttacagatgggaaaactaagagctagtgctgttaaatgacttgcctacataactgtttatctttgttactaagaagttgtttgtaagttgaatttcattttacatgtattaaatgttttagagtgttgtgtagtaaattcagatctttatattttgattttccaacctaaggcatttctatattttgtaccattttaactacttttattaaaatatatacctttttctgtgttagtgaattggttcaatgcattttagtgtctgttgagatctctctgtagtggcgaaccttttaatctaatttaagataaggtatctgagataatgagaataatagtgaaacatgtagaaagtgaattatgcgacttaattcttctatagattcctaataggtagtcacttaaaaaaatatttggtctatctaattgctatttctaagaccaaatttgtggtaattttttttctttttatagggaccacttgtacggtggctgaaagtgaattttagtgaagcatttattgcatggattcacgtgaaagcattacgggttttcgttgagtctgttttaaggtaaagcaagttaattgccaaacttggaactgaagagttcatagattccttacattggacctctttattataacacagtccagcaataggaaattgatttggagaaatcaaagggccaatcatgagacagagattatcagtatcatcatacagcttataaaatgcatattagtcttgttctttagcaccaggtttagaaaaagagatttatgctgccataccctcaggttctttttcttgtgtaggtacttaaaagtagattaaatattaaccaatatttgtttaaaaggaagatccttcaggtgttttatatgtcattggatacatagtatgctaatgacttattgaaatcatttcatattaacctaaagtattttaatattttgagatatttaaaaaatcatattctggtccaatgtatgggttgctcatattagaaatagttttaaaaaacccaaaacttggccgggtgcagtggctcatgcctgtaatcccagcactttgggaggctgaggcaggcagatcacgaggtccgattgagaccatcctggctaacagggtgaaatcctgtctctactaaaaatataaaaaaattagccaagtgtggtggcacgcgcctgtagtgctggctacttgggagactgaggcagagaatcacttgaacccaggaggtggaggttgcagtgagccgagattgtgccactgcactattgcaccactgcactccagcctgggcaacagagcgagactccgcctgaaaaaacaaaacacaaaacaaacaaaaaaacaccccaaaacttacatgtaaccatgctgactatttttaaattttttcaaattttcaaactatatgtgggtaacctcatgctattaccataaaagtatctgctgaccttacttcttcttatttcctgaggatattcatatattaccttaaaaattgaatggtaagccaggcgtggtggctcatgcctgtagtcccagcactttgggaggccaaggcgggcagatcatgaggtcaagagattgagaccatgctggccaacatggtgaaaccccgtctctactaaaaatagaaaaatcagctgggcatggtggtatgtgcctgtaatcccagctactcaggaggctgaggcaggagaatggcttgaacccaggaggcggagattgcagtgagccaggattgcaccactgcactccagcctggcaacagtaagaatccgtctcaaaagaaaaaaaaaatgaatggtaattgaagtaattcctagtaattggcgtagagatttctagtggacagtggggaccaaaggtttgcgtttctgtttatattgaagttttttgtgtatattagtttcagtttctatatatattagttgaacttgtaaaggtaaagggagatattctctccccgttaaccatgattaaagagtatgagaatatttgctttgaaaagaaaatctctttacatgtttgcttgtattgcgtactgtatttctgcttttttgtaaggtatggcttgccagtgaacttccaagcaatgctacttcagcccaataagaaaactttgaagaaactgagagaagtattacatgaattgtataaacatctagacagcagtgcagcagctattattgatgtaagtacttattagcccagtagagtaagaattgaagtgaatttcagaaaaaaaatgattgaaagaagatagacagaaaagggagggtaagtatgaaacttaatcattttttattactttgaggttctcaatttgttatgtaaacatagtaatttacattgtttaccctgttttatactaattatatctgtgttttgcttcttggcatttctacaagctagtaattatcttgctgtgtatcagatgtttatagctgcagaaatacagaaaccagtgatactagttatttacaaaaactataaattgcagagaggaaggaaataagcagttattttaattttatttggtagaagcgatagagtcaatagatgagtattttcaaggtaggttcatttttctaaaatggcgtagctgggcgtggtgggacatgttggtagtcccagcaactgaggaggctgaggcgggaggatcacttgagcccaggccttcgagaccaacctgggtaacatagtaagatcccatctgaaaaaagaaaaaaaaaaacagaccaaaaaatgtattatgtgtttatatcttcttttaaacaaaactgttattttttaaacaaaagaagatataaacagagttacttgtgtttttttgttgttgctgtttaaaattgtagtgggccgctgggcgtggtggctcacgcctgtaatcccagcactttgggaggccgaggcggggggatcaccttaagtcaggagtttgagaccggcctggccaacatggtgaaaccccgtctctactagaaatacaataattagctgggcgtggcagcggtcacctataatcccagctactcgggagcctgaggcaggagaatcgcttgaacctcggggggtggttgcagtgagccaagattgcgccactgcactccagcctgggtgacagagggagactccgtcccaaaaaaaaaaaaaaaaaaattgtagtgggcttttactttatatttctggttttaaatatcttgctgatttttttttttctctttaaaagtttagggtagatggtagcatctcacataggcattaattagaactatgaaaaatcagtttttcttgatagaaggaaatgcgggaaatgacttgctacactttttttctttttctttttttttttttttttttcgagatggagtttcgctcttttgcccaggctggagtgaagtggcgtgatcttggctcactgcagtctctgcctcctgggttcaggcagttctcctgcctcaacctcctgagtagctgggattatgcctggctaatttttgtatttttagtagagctgcggtttcaccatgttggccaggctggtcttgaactcctgacctcaggtgatccgcccacctcggcctcccaaagtgctaagattacaggcgtgagccaccttgcccccggccaacttgctccactttcatgcaattgtggataaaatgagaggtataattatttgatacataaatgttctagcagtaaattcttataacatgcatttataataagtgttatccttgcttgttttttggctctgttgctcaggctagaatgcagtggcatggttttggctcactgcagcctcaacctctatgctcaagtgatcctcccacctcagccttccaagtagttgggactataggcacgcagtaccactgctggttaatgtttttatttttattttttgtagcgatagagtctcactatgttgcccagactggtcttgaactcctgggctcaaggccttggcctctcaaagtgctgatattacagaataagtgttacttataaatcatacttgctttatttttactccatattttgtaagtcttgtatcccatcaactcagtattctaagtccaagatttaaaaagttaatttttacagtatacataaaaaaggttggtgggatcatgctaaatacatatgcagtcagaatgcttgaacctggctttaccactcactgtctgtgtttcctaggagaagtcagtctttcagagattgttttctcatttgcaaaatgggaataatgtctaactcagataaattagccttaagtgcatacatttagcccagagtagatgttcaataaaaaggtaaatgttaatacttgctttctttttttgagttctgtaaatacaaaattgaataattgtctgttttttccataggctcctatggatattccaggtttaaacctgagtcaacaagaatactacccctatgtgtactacaagattgattgcaacttgctggaattcaagtgaaaatgggctcctcccccgacaatcctgtccttgtgtttgtgtgtgctaacagaaataagttgcagtatggtcgtacttttaactctagtatcctttgcttgcttcttaccccctttcctaggtgaattctcccacagtggtctgtatctcaacattttctttttaaaggaaaaaatatatatatatagtttctttttattgatcaggtctgtaaatgtgtactaaaaaaatcagagtttatttataaacagaatagtttatttaaagagaaggtctcttccttattgatatcatggtatgcattaattccatttgttactattgtgcacaaaagccctgttcacaggggaatggtgtaaacatttatactgttttgttcactgtatttagtagacataactgttgaatagttactgaatcatgatgtaaagaatatgtgaccatcttcaggtatgggatttctgaacgtttcaaatttcaatcaatgagcactgtcaacacccacaggagagaataaaattacctgtgcaaaggtgtattgtggtgtgtgtaacttaagattacagttctgtttgagagttaaatgatgtcatagctcacttgctatgctgcttccaggattttgttatatgctgaggtgtaaccatttgtgttgtctgactttcgtatgatttaattgagccaaatttgggtcagaacacaaatttgaagatgacttttcagtatatgatgggtatttacatttgaacactagaattttaggtctctcaaataattaagaatagagccagttttgaataaagtctagcagaactatgcagctttagtcatttgttttgtctaagtctgtattttatgtgttgtcttcttaagatctataattttggcatttatgtcatttgtgacatagtctgaaaatagagacattgttggcctttaaaatctcagaaatgaatgacttaatttagtgtcctgaaagagcttttaaaagaggattttgtggcaatgtttctcttactatgtactcacaggtttgcaaatgggaaaaaagtttacatttcagtttaggggcatatctaagctatgctattccctttagaaaattagcctccaaaatcttttgtttcaaaatattatattatttcataaataatttcaagcaaatacagacatccacaatgtagaacatgagagaccccctccctcaatttcaacctcccaagggaagtttatgtatttttctaggcccttttctatgtctttacatctctgtctcacacacacacacgtatacacacacacagtttatttttaataaaataggattatactacacacatcctgtcacttgcttttttgcttaagagtatatctaagagaatcctttgtgtcagtgaagctggagctacctcattcttttaactggctgcgtggcgttccattgagtgtctgtcatcatgtgtttagccgagtggatggatagtctgcttgtttttagtttttgctcttaacaaacactgctgcagtcagcatccttgcacagatttctttgtatacttgtattagtatttctgtaagatctgagaagtggaatttgtagggtcataggttatgtacacttaagtttttgacactcactgccaagtcatctgtcagaattctaaactaaagacatgtttggagtgtggatttatcttcagtttttctttggacaagaggaagctgtgaaagattttgctatcagaaaattttggttctttgtcttttgcacatgttctttgagtcttagtatctgtaacgtggcgctactctctctatcatgggggggcatgttttgacattaaattgacttttaagaaaaacatgtcactaacctgaagctcagccacacagtgacttttaaggttttatttagactttactgttgttctcatgagagtaggtacagactgcataaggtttagaatcccagcatatgtctgaaacgacgggactttcactgtgatttccaccagagaaattatagcagagtggctgagcatgtgctctgaggccaggccccagctctgctgctgatgagctgtgtggtcctgggcagagtggtctccgagttccagtccctcctctgtaaaatgggcatgattagagtgcccaccgcattagggatgttggggtgagtcagtgtgaccccacgtgcacagaaagtgctgcgagtggtgcatggtgagaggttgatgcaggtacttagcccttggggaacacaggtagttccttttcactgtgtttaatttgggaaaatccagatccacatcattgtagagtctgagggttagaaggaagtcattgtgtctaacataacaacagagcagtttgtgtcactgagctccagtctgtgctggattattgatattgttggtggcggtcaccattcctggaaagggactgtcccaagccacttaccttcccgaggagtctgctggttctccttgaggatagtgcttagataacagactcattaaacatttactgagtgtctgtcagggatcattcacatccacatcatcctcccggcccctccccgtgttgttcatggagggagtactggcggtccccattttcatgtatggagacttcaggtgaaagaagttaagtgaattctttgttgagtcacaaattttgagccagtcagaatttgaacctaagatttttgactgctggttgtcacacttcccgccccacactcaactgttgtgtgaatgagccagacacattgcttaacctgagtccgagatggacaatggtataggaaagatattcggtatggagaatcagatgttaacttgtgttgctatttttgttttgttttgttttgttttgtttttgagacaaggtcttgctctgtcacccaggctggagtgcagtggcatgatcagggcttactgcagcctcaccctcgatttcctgggctcaagcaatcctcccacctcagcccccaagtagctgggcctacaggtgcgcgctaccacgcctggccaattttttaaattttagcacagatgaggtctcactatgttgcccgggctggtctcgaactcctgagctcaagggatcctcccgcctcagcctcccaaagtgctggtgttacaggcataagccaccacacctggcctgtgttgctattatatttggcaggaacccagagtccagaacatttcatctatgatgggttagataatgtgtctagttgtttgcatgccaatttcagtagcctcagttattcaacctaggagatttttctacctctttactaccctgctgaagttgctcttcagcagaaaatctttgtggaacacattccacactttgaaatcttcgtggaacaaaagatatttgtggaaccaatctttgtggaacatattccagctttttgaatgagtgcatatccagtagtacctttaaagtaacactttgtacataacaaatactcagcaaatgtgaaactttatttgctcttacttcaaaattagtccaaaatgttggaaataaaatataagacattgatctagatatgaggtttttctccttcattctcagctgtcgaagaaatcaaagtagcatatgcacaaggttaaaaaccacatatacaaatactatagaacagcttataatgaaaaccttgcctgcctttataaaaaatgtgattatcttcttctgttaatgtcaataaaagatggtttgtcctagaaggtctataaatggtattatgttctggaggaaacctagcaaaaactttgctagtttagtacttgtctctaaattgatgttcacccatttcaatattgcacttattaatggtctttatttttctagcatagataacaattgattctttagattcatatatggaggtaattcttgctttctaaagaaaggaatatggcacattggaaccattttattcaccagtggatttacccttagagtatttttagatctgagctgatgacttgtgagagaaaaagggaacagagtaaagccatggaagccatgaacagtaagagactgctgcctggcatggtttcttcttctgcagaagatgaaactgaggagaaacaagacaacatccttcataccaggaatggtcaagataatgcaagaagaaaaaagctttcaaacaaatcagaaggcagtcaacaaacagaaagggggacattccttccctggcagttactcaaaactgaaattgcttattgtgtacaccggggcttgtacttggggaatttaataaaaatgctcattaccaagctccagagagatgtggtttaaagtcttaagtagatccaaggaataacctacattttaaacaaatacccaggagaatcagaggctaggggttagttgtaatcggatactaccttttaatgattcttcctctgaaccctcagattggggtgttgatttagaatttataagcatcttgaggtctcattcaaatagtgattcttctctattgacagagaccacacttaatagaatcatcatgggtaaatcagctttttctactgtcacttgaagaaatattccacgtcgttaaatcagtagaactggagagttctgtctcagcagaaattgatcaataaagatgtcttttgcccttggaaggccatagaatatcaagttgaaatttgcaaaaactctaaaatgatcaaggtcacattttcatcttttaattgagaactcattgtggacataatttgtcactgcttgtaaagtgtaaaaagaaacaaccaaaacagactttgaaagaatggtttatatgaggaagccctcctccccccgagaaaagggctattaagatgaaagtgaaagaaggagttggaggcagcaaatgttattgttgatgttggacaaaggaaggaataaactgtatgacaccaccttgaacttgaaagtcgtttgttttttaaccagaagatgaacaagaactatttagaatatcaaatcccaagagcagctttcatgtattttgctgtttcctaggtatgtgggtggcctcaccgcatagtcctgtgacaaatcttaattatttttttcaccaacacaacttgccatattttatataaactacttagatacatatttagactgtttctcaagagtgctttatagttgagtacaggttttatgcattgttagaagcataaagacgcttgttttttaaatagaaattgtgattatgcagataccatgttttaccacaagagggcactctggtgccattgaaaagcaaacaggtagtttctcctccctgcattttggttctgacttgtacagtcagtttagagaaacctacactctgcattctggtttggtatattttgttacaagcgtttattaatataaagttctcaaaaatgttagatgacttattttgtgacactctagcctctgtgtgtgtgtgtgcataaaacccacacatctttgagcagaccagtgccagccagtgacagttttcactgaagatcaaattaaaaaggtaaggatatatgtatgtgtgtgcatgtgcgtgtgcatatataatcactgactcagttgctgagcatgcgctatgaaccaggcgtgttaggcgctggggatttaatgcaagcagtcagatgggcacagtgcctacctaccttgatggggcgtgcagcctggtgatctggtggcaatcttactggacaaaacacaaacccggcagccctaagttaggaaaaggattttactgatctgtgaaacccacagtctgaaaacaaactgatttaagggtatctgtccagaaaagtcaacctatgttatcagtcagtgggtaaagaatagacacatcattttatcacgtttgaccacctagtcggcctggcttagcagtgtccaaaagaatttcttatgatgatggacattctatacctgtgctacccaatgtggtgcccctagtcacatgtgactgaagatcacttgaaatgtggctagtgtgactgaggaactgaatttttttatctaatttttttttgagacaaggtctggcattgtcgcccaggctgccttctgggctcaagccatcctcccttctcagcctcccaagtaactgggaccacaggcacatgccaccacatccggctatttttttttcccggtagagactgctcaccatgttgtttaggctgatctcaagttcctgagctcaagcaattggcctgacttggcctcccaaagtgctgggattacaggtgaaagccactgcacctgaccaatcttatttaactaattaaatagctacatgtggctggtggctactgcgctggacatagaggtctagttggtcacacctggctaatgagcctttttgaccttgagtttccaatatatcccatatcctttggctttttttgtttgtttttttatgactggaagagccagccttgcttctgtttactttgattgctagatttaacatccccacaagcctgagaaaaagagaggaaaggattgctcttggaatcattgttggtgtgcctcagattgctacgcaggacagcattctctttgatcacaaaagacaactacatatactttgtgcattgatgtgcacgagagtaaactggttgtcatactgaaagaccagaagctgtttctgatgggaaatattgaatcagcagaattgaaaacacagctgtgtggttctaatgggaatataatttcttctgtcaatcagtgctcacttagtatccattgtgtgcagagcattcactattccagcctctgcagggagacatcagggagatgctcaccacgtgcttttgaatgatattatttgtctttattgactctaagaaatgtaagaggttcataaaacattgaagccattaaggccttatttgagaagtctagcaactcacagttgcccttggaaagaggcaaataggaaggggagagccctctgtcagacttgttttccatcggtgacatgtggcatggattttacctcctaccgttagctggccaccctctgcattcaggcttgtgaagcattctggaggcccccccgccccatcctccactcccggctcttcctttggcatccccactggccatatttctttcctagtctgttctgacagcctcctaactggccacttgtccccagtctctggtcaccttcagctcaccccagttctgggaccagaggactggcaagtcacttctcacaaattccgaattgctgctcacttgccctcgggatagaggctctattcaaactggactttcttcccttttagaattggcttctctatgtgttctctgaaagaagaatatcgtttactgttgttgatttgatgggggccgctttggaggaggaatttagaccatagatggttcctagggatgctccagcagtctcctctcctttcctacctcctccaagcaggccacatgagccaacttcacatctgtgctctctcaggatgtaaaatcgtgggcagactagcatcccagggtctgaatcattccttcctctgtagaagaaggataatgaggataacactataggactattgtgagaatgaggattaaaccgcaggtccaaattttctagcatggtacatggtgcagaggaggggctcaacatattaactgctgttgttattgtgtactacccttttccatgctgcatgatttgtgtttcttttttgcctactgcctcatatcttatgtgagatgaaattagttcctctttaactgcatctgtttagaaggcagatttcccattaaaaacctgctggcatcacatgaccagcaagttcacaccaacgtgtaaacccaagaaaactgaaaccatatattcacacaaaaacctgtacatgaaagttgataactgcattattcataatagctaaaattggaaacaacccaagtgtgcatcaactgatgaatgaatggatgaacaaaatccggtttatccacacagtggaatattagccataaaaagaaatggaagtactgacccacgccacaacatggatgaacctagaaaacatcgtgccaagtgcaagaagccagacacaaaaggtcacagatgacttcatttatgggaaatgtcatgcatagtcaaataaatcggtatagaaagaagattcgtggttgccaggaaccaggatgggaagggatttagtagtggctgctaatgggtacagggtttctttaggggcaatcacgttctggagttaagatagtgctgatgatcacgcaactttatgaatatattaaaaatcaccgaattgtatactttagaaggtgaattttgtggtatatgaattgtttctcaatttaaaaaacctaccgggaattagctcagattttctacaaattctcttaattctttgcttatctgtttatatcgatagaatttttaaaaattaatttgaatttccttttacgaatggtaaggagatttgccctttggggtttcactccgtccagtgctcttgctgtcgattctgtctgtttgccttttttgttgttttcgtttgtccactcagcatctcagttggccttagctgcagccgtctgcagccgcctcctccacttgggggttaggttgcaaatctgtcccagagtagctcatctcactggttatcacattagcagtcactcatgtcagcagtccccgaagaaaagatagctggttggctggggataaagcatctgaaactttgctggtctgatgatatctttctgttgtttcagtacatgtgtcactgacaacttgcttaggtaaaagtgcccatagttccttcatttgttcaacaaccatttactgagggcagaatcctcattcacttagtgaatacttagtaattgttgaatacctgggtactagggcaggagcagccaaatgagaaaaaggactctgtccacatggagcctacctgctggtggacgatacacaataaacatagcgaacaaggtaagacttttcgccctctgcacctgtaaggccattgaggactaacctgggctgggaatgggtaggaagagctgcttcagaggggtgtctagatataccccagaggatgccagccatgtgaagacctaggggaaggaagtgtctcatagaggttgggtaatagaggatcagcgtggcaatagctgagtgagtgagtgaagggtgtggtatgtgcagcagatgcacctaggtggggtcttcagaacatggtgaagaactcagacttttttcttctagcaagggaacccattttagggtctcatgtgcatgtttcaaggatcactgcagcagtggtcatacttgtgtgtttgtagcccctatttcttacgtcgtgcttggcgcattcatagcaggcactgggttctggttcagaactgaagtggatgaatgcatggagaatgtactaaacccggaagtgtgccagactctgcacccgaaagttctctgcagcttctccaactttaagagtgttctgcaaacacactgaatgctttgcctggatcttcctgtgaagatccagggcagaatttagtaatagaaattgggaaaatttattcttaaattcttttgcaactgtcttgatttcttcacatagtcatcatctgtttatcaaatgggcattttaaataatatttgacacataactggctgactccacagctccaaattagtcacacggtagtcttttgataatagccaacatgtgacaacagggattttttgcacgaggtggggagcattctggtttccttttcatttttccaatatgtcatatttctcacttccacttttcttagaggggagggttgtctttttgcttcaaactattataggcttttactgagagacaagaggctatgagccccactcagtagaagaagggtttaagtctatcatataaattattgccgctctaacttctctctgtccctgcctcttaagtcatttacggtatctgtttgggtagctatattggatttcttccgtttttccaggggaaatacagcaactttggagagacgtgaacatgggaatatatgaattgattgcttgagaagtgttagtgttagttctggaatgaagtcctgtgtcattaggtgcttacgttgaaaggaaatgtagaattttccatagtcgcagctttccagattttaattggctgcttgccctcgtgtcactttcttttctaaaataaatgttttggatggctcttatctttacaaccaggcacacagcttcatttcctcctaactaggaaagttaactcttcagctacatggtggtacacaatgttgtccctgctcagcagcccttgaacactcattaaatcccacattagagctgcaaggagatagtaacatttattaggtgcctcattttttttttttttctctgagagcggatctcgctctgttgaccaggctatagtgcagtggtaccatcagggctcactacagcctcaacctcccaggcccaagtggtcctcctgcctcagcctcctgagtaggtgggaccacaggcacactcagatattttaaaaaatttttgtagagactatgttgcccgggctgccattgtttatccattgattttttattttatttacttatttttcttttgtcttttttgttgcctagtttcccccctgttctttgcttcttaattttggttggtcaaaatctttcttttaacattttgtttcctcttcaaccttgggaattcttctgtttctattctttcttgccttttccttgcttcatttcaggactcctttccaatgaacctgccattttttcctgcaaagattgtagtttaaaagaaagcccactggcctgaaactttatgtagctaagcagctatttcaaattctttctgaggttgagggcaataaatgataaaatcacgcagtcaggcagtgtgttagttctctaaagacaagagttcagagttctgagttctccaaagacaagaactagtatatgaagaggtttattataagaaactggctcacatgattacagaggctggcaactccaaaatctgctgagtagatgtcctggtttgagtctgaaagctggaagctgctgtagaacccagaagagctgatgtcccagtgcaaaggcatcaggcaggagagttcagtcttaccagggtcagtcttttattctattcagcccttcaactgattgggtgaggcccacccacattatgtctgctttactcaagacaactactaatttaaatgttaatttcatgtaaaacactgatatggctgggctgtgaccccacccaaatctcatcttgaattgtagcttccataattccttcgtgctgtgggagggactcagtgggagataattgaatcatggaggtggtttccaccatactgttctcatggtagtgaataagtctcacaaggtctgatggctttataaggggaaacccctttcacttggctctcattcttcttgtctgctgccatatgagatgtacctttcaccctccaccatgattgtgaggcctctccagccacatggaactgtgagttcattaaatctctttcttttgtaaattgcttagtcttgggtatgtctttatcagcagcctgaaaacggactaacacaccctcacaaaaacacccagaataatgtttgactgaccatctgggcaccttgaggccctgtcaacttgatgcataaaatgaacatctcaggcagctcttgctttctcagttacaacaggccccgatcctggcctttgggttatttgttgtttgatatatacagaaattaaacccaaatttaaaaaaaaagggactgaaatctcaattcctaaccatggcattatttttacatttataccattctgatgcctgtttaccacattttgtgtgcattctttttactggtctctggtcatctgtctcccattcttcacaagaattgttccaaatcttctccccttttcacagggtccctttccaaaactccagctcttttgtgctttgcttaagatctggcctcttcccagataggagaggttgtttaccttgctaaggtcacacagctactgtatggtaagactgggatttaatttgaagcagttggtcttggtagtcatgggagcccactgggtgctgggtgctgggcactgtgccacgtgctaaatgccccagacttccccatgctgggtcctcctcgtgctgggagggtgtgtactcttccagccagcatgccctgccccttctgcatgccacactctgctctgatcttcagcccagcacccgtccctctgcacacaggcctttggcgctttgtttgctcctatgattttcttctattttctgtttaattctctcctttttatttgcattatataaacagttctgtttctttcattaagaaaacacctctcacaggcacagtggctcacatctataatcttagcactttgggaggctgaggtgggaggattgcttgagcccaggagttcaagaccagtctgagtaacatagtgagaccccatctctattaaaaaaaaaaattagccaggcgtagtggtgcacacctgtagtctcagctactcaagaggctgagacaggaggatggtttgagcccaggaggttgaggctgcagtgagccaggatcacatcactgcactccagcctgggtgacagaaccagaccctgtctcaaaaaaaaaaaaaaagacagcccttttctctgacccctatgtccctctcatttgaggaactatctatcttttcattttcctccacattctttattctttttaacctccaaagaggccctccacctgcattacgtgccttgccccattaataatgtactagtgctatgtatgcttgattttacataaatgttttattgtgcattaaggtccattccccatgcatatgcgcacataaattgcactaattagagtgcacagcatgttatattgcaagattacataaaatagattcaacacttggatattgtccagtacattaattcctttcttttacataggacataatatcattgattgtgcatggcacattaagtcacatcaagtcacatcaatccttaacaacatgcttatcacttccaataggatttctttaccaccaagctttgagaaaccagcaacctactcaggaaatgtccttcttgctttgggcccataaaacctaggggcttctagacttgaaactatacctagcatctggttcttacttcagggccatagatttgaaaccactcatttgttccccctaaataagacatctcagtgactaatgactaactagcacaagatgacatggaactgtggggtcatgcatttggtattttttaattttggagggtgctgtgatccaacatggctgtcaatgccttgacacagtcagctagatcgtagctgcgcttaaatggaatattctttactcacataaaatcatttggtgctaattgattcatctcaatggacgtaataaaaacaagatatagacacagacacatacaagcagttcttcctgccatgtatgattaactttgtaaacccctctaccctccttaagctcttatagtatctgagtaagtcttttattcttgccaaccctgcccaaataagaaaccttgtatctattgactgctaactaaggctcctatatatactcacatgctattaaatttagttataagttcatctagcattaacccaactcctaattaaagcatttttcaaaaatccaaacatcaattaaaaattaggctttctaggctaaaagtttttttcttactaagattaccaaaagagcccccaatgctaacatagcacataatttagcagtttttttccccaggacagaattttctagatataagtcgatgtagctcagtccactaaagtaaggcactgaaaatgcctagatgagttcatgtaactgcataaacacacaggtttggttctggcccttctattaattcttagtaagattacatgtgcaagtatctgcattgcatgtgtaatcagcaaaagagcaaaaggagcaggcgtcaagcacactaattggtagcaactaacgtcttgctcagccacactcctacaggaaatagcaataataaaaagcaataaacaaaaagtttgactaaactatgctaattttccttagggtcagtaaattttgtgtcagccaccacagtcataaacccaaattaataaaatctgaaaagcacgtttgtgtttaggataatacaaataaactacaaaaatgactttaatatgatctgaatacacaatagctaagacctaaactgggattaaataccccactatgtttagccataaacttaaagttattcactagagtactatcagcaacagcttaaaactcaaaggacttggtggtatggtgtttccatcccccctagaggagcctggttcataattaataagcaatgataaacctcactatttcttgtcaattcagcctgtatactaccatcttcagcaagccctaaaaaggtcataaagtaagcacaagtacttacatggaaacattaggtcaacatgtagcttatgagatggaaagaaatgacttacattgtctgattaaagtacacccaacccatgataagccttatgaaactacaggccaaaggaggatttagtagtaaattaagaatagagagcttaattgaataaggttgtgaagcacacatagaccgcccattaccttcctcaaatgcttcaataaactcaagtttataattaacacagacccatctataagaggagatgtcagaacaaagaatactggaaggtgtgcttggacaaaccaaagtgtagtttaactcaaggcacctggcttatgcctggaagatttcatattaatctgaccactttgaactaaaactaacaaaatttaacaactacatacacattttaaccaaaacattatttacaacagggaggataggagatgatagaaatttatttagatgctatagaaaaagtactgtaagggaaagatgaaagaataaactgaaaaaaaaaaaaaaaaacaaagcttaccccttatgccttttgcataatgaattaactagaacaattttacaaagaaaactttagctaaaaaccccaaaaccagatgagctactcatggacagttacaagaacaaacttgttcatgtggtgaaattgtgagaatatccttgagtagaggtaaaatgccagtcgagctgggtgagcgctgaatttcaattcaaccttaaatttacctaaagaaatatttaaccttaatgtaaatttaaacgttaatctaaagagggacaacactttagaaacaggaaacaaccttttatagaatgtaaactattaaattctcataattggcctaaaagcagccaccaattaagaaagggttcaagctcaacaatcaatatcttaattccaactatttatataaactcctaatattttactggactaacctatgtataaatagaggtgattctgtttatataagtaacaagaaaaaatgtatcgttgcataagcttatattggatacaatagcattcctaatgttagctgatagttaccaactcaataaattaaaccgatcaattgactgtttatccaaacaaatattgcagggttcagtggctcacacctataattccaatgttttaggagtccaaggtgggaggattgtttgaggccaggagttccagaccccatctttacaaaaaataagccaaatagccaggtgtggtggcatgtgcctgtagtcttcactacttgggaaactgaggtaggaggatcccttgggcccagagttggaggttgcagtgagccatgatcatgccacttgcactccattctgggtgacagagtgggaccttttctctaaaaaacaaaaaagaccaattgttaatcctacacaggcatccactactgcactacttaaggaaagattaaagaaactaaaaggagctcagcaaatacaaaccctgcctatttaccaaaaacattacctctcatataactagtatcagactagtatgtcacctgccttgtgacacatgtttaacagctgcagtattgtgaccagtgcaaaggtagcataatcatttgttccctaaatagggacttgtatgaatgaccacaagagggttcaagtttctcttacttccaattagtgaaattgaccttcctgcccctgcggaaaggcagggatattaaaataaaacaagaagaccctatggaacgtaaatgaattagtctacataacacaactttaacctaactattcaaaggaataacacctaatctaccagactaaaaattttggttgaggtgacttcagagtacaacacaacatccaaatgattaaaatctagactagaccagtcaaagtaacataatcgcttattaacctaagcaatttaatcaatggaacaaattaccctagggataacaacacaaccctattttagagtttgtatcaacaacagggtttgcaacctcaatgttggatcaggacattccaaaggtgtaactactattaatgaatggttcgtttgttcaataattaaagtcctatgtggtctgagttcagaccggagcaatccagatctatttctacctattcagtatttctcttagtacaaaagaataagagaaatagagcccatttcaaaaaacttcctcaattttaataggttatatataatctcaacctaatatactattaaatgtcctgccaagaacaagggcttattaagatggcagagcccagttattgcataaaacttaaaactttacaatcagctcaactccttcttaacagcatgtttatagttaatcttctacctattagcccccctctccttgcaatagcattgctaacagctgaataaaaagtattagattatatacagtttcataaaggacctaatactgtaggcccctatggcccacttcacttcttcactaatgccataaaactattcactaaagaaccattacgaccaccaacatcttctatactatcatatgccattgcacccacactggccctggcccttgcacttactatgtgaattctactaatcttactgtacccactaattaacatgaatataggaacactattcattttaaccacatgaagcctacccatatattccatccttcaatcaggatgaacatcagttttaaaatgtgtgttaattggtgcactatgagcagtagcacaaacaaatttatatgaagttatcccagccaccattattagttctctcaataagcaaatcatttacattaacaactttaattgatacctgagaatatgtacgactatttttttcatcatgatccttagccataatatgatttacttcaacagtagcaaaaactaatggagcctcattcaacttgacacaaggtgttgaaacttgtgtcaggctttaacatccaatatgctgcaggccaatttgtcctattttttttatatagcagagtacaccaacatcattataataaatgccctaaccattatccattgcctagaagaactccatgatattcacataccagaaatttatatactcaacttcatcgtgaacaccattttcctatcttacagttcttgactttgagcattatacccatgattccagtatgatgaactcatgtaccttctatgaaaaaatttctaaccactcaaattagccttatgcatatgacacatctcagtacctattttactactgcatattccaccacacacataagaaatttgtctgataaaatagttaaagagagtaaatgatagagatttaagtcctcttatttccagaatgttacgaattgaacctactctaaagaattcaaaaatcagctgggcatggtggctcccacctgcaatctcagcactttgggaggccaaggcgggtggatcacctgaagtcaggagttcgagaccagcctggccaacatggtgaaaccccgtctctaccaacaatacaaaaattagctgggtgtggtggcacatgcctataatcccagctactctggaggctaagataggagaatcgcttgaacctgggaggcaaaggttgcagtaggccgagatctggccactgcactccagcctgggagacagagagagactccatctcaaaaaaaacaaaaaacattcaaaaatctctgtgctgcctaatataccatattctatagtaaggtcagctaaataagctaccaggcccatatccccaaaaacattggtttatattctttccatactaattaatcccctattttttctaccattctatttactgtcttcataggaaaacaatcacaatatttagctcacattgactaataatctaaatgggattagaaataaatgtattagccatgattcccattttaatgaaaaaagcaaatccatgatccacagaagcagctaccaaatatttcttaacacaagcaaccatatttatacccctaatgatagacagcatcattaacatattgtattctgggcaattaacagtcataaaaattcccaaacaaacagcatccccggtagttaccatagatagcactaatgataaaacttggactctccccattccatttctgagtcccagaagtaacacaaagaatttcactaatatcgagcataatcctattaacatgacaaaaactgggaccaagttcaattatattttcagtatcatatcatcgattaatccatcaattaatctaaatataatacaaataattgccatattatctattctaataagacgatgaggagaatttaatcaaacgcaaccatgaaaactcttagcctatttattcaccagttgcacatataggctgaataataactatccttatttataatcccccacaataatcataaaccttctaagttatatcattccaatgattaccatattcataatatttagttaaaacataaataccacaacactatcactattgcacacatgaaatgaactaccaataataacttctataatccttataactattattcttaggaggcctacccctacttacaggatttctacccaagtaaattaacattcaaaaatgttattatgccaacattcataattattttctttttttcttgcccccattcgtaactattatagtatttctcaaccttatatttttatgtatgactattctttattattaactatattttcaacaaccaataacaaaaacaaaatgacaattgaaaaatataaaatggcttgggtaacatagtgagacttcatctctactaaaaaattaaaaaaaaaaaagtagctgggcatggtggcatgcacctgtaatcccagctacaaggagactgaggcgggaggatcacttgatcctgggagatcaaggctgcagtgagctgtgatcatgccactgcactccagccctgggtgacagagggagaccctgtctcaataaaaaaattaaaatatatatgtataaaacaaatattctttctcccatcacttgttttactatcagctcttttcctcccactttcaccaatatttccaacatcaaactagcgatttaggttagatagactaagagacttcaaagctctaagcaagtaccctatacttaattcttgaaacataaggattccaagactcttacatcaattgaatgaaaaaaaaaaactttaattaagtgaaatccgtactagattggtgagctccaacgtcacaaaaacttagttaacagctaaagcattctaatcagttagcttccatctacttctcccgctgtcgagagaaaaaaggcagaagaagcccgggcagaattgaagctgctcctttgaattggcaattcagtgtgaacattcacctcaagacagggtcgaaagagggttcaacctctgtctttaaatttacaatccaatgcttattcagctactttatcctctacctgtgctcgttaacccttcatcagtctcaacaaacaacacaggatagtgacactataattttctacgtggtgtttgagccagaatagtagggactgccctaaatcttgtaatctgagcagagttaggtcaaccaggagtcctattcagtgacaatcaaatatatttatttatttatttatttatttatttatttatagacagagcctcgctctgttgcccaggctggagtgcagtagtgcaatctcagctcactgcaacctccgccccctgggctcaagcgattctcctgcctcagccttctgagtaggtgggactacaggtgtgcgccaccaccacatctggctaatttttgtagttttagttgagacagggttttgccgtgttgggtaggctggtcttgaactcctgacctcagatgatccacccgccttggcctcacaaagtgctgggattataggtgtgagccaccgcacctggccaagtgacaatcaaatttataatgtcatcagcactatatctttatggcatacctattccaattaggctttcaatatgtaatatcacctatgatagaagaacttctacacttccatgattacactttaatcagttcttgtgtccataataatcgttttaatagttatgcctattttagtgagaggacttggcaactgattagtccccttattaatcagagaccctgatgtagcatctccctgaataaataacatatgattctgacttctcccaccatcatttctactcctgcttcctcaacagtggaaaccagcactggcacaggataagccacctttaggcagaaatcttgagcacgcaggagcctctgtagattttgccattttctcattacacctagtaggtgtctcatcaaccttagaagctattaatttattacaattattaacattaaaccaccagccgtgtcccaatctcaggcaccactatttgtctgataaatgctaatcacagctgtattatctcttctctcccactctgttctaacagccatattcttaaaagactgaaaccctaatatcactttttaaaaaaatctagctgcaagagatctaattttatatcaacatttattcttatttttttgccacctggaagtgtatattcttatcttccctggctttgaaataatctcacatattataacctataatcctggggaaaaagaaccatttggttatataggaatggtgtgagccgtgatattaattggttttctaggctttatcatatgggctcatcgtatatttacaatagggatagacattgacattcaagcatattttacaccggccactataatcactgctattcccataggagttagggttcagccaactggcaaccccgtgcagaagtaacattaaatgatctccagctatattatgagctttaggctttatcttcttatttacagttggaggcctcatagaaatggcatcagctgactcattgctagacattgctcttcacaaaacatattatgtggcagcacatttccactatgttctatcaataggagcagcctttgccattataagaggatttgttcactgattcccactattttcaggttacacactcaattcaacccaagccaaaatttattttagcattttatttgtaggtattaatttagcttgctttccacaataattccttaatttatcaagaattctctgagttactccaattaccctgatgcatataaaacatgcaattccatctcattgataggcttatatatttcatcaatgacagtaatattaataatcttcacaatctgagagactttcatggtagtggaaggaagccaagaactgccaagaaagtaccgagaatgatcagtagtggaactttcaactacaacttgaatggcctcctggctgcccattagcatatcagacatttgaagagcctgcttatgcaagagcttaaaataagaaacaaaggggcctggcacagtggctcacgcctgtaatctcagcactttgggaggccgaggcgggcggatcacctgaggtcaggagtttgagaccagactggctaacatggtgaaaccctgtttctactaaaaatacacaaaattagccaggaatggtggcgcatgcctgtaatcccagctactctggaggctgaggcaggagaatcgcttgaatctgggaggcagaggttgcagtgagtggagatggcgccattgcactccagcttgggcaacaagagtaaaactcaaaaaaaaaaaaaaaaaagaaacgaaagaaaaaggaaggaaggaaggaaggaaagaaggaaggaaacgtacttcttaactggtttcaagccgatttcatcacaattatgactttttcaacaagtaagacattaggaaaaataattacataactttggcaaagttaatttataggttaaaattctttatatctttatggcatacccattccaattaggctttcaagatgcaacatcacctgtgatagaacttctacacttccatgattacactttaatcatcattttcttaattagctcttcagtcctttgtatcatttcattaatagtaacaactaaactagcccacatgagtactgtagatactcaagaagtaaaaactgcatgaactaccctactgatattttaatcctaactgctttaccacctttacaaatcctatataggcatacctcagaaatattatgggtttggttccagaccactgcaataaagtgagtcacatgaattttttggttccccagtgcatataaaagttatgttggccgggcgcggtggctcacgcctgtaatcccagcactttgggaggccgaggcgggcggatcacgaggtcaggagatcgagaccatcccggctaaaacggtgaaaccccgtctctactaaaaatacaaaaaattagccgggcgtagtggcgggcgcctgtagtcccagctacttgggaggctgaggcaggagaatggcgtgaacccgggaggcagagcttgcagtgagccgagatcccgccactgcactccagcctgggcgacagagcgagactccgtctcaaaaaaaaaaaaaaagttatgtttacatagtctttaaaagacttaaagtctgcaatagcattatgtctttaaaaagtacgcaccttaatttaaaaatactttattgctaaaaaatactaaccatcatccgagccttcagtgagtcataatctttttgctgatggagggtcttggctcagtgttgaagtgttggtggctactgaccaatcaggatggtagttgctgaaggctggggtggctgtggcaatttattaaaataagagaacaatgaaattggccacattgactctttccttcacaaaagatttccgtagcatgtgatgctatttgatagcattatatccatagtagacagtctttcaaaattggagtcaaagcctgctgctgttttatcaactaagttatgtaatattctaaatcctttgttgtcatttcaacattgttcacagcatcttcaccaggagtagattccatcataagaaacactttctctactcaaccataagaagcaactcctcatccgttcaagtttggtcataagattgcagcaattcagtcacatcttcaggctttacttctatctaatgctagttctcttgcaatttctactacatctatagttacttcctccactgaagtcttgaacccctcaaagtcacccatgagggttagaatcaatttctttcaaactcctgttaatgttgatattcttttttcttttttgagacagggtctcactctgtcacccaggctggagtgcagtggtgtgatttcagctcactgcaacctccacctcccaggctcaagcaatcctcccacctcagccccacaaatagctgggactacaggctcacgccatcatgcccagctaatttttgtgtttttttgtaaagatggggtttcaccatgttggccaggctagtcttgagctcctggctcaagtgatccccccgccttggcctcccaatgtgctgggattacaggcatgagccaccacacctggacttggtattttgaactccttccatgaatcacaaatgttcttaatggcatctagcatggtaaatcctttccagaaagttttcaatttacttggcccagatccatcagatgcatcactctctatggcagctgtagtcttacaaaatgtatttcttaaataataagactagaaagttgaaattactccttgatccatgggctgcagaatggatattgtattagtaggcacaaaaacaacatttaatctccttgtacatgcccatcagagctcttgggtgaccagatgcattgtcaataaacagtaatattttgaaaggaatttttttttctgagcagtaggtctcaacagggggcttaaaatattcagtaaacaatggtgtaaacagatgtgctgtcatccaatttttgttccatttgtggagcacaggcagaaataatttagcataatttttttaattatttatttatttttgagacaagatctcactgtgtcgcccaggctggggtgcagtggtgtgatcaaagctcactgcaacctcaaactcctagtctcaaggaagcctccctcctcagcctcctaagtagctaggactacaggtgtgtgccaccatgccaagctaattgtttttttaaaaaaatttttgcagacatagggtcttgttatgttgcccaggctggtcttaaatatctggcctcaagtgatcctcctgcctcagcatcccaaagtgctgagattacaggtataagccactgtgcccagcctatataatacatatatgtgtgtgtgtgtatatatatatatgtgtgtgtgtgtgtgtgtgtgtgtgtgtgtgtgtgtgtatttttttttgacatgtagtcttgctatgttgcctaggttggtcttgaactcttgggctcaagcaatcctcccacctcagcctctcaggtagttgcaattacagtagctagaattacaggcatgcaccactgtgcctggctctttgatttagcatagttcttaaggactctaggatttttggaataataaatgagcattgacttcatcttaaagtcaacagctgcattagcccctaacaagtaggtcagcctgtcctttgaagctttgaagccagacattgtcttcttctgtctagctatgaaagttctagatggcatcctcttccaatagaaggccatgttgtctacactgaaaaatctgttgtttagtgtagccaccctcatcaatgatcttagctagatttcctggataacttgctgcagtttctctatcagcacttgctacttcaccttgcacttttacattatgaagatggcttctttccttataccccatgaaccaacctttgctggcttccaacttttcttctgcagtttccttacctctctcaacttcatagaattgaagagagttaggactttgccctggatcaggctttggcttaagggaatgttgtggctggtttgatctttatccagacccctcaaactttctccatatgagcaataaggctcccttcattccntcccaccttccctcccttccccctccctccctccctcccttccttccttcactccttccttcttttctccctccctcccttcccgacccccacatttctcttatgtgaagtgaagcagtgggagtggagaaggaacaaagaataactggttttaagtaattagttataagcatgagcatacttagatcagcctggtttcctttcttattattcatgtattcactggagtagcaccttaaattttttaaaaaacttcttttgcattcccaacttggctaactgatgcaagaggccttgctttcagcttcaacatacctttgtcactaagctcaatcatttctggcttttgatttaaagtgagagatgtgcaacttttcctttcacttgaacacttgtaggcttataagttagtaacccttattgtagggttactaactgatgtaattttaatattgtgcctcagggaatagggaggccggagcaggggaagagggatggggaaacagctggttggtgaagtagtcagaacatacaacgttgatcaattaagtttgccatcttatagggtgcagtttgtggcaccccaaaacaattacaacaacaacatcaaagatcactgatcacagatcaccatgatagatataattatatgaaaaagtttgaaatattgtgagaattaccaaaatgtgacacagagacgtgaagtaagcacgtgctgttggaaaatggacttgatcaatgcagggttttcacacacccccaatttattaaaatcacaatatttgcacagcacaataaaatgaagtacaataaaatggggtatgtttatacataagagatcaaattaataacttccaactgcaacagccataggccaccaatgatgttgaagttattaacatatagagtgtaaggaattgaactttgattcttacataattcctgcaacagacctaatggtaatgaactgggggaaatccagcaagccctgttcagattcatttctgtgtccccttgtcttcagggatgagaacgttcctttcctctgggtatagggagggcatctcttttgtgtcctacttcagggggaggtcagaaaatccttcctaggttttatggcctgcttcatgggagaagggtggaggaaggtgagagtgaccttcctgctcctgctgttttctcaagtgccaagatgccataattcagggtagcgtatcctgattctcatcagctatttattaaaacatagagcaaaacttcatctttctaaatagacctatgtgtatgtaaatgcctaggaaaggcctagaaagcactctctgctgggaagggacccagggtgggagtgaagagtgggccacaaggacttctacttgacctctatggtgggcattttttatagtgagactctatttgagtgtagtattattttcttaatcaaaactttttttcttaagtaaagaaagaaggaataaaatattacaaagcctgctattataatatactctataacatggaaatttgttttattctccttagcacaattcaattattataactgacttaaaaatatcctttgtattaatccttattaatttataattaccatttaatccagtgttttttaagttgaagactaagatttattaggagtttgtgaaaccagcatatggagtttccgtcagtactttcttaacgaaaaagaaaagaaaaaaaagaaagagaccaggcatggtggctcaccacctcatggaggccaaggcgggaggatcacttgaggccaggagtctgagaccagcctgggaaatacagggagactctgtttctgcaaaattaaaaataaaaatgtaggctggcatagtggtgtgtccctgtggtctgagttactcagagggtgagatgggaggattgtttgagcccaggagttcgaggccgcagtgagctaggatcgagccactgcatttcatgaaaaacaaaacaaaacaaaacaaaacaaaagcaagtgaaggagggaaggagggagtaagacccagagtagaacagaataggataaaataaaaagcattattgtgctatgcaagccgtaagaggaaatattgttttgcaaaaccttgcaatgtaaaatgtatttcttgctgtgggctgtggccacgaaattttgaaactcacagacaaaccactttctgcttgactttgcgaggtggctaaacaagactgaatctgttctttcgcgtagttgtagtgtacattatcctgaataatcaaacactgaaaaaaaaacaagcactgcagttttattcttgttcattcttgccattttctcattaagttccccttcgaaaagcagaactaggagagactgtagatgttgatggatgaacttttctgctccttacctgggctcattagcacagtcaaagaatctctcaaagtgaggcatttaagagacttcttctgggttccaaagtgcaccattttttttttttttacattctttttaacttaatgaggaaactagccagcaactagatgatcagtcaagaatttcttttggcctagatttcctattgcaaaatatcaaagagatgcatttagaatcatgagtatttcagatttgccaataaagaacccagaagtcatactattatcatttcttaaagaacggatgccttcttttgccttccatttacctttttaaaatttacttttaggctgggcgcggtggctcatgcctgtaatcccaacactttgggaggtccaggctggtgggtaacttaaggccaggagttcgaggccagcctggccaacacagtgaaaccccgtctctattaaaaatagaaaaaattagccgggcatggtggtgtgcacctgtaatcccagctactggggaggctgaggcatgagaattgcttgaacccaggaggtggaggttgcagtgagccaagatcatgccactgtactccagcccgggcaacacagtgagactctgtctcaaataaaaaataaataaataaaatttacttttatattcaaactgttacttccaaatggatcctttatttttatttatgcatgattccccccttttattttattatttgtataaatgtatgggttacaaatgcaattttgttacaagcataaattgtgtagtggtgccgtcagggcttttagggtatccattacccaaataatgcacatcatacccattaagtaccttctcatcatccatgcccctcccaccccctcacccttagaagtcatgttatctagatggaggaatttagaaggtggattttctgaagtcatgttttctaggataaggcatatattgtctttgctgtgcaatgatgcagttatatttatccatgtaaacctagtgaattgtattaatcacatggaatatgttcaataagagaagtttctgagctgaacacaccacatacctttaaacatggaaacgtaactgtctcttctcttctttccctgattccaagcacctcaccttacccatccgcccttgaagctggaccacattagcagttgaagcatgtgctgcagtacagggctcttaatcagagcctggagaagtctcagtgtgacggagtgaatgaggcactgagacaatctcgcttcaatatggctaatgcctaattaatttagttctctgtcatttctatttcccgcaaaagagaacaattcaaataatccataatcccacataattatgttatttttataatgcattacattatgtatgtatgtagtatgtgtgtgtgtgtaaatatatatatagtgtgtgtgtgtgtgtgtgtatatatatatataatagttgtgatttttttaaaatgtcctatttggtaatctgttttcacttatctagcacattcttatttagtgtgtctgattacccactcttaattttaatgcaagtgttcaggctatttccttttaatagaaaaggaaatggaacaagttatagatgatcctgttatttaaatctatatttatctatagaagcagggtgcctgctgacttagctctaagaaacagcaagtcttaaatagaaaagcaacaaccagctttgccttatttactactgaactaaattccacctaccagcattctcagaatcaagttctatttccaatctgcagtgtttcttgggctattctacgtagacttgcgatggggaaatcagttctaaattcacactttatatggtattttgctagtgatcattctggtggcagggcctgaagtggctatgagcctttgatattctagtatgattgtttgcttgtatgatgggggctgtagagtgccccactgtcttggcttgaggagtagcaaagagttgaatccagagcaaatcctccagctaatcgtgtccaagggcaagtgtgagatgtttcccttccccatgctatcgccctgatgggttctagggacctcttctcctcagagaggctttatgcatgtcctgcaacattaaaagtaagtagaaagggaccaagtcttgggcgcaggcaggtgccactcttggaggacggctagtggatgacagacaacctatcagagaggtcgtggcatatactgatggttttctccttaacagagtagctccatattccttttccattcatccctgtggatgagctacagagtaactccatattccttttccattcatcactttcccctatagagatagaatatgccagatattcctaggctctattgcagctaggggagggcacatgtgacccagttctaaccaatgagatgtaaggggaaatcagttgagagtttctaggaaagattttcctccttgctaaaaggaaagatgcacaagaatagcactccttctctgccttctggggttctgtctgtggatgaagttacatgagggtgtgatgcttggagctgtggcagccacttgcatccatgaggtaacagcctaggagaaagctcatccctctgagacagcaggagctagagcctgggttcttgatggcagtaagctgctgaaccaaccttaagacctctttttcacaacttcttatgagataagtgtctctgttaagctgtctttagacagaagtgttacttgcagccaaaagcattgtaacaagaagtcagtgggaacgaccttcagaaagctcctctgctctggtggtgtttggtgcccaccaggatggagaatgaggctgctgagttagctcctgaacccatggatctttcaggaataaggtccccttgtcttgggctccattaacctctccctttctcccttcatccctgctgccctcccagtctctacttccaacagcctgggaaatctctttgttgtctgagagtatagaaatctgactcatactcatcataatttttctgtgctctgaattttctctgggcctaagcttttgaaactaaaaattgacctatttttgagggttttgtttttgtttttgttttgaggtggagtctcactctgttgcccaggatggagtgcagtggcacgatcttggctccctgaaacctctgcctcccggtttcaagcagttctcctgcctcagactcccaagtagctgggattacaggtgcctgccaccatgcccggctaatttttgtagttttagtagatatagagtttcaccatgttggccaagctggtctcaaactcttgacctcaggtgatctgcccacctcggcttcccaaagtgctgggattataggcatgagccactgcgtccggccaatagacacctctttttttttttctctaccataacgtctttcaatttgcagaatattctagatgcttaaatgggaagaaagctaagaggatgtgtgtgtatacgttgtagtggagaacaggggtggggtgggggaaggctatggtggtggtgacagaggatgtggcagatagaagaagaaaaacagaaagaaaacggtgttgaggaatattttaatccttgtatccggtttcaaactctagcctttttatttatttttattttatgttattatatatatttttgagacagagtctcactccgttgcccaggctggagtgcagtggggtgatctcggctcactgcaacctccaccaccctggttcaagagattctcctgcctcagcttcccaagtagctgggattacaggcacccgccaccacgcccagctaatttttgtatttttagtagagacggggtttcaccgtgttgggccaggctggtcttgaactcctgaactcaagtgatccaccggcgttggcctcccatagtgaaactctagcctttttagagatgcttgtcatgaacattcacagtcttaatatttagaggagaacatgagtaaaatcacaaataacattttaaaacttttaaattttgcccctttgtgatctgtcaaaaaggcaaagccattttcaaatccgataaataactttcattttctccagtcattaaaaaaatagtttcagagcttctgtgtgctagggtctaggtgctagggatatagcagtgtatgaaacagaaagaaatcctgccatcaaggagtctatagtctagaggggcaaggcaactaacaaacaaataaagcaaaagaaagagagagagagagaatcacgaagccctggaagatgctgggggagggactgtcattttgaataggatgtcagggttcctgagaaagtgagagatctgagcaaaggagataaggaggaagccacgaagatacctgggataggagctctggggcagagggaagagcaagtacaaatactaaaggcaggagacctccgggcatggatgaaaacagtttatattggtgtggctggaatggagcgggcaaggggaaattaggaggagaccaggtttccagagctgatgggcagccagactgaggagggccctgctttgggcaagggaagcttagaaaaatgcctcttggttgacttccctctgaatggctggctaactgataccacatcctatactgttggttgtcagaggtcccaacttgcctctgggtttattctatgctgtagtagacaactttaaagtcacctgcatatcatgcagctgatgtgtaggaatttctggagaagcctgaaaattcagacgccattccctcaggcactaggcaatcgaattttgttttacttcttttgtactccatctctggcacatttctctctctctgtctctctcttttgagacagtctctctctgtcaccaaggtgccagtgtagtggcccgatcttggcttactgcagcctggacctccggagctcaagcgatactcctacctcagcctcccgagtagctggaaccacaagcacacaccaccacatcaggctagtttttaatagagacagggtctcactatgttccccagtctggtcttgaacttctgggctcaagcaatcctcctacctcagcctcccaaaatgctggggttgcagccaccactccccgtccttctggcacatttccgttcgtgatatttctccttccagaggcaacagcaacattgaatatctgccatgtatatatgtatatgtatatatttgctgttgaagataaaaggaaaccaaagtttgcattttaaaatcttggtaaaagagtatgtcatcaaaagtatatatttatcatcaatcctttaaaaagtgtaccacttcggttggcttctgtagccccttctccttgctgtgtgttgatatggcatctctgttatctatgcggatgtggctgtgggtaatttttgttcttctcttgtggaggaacagatttagcaggaaatcctgctgctctctacgttggtccatctctccctttgcattttgtcacgttgggtctttcccctggttggtatggtggtgcagcagggcgtctggctgcagaaggtgggttgaaggctgggaggaggccacactggggaattctgcaggtttgacgggaacaacggatagaactgaatttcttctcctgttgtctaatattgactccacctgtagtgcctctgaaattttgacctggtataaaatctttgaatgaacagggattctgaaggacagcccatttctgcctttatcatccatacatggactcaaactgttcttagcagatgggcaaaggattgaataattccaccatgttaatgtatttgtttttcacaatctctctgctcagttaacatttacttaattatttgtaccgtgttctagttagaaatgcccaccagctgctcatcaactacataccaaaccttggtgttctcgaagggagatctgagtgtgctgagtgggatgatcatgtcagtcattcctcaatagacatctactgagcgcctgctgtgtgggggtcattgttagctgtaggagttacagagaaaagaaaatattttaactctggagaagctcatgggtgttttcctagcagtattgaaaggactcaaaagatggttcatccttcagccccaaggtccattttgatcctttccttgtggattgaggattttttttcttttttttggtggagttttgctcttgttgcccaggctggagtgcaatggcgtgatctcggctcactgcaaactccacctcccaggttgaagcgattctcctgcctcagcctcccaagtagctgagattacaggcatgcaccaccacgcccggctaattttgtatttttggtagagatagggtttctctatgttggtcaggctggtctcaaactcccaatctcaggtgatacgcccacctcagcctcccaaagtgctgggattacaggcttgagccactgtgcccggccagattgaggatctttatgtcctactggggccagaggctgggaaggcagctccagttagagatgctgatgatgatctagaaagcggtgaggctcacagaaggcaaatgacaccccagggtcacctggtggtctggtgaagattttggggagggatcccagtcattgcactaaaaaatattttggagacgcctgaatttggaagtaggagaaaagcttaattgctgtgatgcaggaacatctccaaggaggtggggagggcttgaagcctgcagatgttccagaacagagaaagctctctcctttccttcctcctcttacctggcatgcttcctcaccccaggatctggaaggagttcagatgctctccattctggggcctgaggacagaactcaagagttaatcaatgtaatgtgcttagaaccacacctggcacagagtaagtgctatgtaaatgtctgtttattgttgttatgctatgatgataactggtcccaatgatctaaccaggcttttcatctgagtggctcatcagcagtggtgttgctgggctgaaccctacgcaggccaccttttcacagatggcacatctctgctgcaacccttgctggtagcatgtgactagatccctctgcagcctgtgattagtacttacctgggaaggataggagctgggggaggcttgcaggccccaccctccttagagcagaacagagggttacaatgagatgactgccatggtcattctggttctttccacatagcaaagaaccccaggacgcattttgtacagagggcagcaagaggattccaatcactttgtgaggaggatggaggttcttatttgggaagggggactctagaatactcaaaaagtgtcaagaaatcccaacataccctgctgttggagaggatgccctgtaactatggagtgggcaggttttctcatgtccttggtggtgtgagacctgttgggttatgtcctggtgggttaaccaatcctcccgaacctcgccaggactcttcctagaaggtgctcaagaatttatctggaaactggatttaaaaaacaaaataacaaaacaaaacctccccaaaacaggtaattagggcttccctgacagcagggggctccagtcacccacatgataaatgtaaagcaaacatttccattacagatttgttttggtagcttggttagacgttgagtttaagatacatgcttaaaattcttttacagaggaaatcttaagactgccattatagaagctgcctaaaaagtgagacaagagtaattacttacagtatccagtatctaccagatatgtggcatgataattattaaaaattcataatatcgctatcacccacatttctagaaggtttgctaagtggcaggctccatgctaagaagcgctttacagtcatcatttaattgtcgtaacaatgctgtgatggtaacacatcacagaagaaactagatgcagtatcactgtggcctgcccgaagtcaccttcctcagccctgtctggccccaaagctgtgttcttagaaccactaggccaggccatactgcctaatgcctggaaagccactcttttccttacgaacggttatttgagttctggaaaccagccaagcccttataggaagactcttgttttagattttgaggagcagggagagaatatgtatcatgatctgaaatacaagggggaaaaaagggaaatggtctgatttgttctgaaatctgaaattgaatggaaggtagaatcttttcagccaaagtgggtttttgtctcctgctggggtattttcccagaggtccatattttcagacccaaagtcctttttcctctcctgttgcttcgggattaggccaggaggcaggaaactggcttctagcccaggcttctttccttagcttgggtcaaatccttagcctcctaggatgttcaggggttttatttgcatgtaacgtggggatactcacactgcccctttcagagctcaggttggcaatgccgagtgttgcacagaggtgctgcatcaccgtggtcaggacgatgcaggcaaagaatctaggcactcagtatagaagatgcacgcagacttccttttaaggagggcctgagtgagggaataggcacgctagagagagcagaaagcttcgcagaggtatatttttgggactgatacaaaattccatgcagtgacgttccagtgactcagcccagtgggtggaagtgattttaaataatgacagtatcatcatctccctcctcctacggtgtcacacaccaccaaacacacactcaccggccccagctctccacagggctgaaatgaatggagccaacacatgtggttctctgagcaacagtgtaaaataatacgttttttgtgcaaatgctttctcttccccggaaaccaaatccaggtaaacaaagggtgatttttaaaaagtcaccttgcacatcctcaagttttaaacagtcctctgggagttaagtgattataattatagccaccaccatcagggaagaagccacttgaattaattagaaagggaagccacccaatttcggttaaaaatatttagaaattggtagcattttagaaaaaaaaaaccgcagtaattggaccaggcagcttacagatgcctcttttcgacagaacaataggggaatcagcccaggaaagagggtgcaggccatgaccgggtttggatctaataagtgaccagtgcacggggtggctcctggaaccaaaacaatgcccggcacagtggggagtcttgtgtcctcccggaacccgggggcctccagagggaaggggtcagttaaggacgttgctggggcttctgaaggagtgcagtgaccccaacaaaaattaaagccctggagctagcagtgggggaaacaagagtggtttcctaggagctgcctccttgtgaataaaaatgagtcggagacagaaaaggttggatcggaaaggaaaagaaatgctgagtggcatccactgtgggagccagaggtggcggggaggggggcagggttggagccttcagtttcatcctcacctttgctcatcccagagcctaagtctccagatcgagagctggaaccagacgtgatttattttgtatgcatcatcttaagaagcagttattgtgtactttaaggccaaacatgaattaaaaaataagaggcttaagtctccttgttaaaaatagatttctctcccctcctttttcttggagcatttacttcagaaaccttgtcattgtaaatactttcttctctctttgaaatgtatataaaccctttcgaagtctagattggcatttcccagctttataacctaggaatgtctttctcaaggatcaggaggccatctctttgcaatgtaagcattaagggaggtagtaaacctaggtcccagtttccgagggaagtgaggggcctaacctcagtgggcaccttgctccaagttgcaaaaccaccttctctcataaagataggggacgttggccaggcgcggtggctcacgtctgtaatcccagcacttcaggaggccgaggtgggtggatcatgaggtcaggaattcaagaccagcctggccaacgtggtaaaactccgtctctactgaaaatacaaaaattagctgggaatgatggcatgtgcctgtaatcccagctactcgggaggctgaggtgggagaattgcttgaaccaggacctgggaggcagaggtagcagtgagctgagatcgagccactgcactccagcctgggcgacagagcaagactccgtctcaaaacacaaacaaacaaacaaacaaaaacaaaaacaaaaaagtggacgtttgttcttcttctgagtaaagccaattagctaacacaggcaaataattctgtctagtcctcttacttgacaactagttattgttgatcttgaaaacgtatgtatgggttatacctacttgactatataaagggatgagatttctttctgtctttgcaatctctcagcagattgcctgcaatgtgcgctacattctggtttaatgcttattcaattctcaaagtgtttttgttttctattacttttgtggggaggatttctgggttaggagaagatttagtttttggttatatttccccaacatatcttaccatatgtctggtctgtgcctggcctcctggactcaatccatatttggtaagtacgatgtatgtcaccttggctttttatagctaaagttctcttaaaggactcgaacatttcccaagagattatcttaaagcttggtgaagtaagaatcagatattattattttcattttgtggtggtcccagaaggtaaggggcctgtccaagctcatgtaatctggagaaaagcaaggaattgttaaatatttgtactgcaagacactccatgcctgctgccatatctcccaccctgcaggaacccatgctacgtggatttccactctattataatattacagttttcttttctgtcatctggaatattcacttttccctcaaatctctgcttctgctctgtatcagcatatttgatccactcctaagtataatatgtgtgcaagacaaagggggacacatgtccacagaaagacctgttcattaatgttcacagcagttctattcacgatcgccccaacctggaagcaacccaaacgcctatcaacaggccagtggctaaaccagttgtgtcgtatccatacaatggaatactactcagccactcaaataaactacctatacatacattcaataacattagtgaatttcaaaagtgtcatgctgagcttaaaaaaagccagatacaaaagattgcacatgaatccatttatgtaaatgtatgtaaaagattaccggagtccatgtacgtaaaagactacatatgtgcccatttatgtaaaattctgtaacaggcaaactaaactatagtgatgggaagcagctcagttgttggccagggtgggagtgagagagactgactgcaaatggacacaagaacactatgggatggaagaaatgttctatctcttggttagggtggaggatgcacacatgtatcattcgtcaaatctcaaaatgtgcatataaattgggtgtcttagtctgttcaggctgctcccccaaaatatcacaaattgggtggcttattaactacagaaattgacttctcacagttctagaggctggaagtccaagatcagggtgccacaacgatcaggttctggtgagggccctcttgacaacttcttgctaagtcctctcatggtggaatagatagaggagctctctggggtctttttaacaagggcattaatcccacttacgaaagctccaccttcatgatctaatagcctcccaaaggcctcacctgctaataccatcacactggggcttaggtttcaacatacgaattttggggggaacaaaagtagtccacagaaaagggcatagttgattgtatataagttatacttctgtaaagcttattcaacaaataattatacatttttgtctgtgcacaaaatttgaaataaaaaagaaaaacaataacaaaatgcagtttgctttctcagccaaggtgacctagttcacagatgacaggagagcgacctttctgcagagccctctgcgtgcatcacaagggttgcccctagcccatccccaatctctgaaaagatgcagacagagagctggtcataataacctgcagctgggagtgatgtgctcccagagttcttctcccgggaaagcctgcattgtcaggagaatcacatgcagcccacagctggcgggctttgtgttgaatcatgatgcttttataggaaagaaagggctgtgattcacatgtgtcatcgttgatgggaatattaagggctcccttctcctgggggaaaaatagaaacctctctctttaaatattgcatttctttcaaaacaaaaagtcacttcagctcctccccactgattcatttgagagaaaaagctgtcaggccccgtatttggttaaggcaaatcctttctcagaacaagatagtgctgtgtgtaggaaaatcacctaactcttgtcagtgtttatcagatgtggagagaaaacctgcttctctctttgtcatgtgacccatcgctcctgctggcatcgtgccatcagctgaggggtgactgggtttcccacccacaacaagggttcaggtaggggccatgggcctgaattgtaattcagtgttttgaaacagatagcacagttactagaggctgggaaggaaggatgaagaaggattggtgaatgggtgcaaatatgcagttagataggaggaatacgttctaatgtttgatagcacaacaggtgactgtagttaacaacaatgtattatgcatttcaaaatagctagtagagaagacttgaaatgctcccaacacaaagaaatgataaatactcaaggtgatggatttcccaaatgtcctgacttgatcattacacattgtgtatatgtttccaaataccttatgtaccctgtaaatatgtacaaataccatgtatcatttaaaaaatgaaaaatataaaatagacatcacgaagtcagcagatatcagaatgggatctgagagagattttaaaagaggcctttgtacacaaatcagatttctattcaccttaagtatgggcttccttgaagtcttaaggaaagaaaatgaaccagactagcatttttcagtccagaaatcacgggctggcaaatgatctaaattctctccagtaactccaggagcaagggagctgagaagaggattggagggcctgaggcagaggggactaatatggatatcaacagcctgaggagctgctactggggacaacttgaggcacaccaaggttaccctctaccctgccatcctcaagtccctcttggttttggaaacctcaagtctatgaagccgatgaagcctcctgaaccacctcagagtggttgggtttactttaacaaccaaacccatcgccctgtccccagggagcttaagacagaggccaaggtgattgaagaaaaaaaaggaaggaaatagaataaagacaagagtcagctcaaaagcttcccctttcctggaattaatggcagcctcaatttattctcatctgtattaaaaattgttaagtaattaatgtgcacatctcttctgaagctgatgtcatgtaagacactaggaaaactgagacctagtccttactctcaaagagttcccggctcagtaggggaagctgctacagaaacccgatctcatcattcagtgttttagaaacagtaacagtgataacaggctggtggggtggagttgtgttgagaaaacagagacagcatccatggttccagacatcctgatgatgacaataataatagtttacatttattaaatgcttactgtgtaccagacattgtggtaggtttttatggcatatcttcccttttccttccagcaactctttagaggaagcagtatcatcatcttcagggtcaccttgatggcagagcccactctactctggtggccctgggggtaacaggcaacccttcaggaaggactgtcctttcaccaacaccacctatggctgacagccagcatggttcgtttctagctgtgcttggccgtgaagttcagctgatcctgctctagctatttggtctggtgttgagctttgagatggcccagggagagggaaagcagagacagaggttgagacctgagtaatgaaacggagctgtcagggaggtgggggtgggagtgagagatttgtggacaaaggcagtggttttgggcttgaattgtgtcctccccaaaagataagctgaaattctaaccgcctgactccctgcaggataagaccttatttaaaaataagattgttgcagatgactttaggtcatactggagtaagtgaggcttttaatccaatatagctggtgtcctcctaaaaagaggagaaagacccacggagagaagatgaccgcgtgagaatgaaagcagactggagtgatgcaacgacaagccaagggacacccagcattgcctgttgttgccagatgctaggagagaggcatggaacagattctccctcagaaggaaccaaccctgctgacaccttgatttcagatacctccagaactaggagggatcgatttctgttttaagtgcccagtttgtggccctaggatgctaatcataaacgctagcatgagaaagggcttggtgtgtctgaagaaagatcagaaggctggcatggctggcggtgctgagtgagaagatgggagggcctccatgacccctctggctgggctgtgggccgctgtggccagcgtgcctgtcactgccccctggtggccaccgtgggatactccgagctgcacactggccttgggccaaagaaagaacgttcagattgagttaagagagctgggttgagcctacccctcaatctatttctagttaggtaactcgcattgccactttgctcctctgtcacataggaggatgattatgacatttggcccatccatctctcagggtgtgagtggggagcaggggaaactgtgtttggatgcttattgtgaatcatttctaccaggatgttaggtgcaatttctcctgttactccacagtttcagcagagacccagagggaaagaaaaatagctgcttatctatgcaggactcattaaacgattataaaatccattttgagacttttaggtcttggtccttacctaccgggcgactacacaagaagaggctggggggacagagcaagggacgggcagaggggagttctttagaatgagagctgttggagggataaggcaggagcatctccctgtgccctcttcctgtccccaccaccaccccacaacaagcctcgtgagattttgaggcttcaaaacaccccgtagagagcttgacaggtgcactggggagttgcagggacaaagggactcatacttgagccacatttcaaaccctaaaggccgagcctggttagagtggcctatggtggcaggatgaagagagggggcatgcagtgagctgcactcatagcccaggatgcaggagggtgcttcccacggctggatgaggaccccacagaagagagcaggcactgagttaacttgaatgggactctgccccaaaggaccatctgcaaggcaaggtgatcccagcagagtaactcaggggggagtggacttcagaagccaggggctggggaagtcatacatgacaaagcttgaggaacatcatcggggacctccaaggaacctacaggagtccacatgggagagagtgagcatggggtgtgtcacgcccagggcactgattccagaaaactcctgcagtcatcaaaaactgcactggagctttctgctccttatccacatccccaaagttggaggtgccaggaaagtatttgagcaagataaggaaatggagagaagtccccagtcttctccttccctgtgttgagtttttgagcccatatcggttctgagttttaaagtggatgtgggattatagctttggtagtcgaccaaactatctcagagtagactgaactatcccacagttttatggggcctcattctgccctattctggactttccagtatctgaaaaagaagacccttcattaataaaagggatgactggaaaagctatgggacctttctgagaattcatccaggcgcagggaaaaataatatgagagaagttgctcaaagaggtagaggtcagaaagagtcaagactttttctgttggtaccatttggaatattactctctcaacaaagaagtgtggttaggtaaatgttagccttggaaccttctttcccagaaataaaaggatcaacagggcccactctccttattgtatagcccagtgaatatttacttaagggaactagcccagtgagtatttacttaagggaaatgttttaaacagttatcaaatatggagtattagaagccattgttctctttcattaattttatttagattgaatcctgatttagcaataaaaatgcacgtctccacttaagaaatgctatttgccttcaaagaaggaaatgagactttcttaaattgtgctttgctatgatgttgttgaattgagatgattggaagagattatgattaagatatcagtgtcatatgtcatataggtttgtaggcactttgaaatgaataggaatgcattaagtcataaaatattattagaacagctgtatagtttacaaacaatctgatgcatactgagtaccacaaattctggtgcttgagtctcatacatactgctgttggcatttgtcagaaattctttggctaagagtaaaaggaacccaatttaaattagcttgagctgaaaaagaatacattggttcatataattgggaagtgtctaggggtgaatttgctttcagagatggctgaatatagggctgcctctctgtgtctcagctctgctatttatgtttcccttcatttcaacaaactttcctcttaggtgggcaagatgtctcttggtcctttctgactcccatgttcccttcttcccagctcagcaaacacagtagaagggaggcttgtttcagcagagtccacagagctataaatcccagaggcaattccacccctgaaccaacctctttggccaagagatgggaagcccttattggccagcttgggtgatgtggccatctctgcagtgggaagctggtgcacaatgatctacagtcctattaggacctcacagaatgggcaaagatccctaaggggaaccagcagaaggggatggaatagagtgctacctcagccaatacaagcccatttttccctttattcacagaattggcactttcttgcctggaattggaattgaaatggcatcccttcactgtgagccactattcttcccatccactgagttagtctgcctgtctgagaccaaatcatgcaactactggcctagagaaagaaactacttcgagtatgtgtagttttctccccaaagcaccagggttttattttttaacccatctatccatttgtttattaattatgtgcatacatttgcatttggagaggattcaaggcatcttataacagcacaaatatgatataatcagtaagatgagggctaaaaacagcaaataccaagtaagaagggcatcagggagatgattgtctaaaagagtctgagctaaacatggcaacttgcagttctgcttttgatactggcaaaagaagctctcgttagaccaaccctcccacaaattgtacctataaactctggacaatcaatacttggaagatggaaatagcatggggtgagttgttttttttttttgttttcatggcttctcagctaaaggcaggcctcattgtaccacatggcagatagctaaaatgccaatccaaaagctacaatccttctggcctgaagaatcagatgataacattcagggcaaccacaactggaaagtgaaagaggggaaatccagacatggaaagagccagagagccccaaattccttatattttggccgactctctgactgaccattaaatcatgcatacatagtgcaaatttcaagcaacccagtgaactgagatttgagccgcaccctgagaggcagagtttgcagttggaatccaaccaagttaattccctgctaaaagaaaatcaaccttcactggaggaagtatggcagaatccagactctgcacaagcccagctttcacaatgtccatgataccatcccaaataagtcaacacactaagaaataggaaaatgtgccacattctcaagaaaaaaagataattagtggagattgatttggatggtgaccccagatgttggaaatgagcagactcataaaagcttaaaataattttcaaagcaggtattataattgcgctaaatgatacaaaagaaaatatgttgtgatgacttacaaaagaggaaatctcagcagagaaatagacaataaaaagaaccaaatgaaaattatagaactgaaacaaatatatacttgaaataaattaagtcattaatgggcttcatagcaaaatggagatgaaaagagggaaaagtctgaatttaaagatagtctagtaaaagttatcctatctgaaggtaggtactttcacttagcaaagtgtagccctaagtttactgtccaccaaagcacagagggaaaccaggtgggttgtcaactgagttgctcacctgaagagttgtgacattatgtttaaggggctctaacagccagcactcgcatatcctgagacacaccttgggccaattactaatctcttttccctccactccaacaccctcctattctctgctctgtgatgctggggtggatattctgcaaactgcatttcttttttgccagctaattctttgttaggttctgccacttgggcaatagagggaaactggaagactgaaggacaaagaagggacctcctttctatttgtttgtcactctgtttgcatttcccctgtagcccccttccctacagctgtaagtggtctggtctccggtttgttccaacacgctccctccagaggtaccagcacctgctgggcagtgcagtgtcttcttcttagaggtctgttgtgccatttgtatgggtccgttttttaagcatttaatttctgacaacttcaaactcttttctttgttcccgcaaccttagaaatgatagctgcttcctgcatttacgatctctgtgtaatctcagtttttcttttgaaattttcagtcctctaattcttattttaaattttctgttaaaacaactcctggggtttctattttcctgacttacccccaactgatctatatccctttttattgactgatgtagatctctgattaccatatgtagggctggcagtggaaaaaattgtgaagaacaaagtttgttcttggatccaagatacctcctttcagagctctgatgcccagatatccaccacaattatgcaatgtcccaggctcctgccagccctagaccccttccattccatcactcatacccctagggactgcattctgataggtagcaataagtgatcatggattttggtgagataaactagttccctaatatgcaagctaaagtgtttccctcccatataacctacttccttggcttagataaacatacttcttagaaaggccttaatggaatgtcaaaaatggaggaaatctcagatgtagtagctaacccatggttttcatgcagtagacatagaaatagccatctcctctgttcacgtgtagaaacatgagtgcttggatattccttcttcttttgacacctttttatctgggccactgggaaagttaaaggagctcagccatgaaaaaagaaacaaaacaaaacaaaacaacaacaacaaaaacaaaccctagagtttcacagacactatttgttggaaatacagcaaattatttttagctggttacagataaattagtttaattttctcaagtagtcagttgaaataaaatgttctaaactttgctttgagtaattgaatgtaatttgaattaggggttgtgtgtaactcttgtatgtttgataatcaacaactatccccacttctttctgtagaaaagaaaggattttattttctgtgactttcagatcacatgccttatgtatatttccatgctcagaaatatcctcctaaccctgcaatttaaccaacaaatccaatgctttaagatacttcgagataatacaagcaagtcacaaggcatatggctcagtaaatggtaactataataacactgtgtcctattgtattttccaaaaatggtcttaacaatcttttcctccccacatattcttttgaaaccttgccacatctccatcaagaaggggaatctatgtcccctccccttgaaactggatgggcttttgtgactgtcttccctggtagagcaggaagaaagtgatatctgagacttctgatgctagggcatcgaaggtgatattgtgcctgccttcgcgctggacagtcttcattgcaaaatgacatagagatagagagggttgctggaggaaccggtggttccagccatcagctatttgaggcttctcatcctaggtgcagacacaccagtgacccttcagagaattctagccccagtcaccatctgaccgtacctgcatgagagacagaaccccctagactcatgaggtaataataaattattgttattgtttgaagccatgaagttttgggctgatttgttatgcagcactggctaatggatacaatatttaatgtttggcaggtattgatgatgagtcacttactatgctaaatgctttgcagggattacctcatttaattctgattatcccagagataagcatttttatccaccctgagagaagttaagtgatctgtccaatgtcacacaacagtcaatctgatatttcaatccagacagtcagactctagagctccgagcatgcaaatactaagccctaccacatgtagcgctccccatattcactgcttttctgctgggtaacagcatcccctctgaccctggcacacccattgctctgtcctccagcagcacagaagcatggtgggtgagcagacaggtgccagcaaggccatatggatccagccaatgctgaaccgcaatattatcattttattcctttggctttaagactatgtgttgtgttttttaactggtggtgacagtggtggatggagacatgctatgtcatattgcccgtttgcacttgatgagtttgtaggatgtcttcctattggaaggttttaatgacatctggggacaggagagggaaagaaaaagaaagaaagaagaaaaaagagagggagggaaggagggagggagggaaggagggagggaggaaggaaggaaggaaggaaggaaggaaggaaggaaggaaggaaggaagaaaagaaggaaggaaggaaggaaggaaaatagtgaaaacatggaacagacacccagaagggaaagggtttggaggaggtcgaggtgccagaggcaagcattcatttgtgtaagattcattcattcattcattcattcattcattcattcatcgtcattcaaacattgtgttgaatgtccactgtatgctgtgccctgcgtggaatgctaatgatggatctaccctctagcaaaaggtaagtcctaccctagttcattcgtacaaatagaggtgcacacaatgtatcatgggagcacttattcctcaacaggcagatggatcagaaaaggattcctagaagaggcgacagctgagctgaggcttaaaggataacacagttaaccaggccacaggtggtgagtgtcaggccaggaaacagcacgagcaagggcatgggatacggtgcatgggagcaggagcacttttgaggtgttggaggtaaaatgcaagttaggaagcactgagagatgagcctggcttagaggtggcagcgagggccttggtggtcattgtcagagctggagttttgtcttgtgagtgatgcggagccactgaagggtcttcaggggactgtgagagaccatacatcaccaggtcttcctctttcttctgccaaactctgcccaggaggatttggtgtctaaatcctgcacattgaagaccaacccttaaaatgaaatttgttcaaattccagtggcaaaatcagagaggaaaatgttctatcagagagaggaaatatttcccaccatgtctgcagcccttaatccgtgaggtcaacatgcccagctgcatggtcttctggcagaagtgttattgcagtcatccacagcatgcttctaggggcaggacttaattgaatttaacagcagctaaatgctcagctaaaaagagaagttatgggccgggtgcagtggctcacgcctgtaatcccggcactttgggaggctgaggtgggcgggtaatgaggtcaggagttcaagaccagcctggccaacatagtgaaaccccatctttactaaaaatacaaaaaattagctaggcatggttgcgggcacctgtaattccagctactcgggaggctgaggcaggagaatcgcttgaacccaggaggcggagattgtagtgagccgagatcatgccattgcactccagcccgggtgacagtgcaggattctgtcaaaaaaaaaaaaagagaagttatggaaaaccgtgatgctgcagtgaaatgaaatcaggctgctatgtgtcaggctgcgatgtggggccctgtgtcctgagtcacacaccaaaacaggaaatcccctattctcatcttgaaaaatttattagtaaaataaagtaaataagaccaagaaaaataaggctgctattatttgaatcatttagtgaaaaagaaaagctttctagaaccaacagaacatgctaatgaacactctgcccccatacttatcagtctgtattggcattttctgtgtaacatacctttctttcctactagaaacagtttctctagttcaggatctatgtcttatttatcaactcccaaaactgtcccttctttgaattcctttgatacttaatacccaagtcactcatttggcatttatgttaccttgtatggtctattgtatttctattctgtttatacatactgactcttgaactagactataaactccttcgaggtagaagtcttgctttgaacattttgtgtccccatttgttatttgttgaaaacaaggcatgccaaggaaggtgctaagggctggatatgggataagagaccctggtctacctttggggattcacaatctggggaatttcctcagggggggcacaaaacctatgagacaatcctgctttcctgctgaacttggacctgggacagggtggggatgggtgaggctggagctgctgcagcagcgtgcctccaatgcctataaatttcctgttggctctcatccgtctgggctgaattttctatcaaccaatagaaaatacagacaggtattatgaaagagggtgttaggaaatcccatgcaattattatacatgtcacaaatgtgtgggtgcatatgcacctgtgagtgtgtgacagacagagagggaggaagagcactaggaggaaatgccatctgaactgaatcttgaaagacaaacgggagttaacgaaagatgttcctgagagagtggcaggtctgtgcttgcatcctgatgtcagagtcagataaactccagaagcctcagggcctctgcactctatcccagtgcttccccagactcctgttgagggcagactcttttagaatatgttaacgaatggatgtgcagaagaaaaccatcttctgagaacaaaattgctctagtttctgcattgctggttttctctgaacctttaatatgctgataggcactcaacaacagaatcctttgttggcagagcacaaattaccctctgtctgttgaacagtttcagaaagtttatgaagcacttttcaatgaggtgtggagtaataaatgattcagcaacacttaagtcctgccaccctaggcctaactggttacactgtcatgaaaatttacaaattacatggtaccaaagacaatataaacacaatctattgggtaaacaattgcatgatggattactgtagacttatcaatagttatggcataattcagtctttatttttgcatatgaaaggctctcactcaagcatttttctgtagctcattggaatacagtacagatggcctggatcagtgcaatgtgcaacaagaggactatatcgtctcagtaaaaaccttgaagagatgaacccatttcagagacccagcaagggatcacctgcatatacaggcattcagcagaaacagggaatttggggatttattcctggagggtagtggaagcttttggaggtcttaaccaggtgaatgcaatgattgggtatattttagaaagctcattcacagggagagaggacttgaagccggggttgttactagagacaaagaaactagttagggaagttatttcaggtaatgaggggagacataatttaggggctaaaccaaggaagtgacaataggaatggagagaaggcacagcttgcgaagcatttaggtggtagaactgattgactcagctctgaggcagctgtgggggtgagaagctggggtgggtgagggtgggaagagggtgggggagggttnnangatttattaatgaaccatgacttctggttcgtgcaacagagtgaagagctgaggccccatggtttccaggcagcctgtgccagtgagagaaatgcagaatagagtttgatttgaactctggctctgtcaacgacttggtactatggccttgtgcaagcaagttaacgtctccaagccttacttttatcttttgtaaaatgggacgatgataccccgctcttgcatgtgtgaaataactaacacatagtctgtgcttcagaagtgaagtcactgctactcagagaacacagaaggagaagcagtttacagagaaagatgagtttcatttcagaaacactgcacttgaggtggcttggacagccatgtggaggtgtccagtaaggcattagatatataggtatggaactcaggagaaagatctgggctggagagagttctaggggccactgactttttgatattaggccaaggcaaggaggtaaatgagaacaaccagagagagtgtggagagggagagaaatgcaggccctaacggacggccttgggagcatcaccattcaacagctgaggaaaggaagcagagccggcaagggagatgttctggagcctgcagggctgtgcagtcagaaggaggcgcaaaccagaatctgaagacgcaggtttgagtctcagctcccttgctgactagctgtgtgatcctcgcaattcaggtaacctctgtaagcttgtcttctcattcgtcaaatgggaatgctgctgataatgtctacttcctggagactttggtgagctaaggtgtataatttttttttttaagctagagagccttataagtggttccatgtggtcattttttccccctagactgaatcggcttacatctaaaagcaaggtcactttaagagggtctctgtgactctggccttgcttgctcagcaggaattccagcctgctcaaattcctctaggcagctctgggatccctgggcaggaggtacagtacctgatgcctgagtgccccaaaccccttccgaggaaacggggccttaagcacaggccctcacgttgtcccacttgacttcaccaccctggctacacctggtgggaattgggatgggccctgttcccaggggagctgaccagctgaccagccgaccagccagcagctccccacgtctgcccggggtgagacaggagaatacggtctggaggcagggaacataagactgattcatgctgacttcctagaactaaatcaaatggaaatacttcagctattacaggaaatatcctcaccattgacacaaggcgtaaacccagtaaatgtctttgtaactttacttgatcctcttcatttacacagggcgtacaccaagtaaccaatggaaacctctagagggtatttaaaccccagaaaattctgtaacagggctcttgagcccctatgctcggggccactcccaccttattttcaataaatctctgcttttgttgcttcattctttccttcctttgtttgtaactttgtccagttctttgttcaagaccccaagaacctggacaccctccactggtagcaagggggccatgtgatagagatcctgcccctctcctgtatggacatttggactcagcaagcgaggccagagtcacagagaccctcttaaaatgaccttgcttttagatgcaggctgattagttgccgaagcccagcaactggcaggatgggagacatggtgacagtgtctgggtggctcatggagcccctcacagccatgggtggtggcaggaaatgggcagaggtgcctggtgcccagggtggggctactctccacctgcctttgtcaggctgcttcccagtttcttttttttggtctgtgttcttgtgtgtctcacaatgcactccatttgttaaagtaacttgagaacgtggccatgtcttgtggcttagaggaggctaattgtcacgggagactctcacgatctctcaggagggagtggagttttctcagaataaagagcatcagctacagtgaagaatggaaatggggctaatgtctattgactggggactggtgagcaagatcatggcacctccgcacacgatgaaatcctgcagctagaaaacagaacaagaaagctctttgtgtactgataaggagtgatctgcaagatattttcctaggtgaaaaatgtgagcttcagaatggtgtagcaaaatgaaactcagaaaatatctctagaatattacacctcatctaatgacgctggttgcctatgaggagggaagctgggggcctgggggcagtgataggagaagaaattttcactaagcattgtgtaataattttcctaaatcttgaatcatgaaattcagtcacctctttaaacaatcaaatcagaaaaacatctattaagaacatgacctataaagttgagcaagtcctatgcttgggcttgcccccgcaatttattgctgggtaaagttgagcaagttactcaacctctctgaactcattttgctcatctgtaacataatcacaggcttgcctccacaatttattgctgggtaaagttgagcaagttactcaacctctctgaactcattttgctcatctgtaacataatcacaggaataataccttcctgatagggctgattggttattgttgttgttttgttttctttctttctttttttcattttttttttttttttgagacggagtctcactctgttgcccaggctggagtgcagtggcacaatcttggctcactgcagcctccgcctctcgggttcaagcgattctgttgcctcagcctccagagtagctgggactacaggcgtgtgccaccgcacccggctgatttttgtattttttagtagagacggggtttcaccgtgttggccaggctggtcttgaactccagacctcaagtaatccgcctgcctcagcctcccaaagtgctcagattacagctgtgtgccaccacacttggctgttgttactggttttcacacaaggcattttccatttcccattttcctcttagcctaatagcatgctccttaagctacaaaactgcaaagcagtgctatcctttgtttgcagttttcctttttctgttgggtgctctccataagataagggccattgaggttgggccaggtaaattaaaaccagcctctactgtactcaaaattatctcttctatttggaatgggctcattgtctttggacccagcccatgcctgacgctctctttctttaaaacgagttcttttcctagccccttcttggtccctcctgcaaagttttctatggattacataagcacttctagattcccggtgaacacagtttaccttaagctattaattaaaacattcgttattattacggtgcccatttcccattatcttcaatcacagtattttgtgcattgtagtcactgaagtgtgaccaacatttcattcccgcatagtgatgcctccagggctcgtggactggacagtctagggtcgtgctctgctctgcaggagacagggagcacccaagccaagttggttcctaccttcccggcactagggggtgctgtcttgtttagctattttcttagttttatttttgcctttgaatagatgtgcctgctgcatttacatctccctgcaaggatagcaaaagctataggaagatgattgtggaaaggaaaatagggtctgtgcaacgagctgtctggcttcctctctggggggaatgagcattaagacattcccaggctcagtaggtctggagtgggaccgagatatgtgcattctagtaactattcaggtgatattcaaagccacagatgggtcttttatttcattcgtgatttgcttttcccatcttttctttaaaatgtgtctgccgactctcactcatggtggtattgcccctcctgggcctgctgatctctgactgtgtatttattagatcttcatctgtgggagtcttctcggcttaggttgggggtgctctctttagggaagatttgcatctgcttcttctgagagccatgggtcactgccagcttggaaccatttagagctcctcgtgagttctggtttaatgaaggtcttaggtttggcctcccctcctcattgctggcccaagagtgaggatctggatcatttgctcttagggtagttctgctcctccctgcttgctcactgcttccagctctaatttctacttatagtttgctccatttcatgtggaggagtcccttggcaacatcctctatctcctacaagcccatctcatctatgttttatctaggatgtaattgttttgcagaaggagagctgtattagtccattctcatgctactaatacagacatacctgagactgggtaatgtataaaggagagaagtgtaattgactcatagctccacagggctgaggaagcctcaggaaacttataatcctggtggaaggggaaacaagcacatccttcttcacatggcggcagcaaggagaagtgccgagcaaaagggggcaaagttccttataaaaccatcagatcttgtgagaactcactcactgtcaggagaacagcatgagggtaaccgcctccatgattcaattacctcccaccgggtctcatatgtggggattatgggattacaattcaagatgagatttaggtggggacacagccaaaccatatcaagggcctatgagaatatttggtctgagatgttatcagtggaagtcttttttttttttaatgtagatgttcttatttctatgagacaaaatggtaatacatctattgtgagggaattattcatcaaacatatgcagttttatcattctgcactgtaggaaggttgaaggaacacgtgtctgggtgtagtttgtgtgttacttctcacagaattactggtgtattatattatgttctattctgggtgtcttgaggcctgataagacaagcatggccatgagaaattctctaattccactcgtgtctccacctacctttttcttcccttttgtccagtaaaggaggtgtctctgttgcatcaaagcccaccccacacagtgggttctagatcccgtccccttcatcttctcaaggaccctgctccattggaatcctccctctgctgcaccatcaactccctcgcagggagacagttcccatcccacattttcccatctttaaaaaacccacccttggccaggtttggtggttcacgcctgtaatcccaagactttgggaggctgagacaggaggatcacttgagcccaggagttcaagaccaacctgggcaacatggcaaaaccccatctttacaaaaaataaaaaattagctgggcatggtggcacccagagagccaggggtcactgccagcttggaaccatttagagctcctaatgagttctggtttaatgaaggtcttagtttcagcctctccccctcgctgctggcccaagagtgaggatctcgatcgtggcacatctaccataatttactcttagggtagttctgctcctctctgcttgcttactgcttccaggtgcttgggaggctgaggtgggaggatcacttcagcccaggtggtcaaagctatagtgagccatgatcatactactgcactccagcctggctgacagagcaagaccctgtcttaaaacaaaacaaaacaaaacaaaacaaaacaaaacaaaacaaaaccaaacccacccttgaccccacctaccctaattcacttttctattcctcttaggaaccagatctctcaaaatatatgtctatagctgccactttccctttttcactctccatttgcctttgcttttacttggtttctatttttagcaaggttatttgcacatattttaaagactcaagagttctataagacttgttatgaaaaccaacagtcctctgctttccccatcagagacaactacttacaactcttgtagctgctttttctttttggcatttagctctgtgtttctgaataaaatgctagtattgggctacttaatgatccctcaattgtgagcagtagctattgactgcccctacagaggaggaggatttagctctcattctttccccttcccacagcacgcacatacactctttccacctcctaccattcctgcatggttacatcttaactttccttggttcagtaatccatgtttactttattttgattatatagtgatatcgagagcagagtcatctagtaagcttagactactttttcttccttacacaacttttaattttccttgggaataatttttcatttgcttagttttctacttattaccagtccaacttcaaactgccataatttatctttctgctcaaaacgtctagatttatgctattagttttgtcctcttgaagaatcccttccaaaacctctgactttctccaatttggattgtctccaaaccaccctcaagacctggtgtagcactgtttagttttgttgtgttttctttttcttttaacttttattttaggttcaggggtacatgtgcagatttgttatatgggtaaacttgtgtcatggaagtctggtgtacagattatttagtcacccagatactaagcctagtacctgatagttattttttctgctcctctccctcctcccaccctccaccctcaagtagaccccagtgtctgttgctaccctctttgtgtccatgaattcttatcatttagctcatacttataagtgagaacatatgatatttggttttctgttcctgtgttagtttgcaaaggatagtggcctccagccccatccatgttactgcaaaggacatgatctcactctttaaaatggctgcatttaatggtgtgtatgtaccacattttctgtattcgagctgccgttgatgggcatttaggttgatcctatgtctttgttattatgaatagaacagtttctttggagatcttttcatcagtctagggattcccttcatcttttgcctgggtcctggctccaaacttttctttcctgttttggtggaatgcgtcttctagttacttcttcagaagtgcatgtgaggtaaaatttttgagaccttgcaaatataaatgcctttattttgacttttcacttaattgatggctaggaataaaaaatctaggcttaaaataatttattcagaattttgaaggctacagtccactgtattctagcctctagtcttgtgattgagaattccaaagacattctgattcttttaaaacttctgttttttatttttagatacagggtcttgctatgctacccaggttggatttgaactcctaggctcaagggatcctcccaccgtagctttccaagtagctgggatgatagacacttgtcaccattcctatctggcattctgattcttaatcttatgtatgtgacacatttttctcttggaagcttgtaggatcttctctttgtccccaggtttctgaaaatttatgatggcattctttggggtacgtttaatccgttttgacagtttaattctagaaaaatttcttgaattatttcattggtgatttcttcccttctgtgctctcttatctctttctggaatccctattatttgggtgctggatctcctagactgatcctctaattttcttttctatattctgttttttttttttttttttggcctttttatgcctcagtttcgtttttctagctctctactaagtttttcacttcttccatcatatatttaattaccaagggctttttgtggttgttgattgttctctaaaggttctattttatttgtattcttttctttttttagggttgtaacatctcctctgatctctctgaggacattaaatacagttttcttgacgttttcttcctcttatatagttcccatttttttccaagtagctcttttgcattagagtctttcttcagatatcttttaatacctgctgtctgcttatccttgactgtggaaaccaaaaaagctgatttgaagctttgttcacctgagtggaacttacccactatgagcttcacagtagggcaatctggcttgactatttccttgggcagccctgatgtatcgttaggtgttttctctggattggttggttttccaagagaatctttcctacgtgtgctctggcaggtgaggagggaaagaagcctgaaagtctcagcacaggtaagcatacagtctcttaactgtcctatttgatattccagtcaagagactcattgtttgatcttttccagagaatgaatccagtcttctgccaggatggggaagggcatctattaagagtatggtaggggtctgcaaatataattcctttttaaattgctttcaactaattctccttattttaatgccaattcccacccacttgccctacctctatttttaaagtttccggtgccactaactcctgagactttgaaaaatttgaggtgcaaatggtgttggttttaagtttcctcactactgacataggattccaccttcttcagcccactaaattagctaaaacttctccaagtggtttccagctttcaaaatactgtggcatttttgtcctctccccgtcttaccatcctcatgggtttatgttaaagataatcactttagtgtttgtgtgtgtgcgtgtttggcttgagaaacaagtaaaattacatgcatgtgttcccatctactcattaacccacttgctctggctgtgaagctacccctccactgccacttttaccaaattcaccagtgatgttcatgttcccaacaatgggctgtttttcatccttgactcacacaaacactcaggagccttagtcaaaattgaatgctttcttcctgacaggtgctcttctctgggcttttgtgacactatacctttttgggtttgttttctgcttctttgatttctcctccccagcttacttctcaagttcattttcctctgccagtcctctaaagaggggtttcctcaaagcgtgatctcaggccatcctctttctctctctctatgtctaccactttctccttaggaaattgcacactttgttcatggctccaacactgatcttcttttgattcttcatcttctctatctaattgcctacttgtctcccaggcatgtttaactcaaaatatccaaaacagacatcctgatttttttttctccaaatttattcctcattaagtcttcctcacctacctagatatacaagcagaaactggaaagtcattcttgttttctccctcttccttacttctgacatttaaaatatcagcaaggcttcttactctacctccagaatgtgtcttgaatctatccattttctccatcatcactgccactgccttagtgtatgaatcactattatctcttgccttgactattgtaacaatctccaaactgatttccctgctttttctctgggctccccaaatcagttctccatacgagtgatcttttatttcttttcttctctatctcttttttttttttttgagacagtctcactttgtcacccaggctgcagtgcagtgttgtgatctcagctcactgcagcttccacctcctgggttcaagtgattctcctgcctcagcctcccgggcaactgggattacaggtgcatgtcaccatgcccagcaattttttgtttttgtttttgtatttttagtacagacagggtttcaccatgttagctagattggtcttgaactcctgacctcaagtgatccacccacctcagtctcccaaagtgctgggattataggcatgagtcatcgctcccagccacaagtgatatttcaaaaacagaaaatcaaattattctctcttttaatgaaaatacttttcattgcccctaaaacaaaatccaaacttgttaccatgttttctgcaccagacttgcttttcccactagggccccttgttaattccctggatgctaccacttctgggtactagtctcctgctaggacatggagctctagaggtgccaaagcacatctctctcccacttttgtacatgttgcttctggtcagaagagtgccaaatgagtggaatctatccctgaacatcaaagagctttgagtgaaattattttccaagtttcacttatagcctcctcctttctataggatttggccacaggttcatggaggaagggaatttggggagccgaggaatgagcggggcaggaagcacatacgaacgtcctgcaccaggctgcactaagaaccttccctctgtttgatggctaaggccttgctttgtgagcaagcttgctgtcctaaaaccttcctcccggaaggattctcagtctgttaagaaaatagaggccacccaaacctttgtcaagatatgtttagaaatatttgaataatttagctttaacctattccccaccaccactaccacctacttttctttaattctctaatcaccactattcccccctagaatatctgcatgcattcttgaggtacattgtcctttctaatgtagggcttattcagtagggtgctttttaaatatatttttaaaaatcctaaaattctgttcttttttgagatgctttgataagagtaaaactacctgctttctggcctctgtgatagcagcagttctctgagattcattaagttgcttgctggtagctgagaacttgaaatgcacatcagttaattcaaccttgtgaaagaatgtatcaggagacaaaatcaacaatgcagataattcaaacattctaccagcccacacatcatttttcctaacttatttctcctcagagctgccaggctaaaactctgtgcaacatagataataaacaaattcaaatcatcatttttctattcatggcctgttcctgaatttggtcatatgactgtttatgagggagttctcaactgtggagggagtatttttttaccctgttttcagtaactgttctatttttctcgattctgaataggattactcatagcatagatgcttcttggaattggaatttttttctcaaggctttaatcatttctgattttcctcccgtgaactgtaggacagcacatgtggctttcctgcaatgggatcgtccttcaagaggacctcacaggctctccacccggactgtgacgtaagcagctgcagcagccttggatgtttctggatagccagccccatgagaacagctttaaaataggagactggcattgtgatgaagtgtggacttcgctgtcatatagacctggatttaaatcctggcttcagtgtttatggatgacgttggacaagtcatttaacctccttaagtctcagagttctcattacggaaatggagctcttaatagtacctaccccctagtgtggttgtgagggttgagatcatctatgttcaaagtgcttattatacagagacggggacatgtaagtgctacataaatgttagcttttattagtcactggagtggaggagagaggactgttgcctccttgtcaatgtccccatcctgggaagcctgcctgtgtgcaccaaggcccatctgacccatatatcagaaaaggtgcccttctagggagcgacaccccccaccaagccccccagtcgctgtccatgctttcctctaggttcaaaatgcagctgcatctgtgcagaaaccaggtgttgcctgtgagttctgcctcgctggccagaggtggaaggaaggaggaaaggagaggggcctccatacttccagagccccactgggggttaccttcgcttgcccccactctttttgtcttgctctgaggatgccaggactttaaggacattgtcagcgagcacgtaagttcacccctgcaaggtcaaaggcaggacagaaaggagacccaaaggtcccagttagtcaaggaaaaacaatcacaagaataaaacatttttaaagattaaaataatagctgccatctgttgagcagttgctatgtgttaggacttgtgtgaaacatgttcacacagtctctctgcttcctcacaatactgtgaagtaggtattgtgcttaattgaacataggttcatttaagaaaacaaatgtaaatatcattctaatccttgatttaattacctcaaattcaggcagaagcagatcagcccaccctaatgggcagtgtaccaggagcttcgtgtgtagggacaactttcaccttcaaaatgccctgcgggctgcctcagcttcttttccaccagcccctgggctcccagctgtctcaagaggcagtgttttgctgggtagttacagtgaaagaccggattgtcctgctcatgttacccccgtctccctatttactataatcaggaagtcatgtttttcatttaggataaggcaattactcttctgttgactgaagtccagcaaaaagcaaactgaatctcatttccacattaatgcaatgggggcaggatggagaggcagcctgatttcctggtgtctcagcctctctcttctatatctgtatctcctctgatggaagcatctgtcgtaatagcaacaaccaagatagcattgagagagtaaactattgtagtccctttccctcatcttgggaaatgatgaataaaagtcaccatctgctcccctgagccttgctgtggtgcgacctaactttacacgcaagtacaacgaatgacctgccccatcctaagaagcagtagaataatatgaaaaagacttttttttcctgctctgcctgggtagacaagcaactctttgccaagggaaaggaataagacatatcatgtctctttaatgattgaagatccaggttaactgtggtagaattaagcaaagagcaaacaaatgttctgaatgtgttttcttttctctcagagaaagaatctcagtcatctggactgctttgtgctatatgaaaatctctgagaaccttcaagagcccaaaaacagttctcctccatgctgtatgccatggtcagtggttaaagagaacattttgttccactcctccagctctgccttagaaacccaagccctgcactccaaggctcctggcatcgtacaccagcaccagcaattttctgccaaaagcatcagccaaaatctattctatctatttcagttcctctcttttcatcggattgtatttttacaggtgattgctgattctcacactgctcttcagattcatgtacagctgtggtctgaatgtgtgtgttttctcaaaattcaagtttaaaacttaatcctcaatgtgatagtatcaacagctgcgggcttttggaaagtgaaggtggagccctcgtgagtgggattagagctcttataaaagagattgaagggagctacctagcccttccatctcttctgccttgtgaggacacagtgttcatcccttttgtcttcccaccatttgaagatgcagaaagaaggtgccatcttggaagcaaagagcagccctcaccagacaccaagtctgctggcaccttgatcttggacttcccagcctccaggactgtgagaaatgaatttctgttgtttataaattacctagtctaaggtatgctgttacagtagcaggaatggactaagacacacattgtcaaaatcttcatgagttaaaggtgaaggtacaatcagaactggtgcatggaattggaaccataggtcttagtaaacactgtaaaaatgcactattcaaatctacagaaaatgctctctcttcaagttcagaaagaagctacaatctgcttttcctttttttctgaagggaagtaaaattctatgtttctggactaagaggtctacaccccagtctttctctttctgacatgtatagtaatctttggcaaattactcaagctttctttgttctggtgaaaataaagtgcacaggacagtattactaagaggcctgagcaacattagaggttgataacgatggttccaaaggcctttaagaaggtgtaatgctatgtggatgtttttattgaaaccttccctgggttttcagaattctctttggaattagtcctgtgggaatatgccttttgggatctattctcacctcttattcagtcccccttttcttgcattacaatctacaatttgaagttattctgtcatttaaaaattaggtccatgacctcatcatcaccgggttttcctctccaggccatttccagtagaatgttggtcatattctcatgtgagagaacaaatcagttattcattacatctgatcaatgagctagtactacaccataaggaagtgtagtaaaaccagaaactgggaaacacccgaaaaaatttgctttgtcctgtgttttaatttggggtatgataaagtgccacaggacattaatccagggactgagatagactcttaagtttggcaatcagtgaaagaacttgctgaatctctctagaattaacctaaaggagccagcctcttttctcatgagaacaatttattttagggttagtggtgaattaattctacagtgtttaattccacatataaacttcattttctatataaatgttttgttgtaacatattcaattacttccttttgttgtttttctgcaacattccctttttcaccttttctaacctcttaaaccaaataaaaaactcacttatcttcttgctgttgtaatatttgctttcctttcttgtttatactctgtaatgatgtttacccgatctgtccacatcacctggattccaggtgtaccattcatgccctggggaaagcagtcattcttcaaggcaacagatgcaagaatgagctcatgtcaaatgatattttctgatttttttctccagatgtggggaacgaaattggatcttgtgcttttgggtgctaactttgagccctcttcctttacatctaaatgacaatttgtggatcaatgaggatgtgtcaactagccaagatcgaggacctggaggggtgctctgtggaaactgctttaaaatccttcagagggtgggcacggagctctggttctggtatgttcactgaatctgtagcagtggggaaacttgctgagatttggcattcaagaccaaagagatttacctaggatctgtaccctgttggccagaattattgctactgttgttcttcaattatgctactttttcacttggaaagagatggaaacttgtaaggcagtgaatctatctttactccttttcagatggctgattctaaaggcaggtttaggttcctgctaacccttctgttctgtcctgattgtccgccttactgaaggtctgttttctacagctcacaatagtcgggtagagtccagtgatgccaagccacagaaatgagaccttggagggagaagcactacaggcctttgcttcagtttccatagaaatgagccagaggtggtaccagtcacaggggttcttaaagccagagagaatttattttgagaatcccatcatatagcaaataccactctgcagtagtttttacaggtgtaatttatttcattgctctggatggctttggctcaggctttccaatgccctgttgcagcatttctccttaggagaattctttttttgttgctttcaaacttgatggaaaaagataaccaattcatgccagtcaagctacagattctgaacagagggtttaagataatgtattacattttacatatttacatttaatttatgacatttattcctgaaggtttaggagaaaattcaatcccaactaaagagctgtaattaaaagagcacggagccagcagccacaggcccccagctctggctgaaacttcagctctgccagagataacatttcctgtgtgaccttgggcaattttacagctttctgagctacgatttcctagttggtaaaataaaaggactggattggctgctctttaactttttctggcttctgaatttctctgaatcaatggtgttacgtaatgccaagaaagagattccatgaaaaaatctaactgctctgtcgatgatgattacttagaaatgggggtaaaaaaatttatttgcaggaaggttgttagcagtaacatcataacggaaggaaaaagaaaggaaagaaaagaaaaaaacctacctatttaccaaacttctgcagtgtgctaagcaaattcacaaacattatctcatgtgaaaagacataataatttcagggatttccctcttaaggaagagagatgacattgttgcttgttgccccaaaagtgttgtgatagcaacattcatggagtgtttctatgtgccaggcactctttgaggccctttacacatactgacacaatttattattccaatttacagacgatgcagttgaggcataaagaggttaagtagcttgcccaagaccatccacttaagtagcagagccaaactttaaactcagagagtcaggctcttgaaattgcactgttaactgtatccccaccttgtcttttgctattcattcattaggcaaacatttgatgagcactgactctatgaaggcattaagttaatcccttttgaagattccaagcatgtcaccatatctttgtctttaagaagcttaaactatacacaatagatgatcagaaatgtgtgtgaaatgagtgaccacactcaaccttagccaggcagtacttgataaccatctcctgtattctggaaatgttcataattccattcaagtaagtagacagggcctggcaagaggggtccctgctctgggctcctgccccagaggtcccactctggttctccagccctggtcctctctatggccaaggaatccagggatcacagaatgcacgtacctggagcctgagtctcagccccttctaacctccctgttgggtagttgagaccttgcaactctcttctccaaacccactgagcctacttccagggcttgtactggaagcaaaccccatgagggcagaccacatcccccaggcacatgctcctcagccagagggatggccaagggcagctatttgtgggaggggagtatggacagaccttagacccatgggcccacaaggacccgtgtgtagcaggactgaactgaggatagaaagaggagtgggtgggtcaattccacccacaatcccactgccatgttcagtgcagaactccaaagactgagagaactctacattagaacctggccttttaagtttttatgaagataacttgtcaaggtatgaggacagcccatgtttcaattaaacttgctcacttggtttatagcttttacaatttagacatatgggcatgtgggtttctatttggccccaggatacccctccacttcacctcacgtttactctgtttcctgtgctcaccaagctctagctctttcagtttctttcgttttctagaactcccccaggacggtctaactcagacactctttctggtctgtctgctctttgggtggtgacatcacgaagtggctggttatgaaaggagcactgtgccgtagaactgaggaaagcacaggctctgctagagatgttaagtattctctctccctgaaagctggttcttctgaaatcaaaatattcaggggggaaggaaaagaggcacagggcatctgaattccaaaggactagggcagccaccacttcccggataactgcactccctccaccttacacctaaaacaaggttgaagagtcctgtcaaggccatctcaaaaggagaagcaaagcctgcagaggaggccagcctgagtcctggggtgcgaacgggtgctgggctcagcatgaggaggaggagaccctggccacagttccatgaatctttgctcccttccacattatggattctggtgagtgcctgccagaggaatgtctgacagctctaccctcaactggatcatctttagcccaaattacaataatttaagtgaatcaaattactataaaaagatacttcattattaattcactggacatttactgagggcctactctgtgccaggcaatgctctgaacttgccctacctattggatgctacgtgctaaatgttatagacaatgtactctcgtacattctataaattatataggatataatgagtactatattctctatgctttacatgctatattaaacatcacaccctatagtctacatacaatggataatatacaaaatatattatatatgtattatgtctactagaacagtcttttgccacaataggaatttagtaaatatacattgaatgaatgaatgaatgaatatgatacttaataccatattctagcagagcttggtcattgaagagttattcttccaaacccttccctttcctacccccctcttgaaggctaagaagattttcatctttcaccacctgttctggattcttggaacaggtaaattcattggcctacgcaagtctgagctctaggtctgaacccgcatggacctgagggtgcaccgagaaaagaaaggctgacaactggatcccgggaatgtcaaggccaccctgggcttgaagggaccggccatgcctccaagccttgcccagagagggggttcaggatgctgcgtggttccaggtgatctattgctttctcgagtttaaagttcagaggatcatgaagtaccacagctggaaggggtgtaagtgacactgcctagcctaactctcttaaaaatcatagccctactcctgcctccccaaatcagatacgacaggcataggctctgactgttccttaagtcttagtggcaatactccctgaccagttttgcggggttgctcccagttccattgcttttgtaacaggtggccagaaagcctggggtcccgtgataagagtttcagttctttccaggatggatggaaagaaggaaggaaggatggatggatggatgaatgaatgagcgggtgagcggatggatggatggatggatggatggatagatgggccagagactgggaacggtaatgccggccagacgggtccgagcgcctcgggagccccagccctcctccggctgcggggccgctgctcctgctcccgggccgtcacggagccctgagggagggggcgggcgagcgggggccttggggcggccagggcgctgggagggaggactgggcggtggggaccggaggggagggagggccttggaggcggagaggagggacgggctgggagagggcccggactaggggcggcgggcaccgcaggagctccgcgcggctgcagcgcgggcgggagcggggacgcgatgtcgccgccgccgcctccttgcgggccggggctgcgcctccggggctgagccgccgccagagccgacagccgagcagccgctgggcgctcccgcggcgcaggaggatgggctgcggcgggagccgggcggatgccatcgagccccgctactacgagagctggacccgggagacagaatccacctggctcacctacaccgactcggacgcgccgcccagcgccgccgccccggacagcggccccgaagcgggcggcctgcactcgggtaagtggccgggcccctgcagaccctcgcccgcccgctaccccgggcgccttggcccgggcactgagagaggagccggttccctgaggaattgatggcgcggcgggggtggctgggaggaagcagaggcaggacctgcccactgatcagtggacagatgcaagcccagggagtggggtcgaccagagccccttaccgaaggctgcgccgatgccccagcttccagcagcccaatgctctttggccttgtccaaagcttgctcgctggtcgggagaccggtgggtgggaggacagcccacctcctccgcacacatatccctcagccacccaccccctgatccgcccagggccgcctccgccccgctttggcccatctgccatcccctggccacctgcgtacccagccgggtgacttctcatccattggccacctggtgcccctctctccctggatttatacacaaggcgcctgcctgggatcgcctgggtggagtctttcttgtcgcttccccttttctccctctaggaaatgagcccactcgcgggcttcaaagaccagaatcccagtttaggtcaaaataaatgcaccccgccccatcgctagttctgcactttaggttacttttggagcagttgttccatagcaaaggacttctctccctaccctatggtgtcccaatgctttgcaggaggcagggcacacatgtggattttgactataaattaaatactcttgcctaggtcattcctcatccagcagaaatctgataaaaggagatgcaaagaattgtctggtcaggtcataagtcaggattttattttattttatttttttattttttagcagaacaagtaattatagcgcagagatgcaaactgttgccacagactgacctttaatcataaacatattggtgacattaaaaggaaaaaatctcactacttattacatggatgttgtccaaagcaaggtcaatatttggataaaaatgttttaagtgtttcttcacccactgatattattggcatttttgaataatgaaatctaaaatggaaaatagggttaatttgaagcataatgtataacatatggaagaggaaggaaatgcgaattacttttacaaggttaagaatcttaaatccatgcctactaaatagagctgtcactttaatcaagaataggtttctccatttttaaggaccaaagctggctccttttccacattaactttgtgacttggttttattttaaaattgaggactgtctgtgaaagctgtacaatacattacactatatttgtctccagtttttctgactcacagtggcaatcagaatggttattttgtattgccaatgcttttagcaagtcaccaaatggtgtgttggctgaattcagtgtcagcatgaggatagatatgagcctttgagagggacctggtaaatgttagatgtgacagggtttcccaaggaggtatggtacttctcagcagagagtcaaaggccagagatgtactccgaagaaataagggtgaaaagatctagcatgaaaaaaataataataaaaaacaaccaaaaccccgtaagtacagctttaagaaatggttgccgtggtgactgggagtatatggtgtgtgtgtgtatgtgcgtatatgcatatgtatgggtatgaaagagttactatgggatggctctatatgtacatacatgttcctcacaactttcctgacactccttgatttattactctgccatactaattcatatcccatccatcatgagatctggtcactgcaacaggtggggcctgggacagacacactcattcatggtaccctgccaaacatgggccagccctgccagagaggttggtcctgaaggcctgcatcctccagaggagaagctccacttcagccccaggacagcaccctgaaattggcaagacgcttgtatgggcagggtcattttaattccctgggaatttctgttagcctcaggggagagggatatttctgaagaccaagattaaatcaaggccttctttgggggtgtactggcattccctagggcctttgggaatggcttgacttctgtgggtttttcagactgggagctggtcatctttagtcagaatgggtcatccgtgaaagctacagatctcctgggtttcagccaccctgggagactggccaggattctgtattcctttcatcttctctgccccctcacttccacctcacccaccccctgccagtgctttactcatgattttactcccaagctgctgggggacacctaacagcccccagtggctgcgttgtgataggaggccagaatgccactttttcctgtttacagaagttgttttctgatgggagaggtgggtaggagtaaatgaaagagccagtagattcaggagagtccagactgtgaaatcaacaaaaatggcttcactactagaattctagagctggagaaggtctctggaagtcagccacgtgagtcaaatgagactctcaggggaatcatccccatctgaacactccttcaaccactcacagactttaccctcagctcccaagaatcccttctttctgggaccttagtgattctcctttggtgtcaaactgaagccaccttttctcctggctacttcaggacttttgagggctaggggagaagctaattcatctttgcatcttctgtgctgaacacatctgggacttgtaaaagttttcagaatgaatggatgctctgtctgaacctgtcctccgtcctgtcagctcttcctagagccccttctgcctcttctttgcagtacttgctactgaggttttcccacttgaatcaatttaacctgaattcttccaacggcctttctgatcgcacaacttctctttaaaaagttctccccaactttaccctactccattcaaacacctggcccaacccaacgattccatttcttctgtagcctccctgaacccacaacctcaactccacaaacatgtctgcccaagaaaagtcccatttaatcatatctgcttttaaatctcacttgtgtttctcttagcccaatccagattgagggtgtgtcacatgacaggtgttcagcaaatatttgttgaatgaattctgaatttcactgcagggagggggcatgtttttctcccagttccacaaagaagaaggtttcttgcatcttcttactcaaaaaatgatcctgagcctgtggttcctgtttttggagatcatctccactactcaatggaattgaattaattttttagatttgactgttacgtaggctagaatttaagagctagctgaagccaaggtatgtgatatccattgctttcctgtgtcaccaaagtctgtccctctgttacagaaggaaattaaattggtctgacataatttaatcctcataaaatcagtctgctggattgatttttaattctgttgcctggtgggggtctccaaggagaaaggaagtctctgaggttgccatgacccaacctagctcagtcattccattcattaataacttcctagcttcatctcagtgtaatcacaagccccaaaaattgcatccttaagcacactttttttctaatttctccagagaaaacatttcaaaactttctaaaggacttgtactttacatttttaaattgctaaataattgtcttagtataatagaggtttgcagaattacagacagcaaaatgatttacctaaataaactgaaagatagtcaaataaaatggacagcatttaatatcaccattacccatcatttattaatgacttactggggcctggtgctttattgggcactttgaattttctcattgaatcctcacttcaggaacgaggcaggaactataaccaccctccttttacaagtgaggaatgaggctggaagtctgcaagtaacttttcccagttccagcctggaatctagttctatccatttccaaagcctctactcctaaatactgccttcctgattaataggggatatgctatgaaattcttgattttacagttcactaaactcaaagtcaagtctgatctcttgattctactctgatctcagacagcacaattgtcttctgcatcatctctaaggatggaatatcttttccctaaggaaggaggctttcccataactttatgaagcagttctcctgtgagactcttcctgctttccttgtaatttctacccggtgaactccagacccgtgtgatcaagtcttgcacagacaactctttcaatatttgaagatggctgtcacatctcttaccattggtcttccaggtcaaatacatgcagttccttcaatcacttctcacacctcaggtaggcctgaccacattctctaaatacactactcggtttgtcaaagtccctcttgatacaagggacctatggctaactccaagctactgatgtcagctgaacggcatagggcaatacaaggtgtgctatgatatggtcattgaacaaacctctcttggtgcatgtaaaatcaggttaggatttgtttgttttcctgctgttgttgttgccatattaccttgaagactcacattaagcttatgattagttaaaatccttagatctttctttataatcaaatttaagttttatgacatcaaggacattgtattttctctgctatgtacccagcacctggtacagtgactagaacgtaggtggcgctcaataaacgtttgttgaatgaatgaatttctttccttatgaatcctgaattggtataattgacttcagtaacccaaataaggaatttttgcatttatttctgttaaatttcatcttattggtttcagtttaacgtttaaatttgctgaccttgattcattttgatagagctatgaaaacaatattctaggtctttgtttctctgtgttgacagaataagataaaagacatctttttttgctcttttgttcactgaatagacatttggcacaaagatgacctgaagaagttactattatagggaagaaaaacataaaagtggacaccgttcaggtcagcattgtccatggtccatactagaagggcatgtagaaaagcattagaggcattcaggaactaagcagtttttttctgcctggggaggggtcagtgtgtatacagacccctgcaggagcccagcagaggaagggggactgtccgagccaaccctcccaccctggagaggaacaggagtgcagcccagctggcctgactccatccccgagagtgagagcacctgtggagaggacagccagggcttcctggtggataaaccccctccacccacaccccagctgccttgacttacctgttaccgcttgtggttctatctttgaataactagtgattaatgtctgcttccgtcaaggatgactgttaggtttggtaaggcaagggttctgttgggttagataaggtttcatttcacacacagtcctatccctgtacctaacgctgttctggctacatcaggaccctgagtaacttctcataaatgaataaatctaaaacttctgtttgtcaatttcttcttgtagaccccagagatgatgttctctttcctcatcagttctctctgctcaactttttgttgtctgtctgatgggctgcacagtaagaaaacatccccaccttccttacaccccttttgccaaacacaagcctttttgttataagctgtttcttaaaatcactgcaagagacaagtggtaacaaacctaggcagtttgtaaaggtttaggcagcctcatgttcccatggcccttgtctcctgggcagagtatcaggttgtgccattggctctccagacactttgagagtctagtgatggtacctgtcacacttgcattgccagggcttggtcattcctctgtctctctagttagtctgtgagctcttccaggttggggatcacatgattgatatttgcatgcctggcatcttccacacatttgttgaatgactgtgaaaatgaataaatgaatgaatgatctagctgtgcaaatgaagcttagtctgtcattcttataacctctttcctgagtctcatcttagatgcttttgtcttagatatcagtccattgaaccttgtcttcattggacattagataaaacaattccaaccctagccaaagatgaatttaaggtgactccactgcagggtgtagtagtatcctaagtgcattccagaatttcctccagaatatgtagaaagaatgaataagacctactatttgatagcacaatgggatgacgatagtcaataataactcaactgtatatttttaaataatttaaagagtgtaattggattgtatgtaactcaaaggataaatgcagatttttttttctgcaaaaaacattgcagatttttttttcttcggttaataggccctggtgggaagaacctagtcttctctgagtcagaaaggggtcttttcctggctcattctgcactcagcaatccctcaggtttggactcctggaggtccaaccttcaccctgggatctgtgcacctgtgatccatagcatcttcctgctgataaggccattctgcccttgtgaagttgggtgtctaaacctgttctcggacaatggtgctgtgccattcatcccaggagccctcccatgtcaggcctacagcctcgagacactctcagcagacctttggcctccgctgcaaaatcctatccctataaagactccttcagagcctctctggccagtctatatgccacatttactctcctctgcagagcagactcgaggggtttaccctgagcccaatcatgatatagctcctgctagcttggctaccaggaacgcttgcttcctcacatgcctgactcccactctgtctcatgcccaaccacagccatctctcttgagaatgttgttcttttagaatgttgttatgtgctgatttgtgtctcccccaattcacatgttgaagccctaaccccctctctaccccggtacctcagaatgtgaccttatttggaaagagaatctttaaagaggtaatcaagttgaaatgagttcattagggtgggccctaatccagaatgactggtgtccttatgaaaaggggaaatttggagatagagagacacacagggagaactccatgtggagatgaaggcagagaccggtgatgctgccaccagccaaggagcatcaaggaaagtccactgaaaaccactggaagctcagagagaggcaggggacagattctccctcagggcctccagaaggaaccaaccctgctgatatcttttttcatttttgatttctgtgggtacatagtaggtgtatgtatgcatggagcacatgagatgttttgatacaggcatgcaatgtgaaataagcacatcatggagaatggggtatccatcacctcaagcatttatcttttgagttgcaaacaatctagttatactttgttatttcaaaatgtatgattaagttattattgactmtagtcaccttattgtgctgtcaaatagtaggtctcattcattctttctgcctttttttgtttgtttgttttttgtaaccggcctgctgatatcttggtcctggacttctggcctccagaactgggaaacagcaggtttccgttgtttaagccatgcggtttgtggcactttgttatggcagccctagcaaactaatgcaagtgtgtttatgagcactaacactgtgaacatttggaaataataagagagacggatttccactgttacttcctcacacttttttctgagattggatctatttcctggctgtttagattcaaatagcatttatttgtatctactatttgcatttactatatgtgagaatttttctttttgacactagtttatatcaccctccgaaataacctcataaaccattgttctcatcacttgccagatgaggagctgggattcagtgagatgaagagactgagccaggccaccagcttggaagtgggagagctaggatcagaattcaggtctcttgtttctgaattcagggcagggtccattgtgctgtgctgctaagcacgaatgtagtaccctcccccaccccatctgccttgggcttttctgaaaatattaaccatttagcgtgggagcctcctgctagcatttacaaggctgagtcctgcagctctgcggtgcttacactgccctctccctgtgctgagtgcccgtgctgctccaatctccatctccatagaaagggttgcaggaggtgccccaggtgtcacctgcatcccagtcacctgacaggcccattaaacaggaacagtctttaggcagaatcatatatttttttctggtttcaaatgcagtgcatgctcctaattaaacatttaaaaagcatagaaaaagcacacagaggaaaataatgcctctctcagcatttaggtttcatctttcaggtcccatgaagacgatgctgtatttgcatcttatacgtgaaggtgatgtttaaagttccggatggggggatgggaaaaattcctcaaactgcttggaagctcaaaaaccaagaaaaattatatttgttcatttttgtatttaggaaactatatggaggtagtgggagcccaagtctagtttgaatggaggaagagaaagggggaaaggtcatggagaagtaaagggatttttctttttttctttcaatactgggcaaatatacttgaattcaggcaaattacataccaggtaattactgtaggtgattcctccatgtttccctcttacctccccctcaagcccccacaacaggctcaggctgagtatgctgttctatatttttcctagctgttttctgggatttagtctctttatgggttgtattagtctgttttcatgctgccgacgaagacacacctgagactgggtaatttataaggaagaagaggtttaatggactcacagttccatgtggctggggaggcctcacaattatgatggaaggtgaaaggcacatctcacatggcagcagacaagagaagagagcttgtgcagggaaactcccctttataaaaccatcggatctcatgagacttattcactattatgagaacagcatgggaaagactcacccccatgattcaattacctcccacctggcccctcccacaacacgtgggaattgtgggagatacaattcaagataagatttgggtggggacacagccaaaccatatcatggatatagaaacatggctgtgtgtgtgtgtgtgtgtctgtgtgtctgtgtgtatggctgggtgtgtctgtgtgtgtgtgtgtgcagggaccagctttctgagtctcaaatgcccttgaggtcagacaggttggctgcccagagctatggctggtaccactccataggcttccagctctaggtctttgtgtcagatgggataggtacctaatgtctgcctacatctcaccatgtggcttctgtgtaatgaagcaaaaccaaaagtctgggtaggtttttcttaatctaacacaatctgctttacaaatgatgccagcttctcctagattctgggattaggttgcctaccagtcttcacttgtggtgatgttgtgagtcttggtctttttctatgtcttcacaggcattttagtgggcagttaggcaaagctgatgccctttggcctggatatccaacccagggattcttgaccttcttctctaagccattatcctgaattctgatacagccacacccacaggatcacccggccagatccggtctctgtttacaatttcatacacttcctccccaactagtgagccagcttttaacaaggatcatgacctcgggtccctgggcctcaacctgctctcttcatccatcaccctccctgctactttgtttggagataatataatagttgcaatgttaaagaatttgattttttttttttttttgagatggagtctcgctctgttgcccaggctggagtgcagtggctcaatcttagctcactgcaacctctgcctcctgggttcaagcgattctcctccctcagcctcccgagtagctgggacttcaggcacctgccaccacgcccggctaattttttgtatttttagtagagatgaggtttcacagtgttagccagggtggtcttaatctcctgacttcgtgatctgcctgctttggcctcccaaagtgctgcaattacaggtgtgagccacctcacccggcctaggaatttgattttaacaacaggcatttatcagctgtgtgaccctcagcaagtttcttagcctctctgggtttcagtttccacattgtaggatgggacttatcgaagaattaatgcattcacaagtacaaagggcttagtgtttcagtgttgtgcattctagcagccaggatcccctcacatcctcacgcttgcaccaggcttgtcatgccaatctcaaaccttgggtcacccttcccctctgttccttacactcttgttttggagctgcccagcatttctggaaaaagtcatgcatgttatgattgcccctataagcaattcatgctctagaacaatgatctcaccacctctcagcaattctattcattcctcattaatatgcggtgacagaccccatataatagcccctgatgctatcctatactttccctctgaatataaaaaaaaaaatcacagacttgccgtgaattctcccatttttccttccagtgacccagcatacatccttcttgccatctgagcatttctaaacatctttagcgatcctttcctcctagtctgtccatttgaattctaagtgcactgacaaggttgccccttgttgtaaccatatacgggaacctcacaggcagctccatttggatgaaggtctactctgcatctccatgggccctccccaagcccaagccacatccgtcttccacttgaacatctgccatagcctgcttccattcatacccttgacaattcattcttcatgtcataggcagaacgatcttttaaaaacatatgtcaggtcctgtcactctcttgtttaatgccttctgatagcttcctgttctactatgtgtagaataaaatcccagtcccttccttggcctccaggggcctgcatgacgaggtccctgctgattttccagcatgatttcattgtttactctgctctgttttttgctcagcgtgttccggccacgcttgattcccctctgttctctgaatacatggagccccttcctgtcacaggccttcacacttgctgcaatgtgcttcctccccacacccgccccctctgtgtggttaactcctcttcaccctttggctctcagttcagatgtcacctcctcagagagaccagccttccccagtggccatctggtcatttccttcctaacaccactgcctgtcattgtcttgttcgtttactgtttatttcttgactctctcgcttcaagaggtcaaggatctgatggactcacccactgttacagtccaagtgcttagaacagtgcccagcacagagtaggcactcggtggatgtttgttgaatgaagggaaccctccacaccttttgtaccagttagggattgcatctggctgcctgaacagaaaccaactccaggaatgggatttagcccatggaaggtctgcacagaggtctggaggtcggcggccacacccagtcacggacactgtggaggagctgggctcctttggctttattgctctgccatccttagtgtgtggatttcatcctcatggctgcgagatgctgcaccatcttatttcaaatgggaagaaggagacgggcagaaaggggcattctgcctgatctgttccttatctgtaaaatgacagttttcctcaaacccagtaaactttgcttgggtcttattggtcagaagtgtatgatgtaggtgttctgggctacaagggtgtctaggaactcaaaacttttagctttttaccctatattgaccaggcattggatgtgggcttccccagcaaggggatgtgatgttgtgtgaggtcatttccttccacacagggaactttcaagctaccctaaaagtatcagggtcctcttggcaaaggaaaaatggggagaacagatactgggcaggctgccagcagagtggtcacttctttcatcctatagctgtggtcagagaggagagaagatttccaggaacaagaagggggaaaggaattaggtaagtgaggagggagagaagttctgccagaaaccaaggtgacatgattgctagtgttacaattttgccgtaacaacaataataatattgtttttaatattttcatgtttcaagtaagttcataaggtgaacattctctggaaaaaccacatatgctaatattgaaataatttttaaaaataatgcaataccttaaactttaatcttttagaatggtcttttaacttcagactgtgctgtgtacgtgaaatgcatggtggacattcccttgtcttctgccttattttcctgcaagattaatgccagccagagactgatgtgccagctaatattccatggcaccaatttccagttagtgggaacatttgtgggtgtctgctgtgcagggtcacactgctgctcaggctgggagcttctgttggagaagcagctcgcagccaactggcaaatttaaagagttgacagtgttttctgtggaagttcaaaaaacccaacctgctgctgtctctagggcttgtggactttagggcgttaagaaactggaaaggcttgcagaaaatagcagggcagtttgggaaactggtcaccatgacaacagggcatggcagcggttacaatggaagcagagaccgcctgtgcacccttcctaagaggaatgattcaggcttaagcacctcaataaacaactggcatgtttgaaaccgaggcctcattaaacgattacctccaagaatcacttttcaagggcagtcttcatagcagtcaggctcacactttcttgctggggtgataagtgatgatgtacaagcacaaacgaacacagctacgacctcatggtgtggcttccattaattgggtgctcagcatgtgccgggctttgcagatttattagctaactctgttatttccattttacagaagggggtagtcagagcggtgggatggcttgtctaaatgtacacgggctgtgagcagtggggtggggtttggaactcaggtctgtctcattctgagccctgtggtctttcctgtacaccagccccttcatggattgctagcttctgtcctcaccgcctttcacctagacatttgcaacaacttttggactagtcttcacacccccagtcactcccactccaatccccttcacattattgccaggtaaatactcccaagtacagctgggatcattattgtgttattcttccactcaaagcctttcatgatttcccactatctactgaatacaaatgtcttagtatggaattcaaggctttctctccagcctctccatacaacctttggggtgatgggtggggcaatgggatcaggtgcctcaaagggcatcccacctgatcccacagccccacctgtcaccccaaaagcctgctgctcctgcccttctgcttcagttatgtgttccctgatagcacacaccatttaggacacttactcccttttgagttttcttatttatgattgtgacttatctctgctattatactgtatactcttaaagacagagccaagaaacagactctgaggtaaacccttactggagagagctctagtaacaccacctgtgatgtgggcctcttacctatctcaagctatatatatatatatatataatatatatggagaatagtataataaacctccatgtacccatcatcagcttcaacaattatcaacatattgcaaagcttgtttcatctctgcctccattccacttcgccaattaaacatttttgaagcaaattccacaagtcatgtaacttcatccatgaatacttcagtatgaatctctaataaactgggactctttaaaaaagatattagattggaccatatctattagattggaccaaaaagatattagattggaccattttgttatttttgtaggttgaaatagtgtaatattagcaatttcatatacttcaaactaatatataaccatgataccatcatcacacctaaaaattaatgaaaacttcttaatttctctaatgtaataataattcagtcagcatcccagtttctctaatagggtgaggggcacagtccagggcagagggaggagtggaatggctgttgtaataggggcttcagctgatgccctggggagctctggagctgggatggccattcagcaattgagaagactgggcctttttaccctgtatcggccaggcgctggatgcagtcttcccctagcaagtaggtgtgaccttgggtaaggtcatttccttccacaggagcagtgcctggagaggcactcagctgtgatcctttagcggctaactctcctagcagctggagaatctggtgctgccgtcccataggaagacctggcagtaatcaccttactcatctttctgcttccctagtggctgcatatcagattcacctggggaatctcaaacaaacgtcccaccccaggcacttctgatttggtagtgggagtgcagctagaaaacctgcagtgtctccatgttctctaggtcagtggagagtgaaatttcgtgggtctggggtggacctgagattctgcatgtttgacaggcttccaagtgatgctgatgctgctggtccagaggtcctagatcagaggttagcaaactttttctgtaaagggacagagggtaaatatttcaggctttgtgggccacgtgatttcttttgcaactactcaacttctctgtttttaatgccaaagcagctatagacaatatataaatgaatgagcgtgtctgtgttccaatgcccactcctgtcctagatgattttgaagcacagccagatttaagagccactgtctttaatccccaaggcagtgtggaagagagaaaaaaaagcataggatttgcagttactagtcctagccctcagaaacatctctrrrtagctcagcacatgctgaacactcaaataatgtttctagaataacgaacagacaatgaattaatggaattaagttcatttctcaccgtgaaggcagtttttaaagtatcttggataacatttgttcatcaaagtattagagattttattatgcaaatcatgctcttgagttgggtgggattcaggaagaatatggcatcacgcagagtaaggtagagggtgcttgaagatcaatttcatcttcataagggattctccttgccttgggctctgaggaatgttgggatgccttaatcccttcagcacaggtcactgttgatttagagagttgggtgcagctaccatggcctgagttgttttctcagctgaatcagattcagacagggcttcttctgagacggtggaatgttcttctaacaggcgtgaggaataattatctcactgtgtctctctgagtttcacttacctttccttaactctgttattgccacaggctgtaatgccagaaatgagggtttttggaaagtcgctgcatgtctgcttggttgtgagtctgggcagctgatgaatgggttgctgttatggtgtttacttttctgaatcaggtgttcctttgcagaggcagggggcttccagccattatgtaagctttcagaaaatacccaatgatcttcttagagaaagagcaccatttaaatagaagctactaaaatcgttaacacggggacccagagagagtgtgcccatgccctttagccatatttgtctcttttgcacataaattcaaaattcaaacgctgactcttcttgggattgcaaaaccctgtagcagtaagcaaaaaattagtgtggaatgtatatgatatacaaaaaagttatatgaaaaggtgatctgaatatgtgtgtaggtacacacacacacacacacacacacaccacacacaaatggagattatatcttcaattgagcatcaaacaccatctggttgcaattgctcaaaacaattctagaaccccttaattgtagccttagacattttttaatataacatttcaaacatatatgaaaatttgaaactttatacgcacatatttcaagctatatatatatatatttggataatattatataataaacccccacgtatccatcacagcttcaacgcattgcaaatcttgtttcatctctgcctccattccccttcatcaattgggtaattttgaagcaaattccggaagtcatgtaacttcatccatgaatactttagtatgaatctctaagaaattaggactcttttaaaaagatattggggctgtcatggtggctcacaccagtaatcccagcacattgggaggctgaggcaggaggatcacctgagcctatgagtatgagaccgtcctgggcaatatagtgaggcctcatctctataaaaaaattatttttaaaaaattagccaagcatggtggtgcatgcctgtagtcccagctattctggaggctaagcctgcttgagcctgggaggcagaggttacagtgagttgaaattacaccactgcactccagccagggcaacagagcaagaccctgtttcaaaagaaaatttttaaaaagtaaaaagatattggattggactatattaaattgtcattttttataggttgaaatggtataatatcagcaattccgtatgcttcaacctaatatataaccacaataccattatcacatctaaaattaatgaaaattccttaattcttaattctctaatgtaataaaaattcagccagtgcccaaattttcccaatggtctcataaatgtttttctctcattggtttgtttgaattgagatacaaacaacatctgcatgttgtatttggtttatatttttcttgtttctttcagtttataggtttcccatttcctccctttccccttcaatttatttgttgaagaaactggttgttttgtcttgtagagtttctaattttttggattttgctgattgcctccctgtggtgttgtttaaaatgttgctatattcagttagacaggaggaaaaccttcaggaaagctattgcgcaacatggtgactagcgttaataacaatgtattgtatagagtagttcctccttatccatggagaataagttccaatacttccaggggatgcctgaagccacaattagtacaaaaccctatatatattgttcttcctttctttattaaatagagaactttcatactttattttaaagaagcactttagggcttttctttggcatatcagaattgccagcatcactactcttgctttggtgccattattaagtaaaagaagggtgacttgaatgtaagcaccatgatacctggacaattgatctgaacaccaagagggctacaaagtaactaacaggccaatggtgtctacagcacggatacataggacaatacatatatacaatacatacaatacatacatacatacatacatacatacacatcccaggcgagacaaagcaggacagcaagatatttcatcatgctactcagaatggcacacaatttaaaacttaagaattgtttatttctggaattttccatttaatatttttggactttggttgaccacaggtaactgagactgcaaaaatggaacctgcagggagggagggacaattgtatttgaatgtttaaaaagtagattttaaatgatctcaccacgaagaaagatatctgagatcatgaatatgttaattagcttgatttagccattcaagaatatatacatatatcaaaatatcatgttgtacaccacatacaaaattttgtcaatttaaaaattaattaattaattgaaaaaagtttctgtattctctgtaaactgatagaacaataggcttgacggaattctggtttgctttttcagtaggaaacttcataggtgatgaggtattctttccatcgtgtggttctacatcaggaaccacacatcaggttatatcttgttttttgtgatgttaagattggcttaggccacctgatctatcctttataaagtttctcatcagctttctacctaatgcttttagcagttattgataatcattgcctacatcaattatttcattaggaattacaaaatggtgatagtctaacatttcttcaacatttattacttggaattcttttataaagaataacttttccccacatcctttttggctttcctgaaaagtctgagtaaatgccaaatgttttccctttaatgatcagttctcagtttctcccctagtatcctccaaaggtggcccaaggagtgtttcttaaagcgtcatgatggattcatggctcattagcatattggatgggttttaactcattgcacttattatcttgtatgtgtatactcagggtttcccatctttggctagtgggatcccccgtttgactcttgactccttttcacacacttctagtagtctttgatagtcctggctttctggtatggtatgtttttctaggcttattattatttctaggcttattatgtttttataggctcattcttttatttttctgggctaggacttggaattaccgatttctctaaggagccctggttcctctaactgaagtactatacttagagcctacagcctgggcacctaggctgcttgttgctactgggttggctgttgtttatatctcttttcactggacagagctagaaactatttttaaagagactatgtgtttgtattgatattatcaattcagatttttcatccttttaaaactttattctttttttttagatgctaaatatcttggttcctaacaacattataagtaagaaactaaggttgctttgtcttatatatgtaacagtattgttaacagtggagggtgtccaggttcttggcatcttgaacacataattggacaaaatgcacaaacaaagcaaggaaagaatgaagggatttattgagaatgaaagtacactccacagtgtaagagcaggcccaagcataggggctcaaaggccgcattacagaattttggggagtttaaatatcccttagaggattccattggttactttgggtatgccctatgtaaatggagaggatgaagtaaagttacaaagtcatttaccacctatgccctatggagaggatgtttcctgttatagctgaagtgtggataggcattatgttccctgcctccagactctattttcctgcctcagtgtgattactgaaaatgtttttaaagattttttgggagttttttgtctttagggtatatcccaatagggacatacagttagattactgtgttttaaagtaaattgaaataatttattgctgggtggctgtatgagggttctccagaggaacagaactaatagtctatacatatatatataaaggggagtttattaagtattaacttacatgatcacaaggtcccacaataggctgtctgcaagctgaggagcaaggagagcccgtttgagtcccaaaacaaagaatttggagtctgatgtttgacagcaggaagcacccagcacgggagaaagatgtaggctgggaggctaggccagtcttgccttttcacgtttttctgcctgatttatattcactggcagctgattagatggtgcccacccagattaagggtgggtstgccttccccagcccactgactcaaatgttaatctcctttggcaacaccctcacagacacacccaggatcaatactttgcatccttcaatccaatcaagttgacactcagtattaaccatcacagtggktaagccatcaacttgctagacaggtaggkkcatttgtttcattttacttttgcatttcaggaaaaattgctgtttctttcatttcagtttaattttgttttatattggkcaaacatttacatggktctaaagacaaatctataaaataagctacatataagaagtttggctttcattatctctgccccctttcctctgattcctttgtcatcctatagataaccattttattagtttttggtttatcttttttttttcaaataagcaaacatatgcacacatacacagaaatctctatatccatatctgtatctatatatttagatgcttttcatttttaagataaaaggcagcatactatacctactgttctgtcccttgactttcactgaagactatatcccagatatcacttcaaagcactacataaattcctcattcctttttatagctgcatagcgctcgattgtgtggatgtgtcctggtttattaaaccagtctcctactgatggccattagggctgttcccaatcttttactgtaacaaatagtcttgtccatgtgtcttttcatttttttccagtgtagatttaggtagatccctaaaaagtggtacagctgggccaaatgctgaatgcaaatgtaattttgctagatattgccaaattttcccccagaggccttgtgccattttgcattcccatcagcagcatatgaaagtgcctgtttccccatagccctgccagtagggtagattatcaaacttagggatttttatcactttagtaggtaaggaattgtagctcacttagttttagtgtgccctctaagaatgaagttgccatctttttatacaattctggaaaaactgccatttctgccctatatacaattctgttcacatctctgggcctgttctttgtttgttttttgtttttgtttttttgaaacagggttttgctctgtcacccaggctgaagcacagtgatacgatcaaggttcactgcagccttgatctcctagtctcaagcagtttttctacctcagcctcccaagtagctgggaccacaggtgagccaccatgcccagctaattaaaaacatttttttcatagagatggggttttgccatgttgcccatgctggtctccaactcctgggctgaagcaattctcccaccttggcctccggaagtgttgggattacaggaatgagccaccatgcccagcttgggcctgttcttttgaccatattcactagttgtaaatcttcatcctttgaaggtgactgagatattttgaaaagcaaaaagtctaaaagcaaaaagttgaaaagcaaaaacctgaagttatttgttgaataaaattgctggggttttgctgtcagatggaacagctgggactggttgggcatctctctcggtacagtcccagcacttctccatatgctctttctgcaagggctagtttgggcttcctcacagcatggtggcccagggcagtcagcatgtttgcataactgctcagaactccagtgcaagccccagttagcaaggtagaagctgcattgccttttatgtcctagtctcggaaattatacagtttatttctcctgtattctattggttataaatgagtcacaagcctgcccagatttaaaaggaggggaatcagactccacttcttaatggaggaatggcaagtttctagaaaagcatggtagttttaataataactataaaggacctgagattttaccctacaagttagcccgtcacagtttcttgaatactggtaagacacgagactccagggtcagaaacaaaggacgttacaactgtagcatagcaaaccttttgagcattagcatatttgcatcagtccctgttcccccaagtctcactggggagaagcaaatgggtccagatagattcctgcacatgttacagggaatttccattcctattaatctactgaaactcttatcacaaagagtaccaattaccttgtaaatggagagtcagcgcccatgtccctttctgcagctttcagcaccactgacctggccaatctcctctgcctacccttactccacattttggaaatggaccttctccctcagtttccctacaccaccatttcccttccacctctgattatgtcttctctgcctcgtcctcttttttagttcctctttcatgatttgtcccatgctctacccacgtctcttcacgcccttgcccagttctcttctcttatccagcaggctctcccagaagactcacctgctgctgacgttatcctcccagtggctgctccccgccatatctgctcttgattccagaccacatttccaaccatcacaaggcatccaaatactgtcagccaagttcctcaaattcaacttgccccaaaccaaattaacctcttgtccctcacacctgcccaccctatggtgccatccctctctgttcatcagaatcatctctggttgttcaggtgtaagactttggggttatttttgtcttattcctatctttctctgcacatctaatcaggcaccaacttctacagtctgtctctgaaatgaatggttgcagtgaattgttcctttctttccaggcccaactgctgccctagttcaggccctcattaatgctccccttcaaatcacctaccactgcccttcctgaatgtgggggcatcttggtggctaggcagtcattcccttcctcccctattgctccatgtgtgtctcttacaaaatcacaagctcagttgaattttgtgtatttatcacacagaaaatccttccttccttccttcccacaaatattcttcagcacccaccctagagtgagtgctgttttagatgctggggctggagcagtggacaagaccaagattcttctctcagagcttacatttgggtttgagctaatggtgatgggtagagaaagaaataaccaaggcaatttcagacattggtaagcaccgtgaagaaaaccaagataataaaatagagagtgactggagatggggaagcctagcagattgggtggtaaggcgaggggtctttgaggaaggagctaacttgtgagtgaagagcaggagctgctttgtgagcattaggggatagagtgctccaggaggggcccccagtagtgcaaaggccctgagacaggaatgggcttaatgtgattgaggcacagagtgaggtgaaagtaactgggggaaactgggagagggatgtggggtaggagaggatgtctgtaaggaggtagactatttaggaccttgtgagtgatgagcaggagtttgggctttattccagtgtcaacggaagcagggataggattgtgtgtctgcactggaacctctaaacctctcgtttacttctgacttttcttcagttcatttctcacattcctgccaaagagtctttctggaggatggatgtgatcgtgtcactcttgtgcccaataatatttcatgaccactatttcctactagacaaatgatgaaattcttggcatggcattccaggccttcagccatcaggtctgagtcttctattcctaccaataccacactattgagtcctcactaggcctgccctttccttccttctctatgtatttagtcttgcaacttcctccgatggaacattttaccttcacccttactcattgtacaaatctaacccaaaagccacccctctgcaaagcctccctaggccctccccaagtggaacgaatctctgttttccccatacgccttttcttctcattgctatttccactgctgtatggtcagccttgtgcacatgtgcacaggtctgcccttccccagatgagtgtttcttggagtcaggaattgggtcttgctcattacctgtcccctaaaaaggcttgccattactgttgtctgagactgacaagtaggaacacactaactttggtatctgtcttgcatttgaagaatgtgataggctattgcttggtttcaaaactgtgggatttggggcatggctccatggacatccagctgtgtggttgcatagctgcataattgtgtgactgtttagctgcatgataatatggaagcatagcagtctggccacagtttgcatggtttcatggctgggtggctccacaactttgacagaaaaccttccctttgcatttctgtgttacatcatgatttctaccagcgttctgaagctgactgtattttctacaggagagccattggcatcttgggtgggactgcagcaagcgttgctaaacactaagcatcccttcacgctcctaccaaatgcagtatggtccccttgtcatcaagacaacccaaaatgcccctgttcctttacaaactccccttctgttaaaatccctagattatgagcacaaggggagtaaggtgaaggaaaagctacaaagaaattatgttccattcattggaagaagcttggagctgaaaaaggatccaaataatcattgagtacaaacgctgaggtttttaggaggcaatcaagacccaagagtttcacagccttgcctgaagtcccatagtttgtcagcaacagaacaaaaaccagaatgcattttcttacctataagatggagatttatgacttatttgtttttgcataacaaatacttgtatattttacttcttcagccagccactgttctaactgtaaaataaaactaattgaatacttgtggcaacctcatggggtcagattacccctgcttggcagatgagccacactgttagtaagacacttaccctctttgtgccacagttctcctataaaatacacccccagagtgttgaggtgcacactgaattctgtaatgtaatgtatgctgaggactcggccagtgcttgatacatgctagccatcatttattacagctgtgactgtctcttcccgtgtgactggggctcctcccaggggactccactgcaccgaattgtataagtgcaactcctttcagttgtcccaggtctaagtatcattcaagcaggttctccattgttcgctttttctgaaatgaccacacacggtcagcgcaggatgaggacatgtccttgggagaggaggtcatctttgcatcatgtcttttagggattcagaatttaattttctgccactccatgtcttgcttgattcttagagtcattcacttctgtaacctttgttcctgccagtgtctgttcttagaatgccgcagacccgcctgctgattgttttgttctagagagagaaccaagagggaagagagacagataaagagaaggagaagctaaatttccatcattgaaaaagagccaaagagccctgtttcctcacacttttttttaagcctcaggaatattttctttgtttccagggacctccttgaatccaggcttgaagtggagcagatgtgtgggagggtatgggagacaacgggcctgagggcagaaaccgttttgtttttttgtttttggaatggacagtgacactggcaaggagattgtcccacagtcagcatgctggggaaagaaagatagtgattttactgttgtcttgaaagatctgattttatttttttgaaaacctccagaatgcttaaataaatatatttgaatgcatctctgggttgttgaatttgttcaaacccaatgaacacattcactattaatgaggtgcttgtgctcctttgaaagcctggtaataatcctcttaaaagaaaattgtacctatttaatatctttctttgtgtataatgctaaatacagcatctaaactggatttataatccacaatgcccaaagtgacttcacttggcacagtcaaaggatactttaagatgctttaaatctaaatggactctgaaaatacacatcttccaggttaattctaatgattggtttgtaacacaaatggggaacctatttctaagaatgatacctggggtgaaatggaacgctttgccttcatgagtctcttaagtccactattatgacctaaatggtcccatgagtatttatttattttgctacctaaattttaattttctttgatgtggattttgccattgggattatatagaaatagacattattgaaaggcttcagatactaagatagaccaaatataaatgtcctttcagacagggcagtggccttaccctaaatgaatgaatgaatttatttattcaacaattatgtagggtgcgctttcaaagtgctagacatagtcytaggcactcaggctagatctaggaggagtccttgtggagtttgcagtctagagcagcgctgtccagagactcaatgttctttgcattgtccaatacagccttatgactatggatcactggaaatggagctagtgctgctgaagaactgaatttttcacatgatttaatgttaatttaaattagcatagcccagtagagctggcggctaccatattggacagcacaggcagaagaggtagatagcatacgaactcatacaattaattattattgttgcaagtgctacaaaagagaagtcagatatgatgaaaagttggtatggggaacatttctagcaaaaggaacagcatgtgcaaaggccttgaggcaggaagagtttggcattttccagctattggaggacagcaatgttattggagcatcatgcaagccatgagtgaggggaggcagtgctgggagcaggaaaggctggatcacatgggagcatgtaggccacaatgaggagcttggacttcatcctaacagcaatgagaagccttggatgggttttgagcaggaaagtcccttgatccaattacattaaagtttttttaaagatattcatcaaatatagcttctgtttttagcacagatgccaatatctcagataagtcttagctgacccttagattaggtgacatttcccagttttattttttcatagttcctgacttctctttcagagcacttacatttataattaactagttgtgtaaactagttttttatttatttctccttctacctgtgttgtccaatgtggtaaccaccagctctaccgggctatataccacatgaataaaatttagacaaatagttctaaaaggcttgctatgaaaatcaaccctgttatgcatcccactttatcagttctcttggagtaactactgtcaactatttaagctcgttctcttgtttcatttccttgtctctaaataattggcaagtcatactctttcttgatgtttcggtctaaggcctgatctattgattaccctcatgaaaggtgaggttttcactctttcacctccatcccaccactgccaatacattgtagcataactcggttagatcagtgttctttgttggtgttttgttgacacttttcgcagctaaaccagattaggattacttttcctttcacagacaatattttatgtttgctgcattaaaaatatgtgtttgtttttttttttttaatgtgaatgcatcactaattcacatcaaaccctcctctggttgtgtaaatctcctttcaatatgtttaagtaaattaggaattctatcacaattttttcttttaattgcccttggagttttctgaactgctccagtctgggctggttgctgtccaggctggctgcatacctcttggccttgactctttctttgacattaacctgaggatttccttagcctctctcctgtgttgaattgatctcatagttcctgtattctgtgtctttctcttccttggtttgttctcttgtttggccaagaacatcctcaagtagctttctatgtaagaggtgacatttttttgaaactttactttwcaaaaaattttttatgccttctacatttaatcgatagttkggcggggtataaaatctcatttccttaaggttytcaaggtgttgktgacaagtctgaagtcattctgattctcaatccttagtatgagatttgtccgttcctcctgcccccatctccctgtgtcttttaaaaaaatctcatagccttcaattatgaaaacattttctcaagttattattattattatatttctccctagcctggtcctctaattttcttatctttcctctcctatcttccatcctacttttttggagatttcttccatattgtcttccaatttttcttttgaatttttcattccctctaccttagttttaatttttaagaactctcttttggttctctgaatgttccttttcatagcatctcattcttagttttttagacgcaatatctttctgattataacattaattaggttttctccccttatagagtttgtttattcaagtttatgtcccccaccccgtctattttgttggtctttctcttgtttcgtggctttcctctaatgtctgctggtcctgaactgttggcttgtatttaaggagagggcactccgatgttggttggaagctccatttatgacgttggggcttaaggtctgtcatcttcactatagagtatctggctggatcattcctttcaggaacttttgatgtctgtattttcaggcctttttgagggaaagggagtgatcagattccactgagcagactctcccaatttcctacctggagggcacatgcctgactgagtaggggaagaagcctggagtcccagtgcttcatattttcagcacaatagccccgacctcaattgttctaagtgatcctctgtccagaaagtttcaccaggaagttttttattagaaaacaaaacaacaacttctttcagggtgaaggaggggcactcattcagatttggtattttggggagaggtccttgggttctaactgcttctgaagccagttttccacaaatgctttctctcccccttccaaaggtatctagtggcttccattcctgagttccttggggacagagggataaaaaacacgttgtactcaagtttcctttttttccccttaggattcagatttcttgaactgctaagatagtaagcacttgcttatctccttcccagcttccaaaattttgtagtacattttctctctcctctttttcctatgagtttatgcctctaaaagttcccttatgtttgttttagtggtatttgggagtgggacagagctcattgcatttgcaatgacaaaatttgccatttaaaaactggaattcaatgagcctttttttttttttaaagccgcttggttatattgtagaaaatggacttcatggttctgttggttttgtattggatggtatacagagtagaattgtatcccccagaaagacatgttgaagtcctaactcccagtacatgtgagtgtggccttatttgaaaatagggtctttacagatgttatcaaggtaagatgagattatatgatattaaggtgaaccttaatccaatggctgttgttcttgtaagaaaaaggaaatttggacacagacacacagagaggagaatgccatgtgcagtgaaggcagagattgaagtgatgcatctacaaaccaaggaacactacggactgtccacagccaccgcaagctaggagagggtgtggaactgattctcagttcctccagaaggaagcaaccctgccaacactttaatttcagacttctagctcccagaactgtgagacagtaaatttctgttgttttcaatcacccagtttttggttctttgttacagcagtcccatgaaactaatacagataggtattaagttacgtgatttagtgttcttagaaatgggggccctttgagaaactttcagtattcttagaaatggaagatgctttgagaaatggaaggtgatttttccctgaagcagcaatttattctctatatcatttgttatctggcagtttcattgagtaaatgtcttaattattcttcaacactataaaattgtcatggtacagaacacatctgatgtgtcttcttatatctggctaacttttaaaatgccaatctgatttatttggaaagctatcaagccaaacagagccagctgaacactgagaaatctaatcagaagaaagggagaaaaagaaaggaaaaaagagagagagagagaaggagagaagggaagagaagggaagggagaaagaaaggaaaggaagggagagagggagggaggaaggaaagagagagagaaagaagcaaggaaggacagaaagaaagaaaggaaggaaggaagaaaggaaagaagagaaaaagaaagaaagagagaaggaaggggggagggaggaggaaacagtgagagaaagagagaaagaaggaaggaggaaagagcaaggaaggaaggagaaagaaagaaaggcaagagaggaaggaaggaaggaaagaaagaaaagagagagaatgaaaataaaaagaaagagaaagaaagtaagaaagaaagaaaagaaaagaaagaaagagggagtccaaatatatcttcattcattttgacctgaactctggaaaatcttccagcaatatgaacccaatatccagattctagtccctccacacagattcctctagggactttctgtttttgcagttgccctggggctatagcttttcccaaagagctagaaaacactagttctaaaggacacattaataaatgcaggtgaccacaaggacttgtggagaacaaagagaaacaatgataagagccccaggaaagacctcactagcagattttctgtctcctttgcatctgtttacctctcgtgtcagagtgaggacctagctggatccaggaaacccaggcaaaatctgcttcccagtagagttcactattggtgaagaaatagccccaaaactagatttcacacagttcaaaagccagttctcccaaaataaatttgccagttagtgaacctacctgaatacctaaggtctttccccaggttttgattctgcctcaacgttgccgcagctgccttggcttagaattgttagtccaggaattcttctaagtgtgaatgactgggctttcctttaaatccatttttgctgttttatgtcccctaaactgtctctttgggcttctgctctgctcctgttcctgcccctgcctgtatctacttctgtttccatggggaagtgtttgggaaattggaaccttgggtccttttttttttacccctcttcaatgaaaagaacatttgactagctcttggctagtatttttggcctttcagtgaaatggttgttggtgaattacaacttgataaaatgatccagaggccagatatcctatccaagaaagcatcttttgctttaggaaggcaatagaaggtcattaggattaggtagactgaattctattctggcttgctttttttttttttttttttttttgagacagagtctcgctctattgcccaggctggagtacagtacagtgacatgatctcagctcactgcatcctcggcctcccgggttcagccaattctcctgcctcagcctcccgagtagctgggattacaggcacccaccaccatgactggctaatttttggtagagacgtggtttctaccatgttggccaggctggtctcaaactcctgacttcaggtggtccccctgcctcagcctcccaaagtgctgggattacagacatgagccaccatgcccagcctctggcttgtttttcactcactgaggtagagctctatatccccaagctccagtttccctgtaaaatggagataatattgccaacttcacagatgtagggattaaatgaccctggggataacttgaatgcttttttaaaaattatgatttacttaaaaatgtgtatattaaatcaggtaaagttactccttatagcttataaacaattataaaacaaaaaataatgatttacaaaggagagaggtgcaaaccaggccagtgacattctgaataatagcattaatctaatataacaaatagttttgttttatggaaactgaatcacaaacattgcttttagtggtagaaagatacatttgcttattttccatttcacttttgcccactggatccttttgatttttgaggcacggtgggccatcatttgaactgttaacactatcacagttatttttcattttaatggtgacgccagctttagccatccacggcacttactgcaagttggtgcatctaaggatgggaactgtgtggccacacagatgaggatgccactgtttccatcacagggctcctgcacgggtgatgattcaattctctcaccctcttctgtatttaaatgactcagaagctttcatccgtgatgccattttgccatcatgaagtatagagatctcatttatatcttccttttttcacacttcaagactattgaaggaattgatgccatttcagcctttaaaacaatacatatgtcatcaccaaatcatggaatcctaataagttgagatcatttggatgattctaaatttgctaataatagatttttttcacaattaccatgaaacagaagaatgatagtatatcctcagatccccccaggaatttgctgactgtcacattttcaggcaaattggccaaaatgtaggaaagtgtctggcatgtagtaggtacttggtaaagaaaagttttttatgaaattcatgccaaaaccatccagtaaagccagagatttccaaactttatacttaaagttccatcaactggacttcaatgattctatgtctcaaaaaaattaaaaagcattagggaaaatattactcaacttaaaccttgacaaagttgaattggaatattaagtaactagcaacactggtgccagaagtgagtaaagttatctgcagagtgcaaaattcgtcacggtccttgcccacagacttgtagtctacataagaaccaaaagggcgtgaagaaattactgtaaaacctatcacattaaggagcaagaggctatggaaaggacacccattctcacaatgagaaaggttgtccttgtagagaaactggaggccttcacccatagacgatccagagtgtgaaaattacagggccaggacacagagcagcttttggaagattcaaaccccagaagctgatagctgctcagactgtgaaagggatcctgaatccattctgccggcctcccccatcaagatggagttctctcaggaaaggacaaatggacaaattccaatttggttgtcagggaaacctctggcaaagcaccaaaaaaaaaaaaaaaagtgccagtctgttctgggaataaaggacagtcatttgtgtgttttctgggaagcaactgtggtgagactggacctttgcacatcgggcacagccaggggcctgatggcaaaggaaactgtatgccaagccccaggaagggcttccttcacagactcatagcatggcctgctactcttccagccatgaccttgggactctgctgcaaggatgccagttagccgattttctgggctcaacttgtgaactgcaaagatgcaggcagggaacagagaaaaccctggatgaatgcgtttggaaatagatcataggcaaagggtaattcatagatgtttggatctggaagacacctgaggatagagaaagccacttttttagactcactccaagaaggcaccttggccatgcttcatggttcgataagcttgggaaatgctccataccctgaactcctcttagagagccacagtgtacattcccatagtaatggttggaactatgtcacatggccacatctagctgcaagggaagctggggaacatcttttagctgagcagcaacagaccatctaaaagccaagattctgttacaatagcaaaagcaaaggcctcatattggaaggcagccagcaatctgacaacagtcccccaaattctggggcatcattttgaaaaaatggtaaccactgctaaagggggctttttccttccattttcattgcatggaattataccagttgatctccacccaggataactccaggacagagcctgtcagcctgtggcggaacttcctcactccctgcagttactcacctctctgccctccctgccttaaacagttgaaagcccagagaactttttctcaggcctcctcattttgactcagctctgtctttctcagggataagcaccagagacttcatctctgcttcactttctttctctctacacaaccccaagtttacttactttcctttattaacacaatcctctaatagtgtgaactacaacaaaaggcaatattgtgtgctttcatgaaagcaaaaatataaacgattgaaaatgtgtgcaattcaaatagctcagaaatgatttgtgtttatttacttatgttgtaatttcagaactgttttatcatcatttctgaatgatatccttctgtgaggttcctgacatgattcctctctttcctagttaaatggggaaaggaattcatgtgtaaatccattaatttgggagaatcttggaagtcaccacccccaagcaaataggctttacttcagcaatttggaagtggtaccttaaaacctttgatttcaatgttcaaatttatagcaagggagttgaatttgaagcaggattgaattaagaataactccactgaatgccaggaaactgcctttgggtggcatttgtctgggcatgacctcagttgtgggcagtctcactggagcaaagagctcgaaccccaaggtggcttttgagacaagggctgggtggagaagtcctgccttgcccacagcagagccacactgggggtatcgtctatttataccactaattctactctggaccaggtccctgctttacatagtatcctctcaattaatttgtagaacagtctcatgagtttagcatcactattcccattttgtaggtgaagaaattgagggttcgagatataaaagaagctgcccaaagttacacagttgaaagtgccagactcaagccaagctttgctttactctaaaacccttttttgagaccactgagtcccagacttttggaattcactggccagcaaaaaggaaaaaaatatgtgtaagatttaaaagaaaaaaaggtgtgagtgtgtgtgcacgctgatcaaggtgctaactttttatttaggggggcatgaaaaagacctgtcatttattacttctactatttcacaagaaaggctctctcacgcatacatgcacacacacacatgcacacatgctgcagaaagcactgttaaattaattcagcaagtatgtactggcacttatgatgtgctaggcactgttctagtcattgcagaatataatagtgacaaaaaaacccaaaaattcttgccctcatgcttaaagcctaggtgcagggtaatagatttaaaagaaagaagaaggaaaggacatagtattaatgttagaactaagtgccataagaaaaaaaaaagagagaggagagggatagatatataaggaagcccttcctgaagaagggacagaaacacaccgatcttgctaagaaagggagtgagcaatcctagcgcccacactaacccaccacgctatctaatttttctcattgtaccatgcgccaggggaattgtctctgtgacccgccttttggaaacctctgccctgtgctgtcctagctccacagaagttgaaatgggagggacctgcatgaagggttcagactctgcttctggttcgtttcctctcaggcttggttggctgaagttttatcttgcctctgacatgatccgggaaattwttcattttgccccaatgtgaatcaatagttcgaaggaagaactgtgaatagaaaacttctgctttctgagggcaaatgctgcagggccctcgcatgccttcctgctgtgctacmtcccctttgctggacttgctgagttagtttgagctggtgggtacttgtttcatctccccatgtgtttctagcctgttgtgggaagaaaatttagacaaagtatgcttgtgctcattttatgaaggttttcctctgggtttttgttgaagttgttaaaagggatatttctcaaacttcataaagatggaaagcatatatggatctcaaaatttccttttctccttttctcactcttcctgtgtgcgggttttttgttgttgttgttgttgttgttttgtttttttttttttgagacaagatctcattctattgcccagtggggtgcagtgacatgatctcggctcactgtagcttcactcctgggcccaagtgatcctcccacttcagtctcccaagtggctgagactactggtgtgcaccaccactcccaactaatttttgtattttttgtagagacggggtcttactatgttgcccaggctggtctcaaactcctggccttgagtgatgttcccaccttggcctcccaaagcactgggagtttataggcataagccactgtacccggccttcttcttctctagatagccacctatcccatgcaaaattccccaccgtcttggcagtctgtgttcccctaggaccgcagtttctggtttttactctgagtacagcatttccatttctcacaaaattccagtttctcacagtaaatagggcaaggtggtgcttggaatcacagagactagagttctaattgttgctttacctcttactaggctgagaccttgggaaaattacttgaactttctcagtcctagttttcttatctgttgtgttagggtaacaagagttcttacctcataggattgatgtggacattaaataaaataatataccgtaaaatttattgtaatttatatgtgccatgcactattctaagagctttgtgtatattaactagttgaatcctccacaaattccttaaaatcagagctattattttagagaagaaggaactaaatcacatagaagttaggctgcttgctcaagatcactgtgtgttcctagcatgtagagtgatggttttcattaatataatctctggtggggaaattaggaaccatctggtcttgtcattggagctcagctatcaagttgctacttaataggtagtttcattaaaaagcagaggactatatcaaagtatatttctcaaaatgttaaaaacttaattatcatacaaataaatagtgagcaggtatcactatctttttaactcattgatgagggtcacagctggatgataaagtcagctcaaaagagaatatgagaatgtgattaacagaagggcgacatgaagaatccttgtggtgatggagctgttctgtatcttggttgcagtggtggataagtaaaagtgcacatgtaataaaatcatataggattaagtacaaatatacaaatgagtacaaattaaacctggggaaatctaaataggacgggtggattgtaccaatgtcagtaccctggataggatcttgtactacaattctgtaagatgttaccattgggggaaattagaaaagagcacacagatcactctgtacgatttcttacaacaatctatagatgattttgaaataaaaagtttaatttaggctgggcacagtgactcacgcctgtaatcccagcactttgggaggctgaggtgggcggatcacaaggtcagaagttcaagaccagcctggccaacatggtgaaaccctgtctctactaaaaatacaaaaattagctgggtatggtggcgtgtgcctgtaatcccagctactcaggaggctgaggcaagagaattgcttgaactgggacccaggaggcagaggttgcagtgagccaagattgcaccactgcactccagcctgggatacagagtgagactctgtctcaaaaaaaaaaaaaaagttaatttaaaaacaaaataaataaatggctcagaacaaaagggaatatgagaaacttttaaaaatagttggtggaaagaaggaaagctgagataagattgctaaattaaatacaaaactagttacatcctaaaggacaaaacaaaaacaaaaaaattccacaaaacccaaacccatagtctttggggttctcttctctatcagacagaaaagaaactcatcatgcatgatcagttctcagaattgtaaactgtttggccctaatcaaatgtgcaaaccaagttgcacgctctatgccaggatctctcaatgcctccagcactatggaaattttgggcccaaataattctttgttgggggtgctgtcgtgggcactgtaggatgtttagtagcatgtgtggcctctacagctgaaacatctccacatgtccactgggggtaaagtcatgctgggtaggagccccagaacacctttaggtgagcttgttgggaagtgctcctagcataacgttaatcatcttttctgcattatcccaatctctggataattgttcttcacaaataaaactaccatttggagggtcactgtgctgaatagaagcacaatgtgctctatgcggagtcacagacttttagcagaacaggatccttagagattttctaggcctgcttcaccctccttgtttcccagctgaggaataccagtggagatggctcggctaaagtcacatagctagttcatgtgggtgtgtccaattcaatcctgtcttcttccaaatggatgtgaagcagtcactatgaagtctttaaaactttgtgggtaccaattatgtgccaggccctgcgctgggctcacagccaggtgatggctaacacgaggtcctgctcttgaggcactgatggtcttcctggggagataaggatgtaggcaaataattactgtgggagggatattcagtagtgcaggctgaggatgaaggctgtgatggccttagagtctcagggataagccctaagggagtctgatgaggaccagagttcccagctccatgatcaaagagaggtggttgtactcattgcagagggaagttgttgttcctggcgcagagggaatgtgaggcccaaaagtgaatctgcccacagtgcaggcctgggccaggttctgggattactgggaggcccagaagacaatgataagcagggggagtgcagaaatggggagctgtgaagaacaagtggaagaaaggagcagatttatagccaagagatcaggccaaagataggacagggtgggcgagtgggaggaatgcaattctgagatggagaaattaagacaactagagttccaggaagaagagaacaactgggtaaaatcacagcagtgttgagagcatggtggtgcccgtggtttactgttagtggtcactatggtttccagaaatctaactgcatgaatggcacccaggaactgaatctgggacttcctggctggctgcaccctgcaaggctcacgtgcttggcctcagagaggaaagggactggaactaggactcagaacaaaaatttggcagagcatgaatccaggtctggctggcacaggagctgcttccaagatattttacatccaaagcaccaacctcacatgttgtggcagttacaggaaggaggcttccaactttagcatccttcaagcccttgcctcgttcctcgtgactcaccagggagagagaaactggaaaacagggaccagaaggatgtagggagaggattagacaaaataagggccagagcaagatgcaaagtggagatgctgcccgccagttctttgggattcagcaggcaagccttccttggggaaaccctttcaggcaaggaggagaacaagttgagatgtaaagcaatgattgtgtgaaaatagataggattgaaaatgaaccaagacaaaattgtatctgcccaacttcttgaattcaggtgactctggatgaccaaatatctatgtaatggcttttcttttgttccttcctttctggataattggattagaaaactctagtaaacctcagttatagcatccctgaaaacacagctcaaaaggggaaaagttgaagagagctggctttcctttctctgggatataagatgtagagtttaggtttcgtgatgaggttttgaggcctttcagaatattaaaaggaagagagagaattctcaggaaagggtggaggtgctgtaggaaccgactatcccacaacggttccttcctgccactccccagaggtgagtggttgtgctctggaggtggaaggggagggaattagcaattttggagtgttcatctttgcaaaagctccctaggtgagtcaggctgtgagcagggtgttgtaggaatatcttttttgttgttgtttttgagacagagtctcgctctgtcgcccaggctggagtgcagtggcgcaatctcagctcactgcaagctccacctcccaggttcacaccattctcctgcctcgcctcctgagtagctgggactacagtctcccaccaccacgcctggctaattttttgtatttttagtagagatgggggtttcaccatgttagccaggatggtctcgatctcctgacctcgtgatctgcccgccttggcctcccaaagtgctgggattacaggtgtgagccacctcgcccggccaggaatatctttaggtaaccccatgccgctaataaaattctccatgtgctgtagctaaatagtttctgtcttagtgtacattgatttcctcgggacctagggccacagctacaggggatttggacctaatagccataacaaaataaatgagaatttggttaatagtagctgatattaaaactaatatttattagcagtttctatgggccaaacatgctgcatactggtggtggcacccacttaggtagcaggtgaaaagttggcttcttttaacctgggattttgcaaccaaagttaagaactccaaatccatgttatagaacataccttatgctgttcactgaacataagaaatgtattcatatatataaccatactttatatactggatagattttgcagtgtcgttctggggctgactccggatccctctccatgaggattttgggtgaagcacctagccgggcatgagacatgaaatttcctttctgcttcatccagagccttttcttcttttatcttcctcattctgcctcctttgctgtttcatatcccaccctggtttgccacagaattaattagcctccaaggaacccccatttcttcatctgcaggtgtgcaacatctcaactctacattttctgaggctccagccagctcccttcccagtatcctactgtttagatctgcacaaggctagggctttgggcttttgaacatttactcccctttgatgtgaactctgcaaagtgcttgattcagctgctcttttgcccaaatggcttttattgctttctgcctcattctgtagtgttgagaagagggacagaaagacgtaacatgtggttatatacggaacacctgggcttttaagagaacaaattttccatctgacaatcaatgatctctagtaagacttaaatgtagatttaacatgaagtaagtaacaagactcacactgtcttcatgacttctggaatccacaggtaggagcagataggaagaggtttccatcctcacagtgtttgactgtgaagtcctgatagtagagaccctatgttattgattattattgtgttgtccacttggtccatacatctccatcaagaaggcgctaactgaccaggaattcctggggtctgcatgaatcccaagatacttatccgtgagagaactttcacggataagcttttccagctgcaagtgacagaatgacctaccaggctgctaagtagcaaggaatttgttatctccatagcaagaaactcagaggcagggaggctccagggtgagctaactccatagcacagggaggccaggcttccaggacttcttccccatggggacaggtcttcattcactctcaggcaacaccattcagaggcaggaaaggaagtttcctccattatctttttcccagaagccccacagaagatgaccttgacatatcatgggacagaattcaatcacattctcaccatagaacacatcactggaaaatgagaggatttaaccattattatctcaaaccagtcatgttttatttcctggggctgggggaagtgctgctggggagctgggagagccaggattgccatttcagcctttgtcataggaaatgaggtctgccaaggagagtgaaaatggctgttgggtggacaccagcaagatggccaagagtcctttgtcagaatcccaaagatgatgggaagtggagaaaaacatggaatgtcttatttcccttttgagtcctaaccacttccactgttcttattttcctggttttgcccattagcccattaccctcttgcctttgcacttgcctggagagacaacagtttaggggctctgctggttcaagaaggactgtgcaggtagcatggccacacaccatgtacaggtaagagagggtatggggggaccagatctggggaggtgggtatgggacaactctgcaaaaccaggtaatctatagcttgggagagcctctcaggcccaggtgtcatgaagcatattttccggcagtgggtggacactcaggcttcagtatgactgccgtggaattgctagcagtggtcagttcttttccaacaaagttgcagtgagtagctatccagccccaccacctctgctccatacctgctcatgaacctaggcatataattattgaagctggttgcaggcatagaagttatggttgtgtcactggaatacctaagtttacagagtaccattaggtattaactgaattcctgggcatggtccctgaaaacagaatgggaaactcccatgatgtgaagtgtgttcgtttccattgctactgcaacaagctaccacaactttagtggcttgaacaatataaatgtattatctcccagctccataggttagaagcctgatatgttgtcatcagagctgcatgccctactggaggctccttgggagaatccatttcctttccttttccagcttctagaggcagcctgcatgcctttgttcatggcccttccttcattttcaaaactagcaacattgcatctctctgtgcctttaaaaacagtcatatctcctttgagtctctctcttctggttccctcttttacctttaaggactttggtgattacattgggcccaccaggatatttcaggataatctattttaagaccagctgattatcaaccttaattccacttacaacctgaattcccttttgctgtggaacctcatatattcacaggttctggtgcttaggagtggacatctttgggaccgagggttattctgccttcctaccatgtcaccagagttgtgctaatacacagagagcttcaggggatgagatctgccattcattgagcaccttctgtgcggcagacagtgttaggtactttataaatgatttcactgcatctcccaaaattcaatccctaatttacaagtgagacaatgctggctctgagaggcttagtgacttgcccaaagtcacatagctggtgacgacagaactcagtccatctgtcctccagtccatgctgccttgtgttaccctttgctctctcccagatagttccagagacttcagaatgtgcatgagcacatgtgagtgtatatgggagggaggacaaaaacatagtaaaaagtcatcttctgaacttgaagctaaagaagttcaacttaaaatagatgagcgtggcaaccagatgtggtgactcacccagggcagaactggtgactgttcagctgctaacgaccaggatgcaggctcaagaaaaccatgtggactaaaccgcagagagctgtcgtttattctgttgatttatgacttgcctgagtctgatcagtgtgggaactgggtaataagaatgtctcagtgtttctccagccctctgtaaaggagagatctgtccttgggcacggtgacatgatgggcagtggagcggtgttcttgtccccggcttcaccactccctagtctccgaagaatagcctcaacacctaattctctgtgcactgattctgtacgtaccaggcagctttctgcttgatttggtatctttatagctgattgcctctattgcaaaagcgtaatttgaagcctcagccaggccctggttgctgcaagatgattacttgactcaatctagatggtctctgctcattcctgtcttataaccattccgaactctcccgactcccatcacggccccaccctctccagggagcaccacactttctactcatgcaaagaaatgggcccataaaattcttcaaattgtctcctcctacttttctatttttttcctctgtgttttcatcttcttttggattgttcctcatatcttatgtttatccctataatagtttgaagtctttgcattctctttctattctaatggttatcctaaagtttatacacacataatttatcaaagtataaagatatcaacatcattccctatttctatgtcaatttaatttcttgctataacaaagacatcagtgcttcagagtaacatatggggctctgccccaggcctcaaaattaaatgactccccagagactgagaccaatgacacctcactgagcgatctggggagactggagggattgggattgtaaactggattctctgtgatactgtgtttctttcctccccaaaatggtaccatttttcatttgagaaaggattatcatctagcactggggatgaacataaccaaatcattaatgaaatagtcacaagtgtacaaaggactttgaacttgaaatataagtcactgtggccatgggccttgtagggaccttgggttacttgttcatctccttaactgcttagtacattgcctagggagcacaagcccagtcttcatctcttgttcatatgaaacattatttgtcttctctgcttgttctggtgtcttgggttagttctcactgtggcccacattgcccatttccacacctgagcacaatgtgagtgttgagtagatctggagaatgggatgcccagcctcttcagggcaagggacccagcctcattcatctgtgagtctccctcagggcccatctggtaacagcatccaaggaacactcatccccttactggatgtccaggagttgcttccctttatggggggctccccagcatgtagtaaggcacctgctaagtgtcaggtctgctctagccactttctttatgctgccttcacaatcatcctgcgaggaggcaactatggtctctgctttattagataaggaaattgagacttgcagaaggaacttgcctaagatcacataacaagtaggtggtgatgaagggactgaaccccagtgctgtttgacggcaaagccaattctcatgacattatagcccctcagcgttagacataaaagcgccaataaaatgcagtgaataaatggatctggttacttttgaaaattccaaagggccttgcttcttccaccaagctcaatgcctgccccaatagagacgattttttgtctgtctcaaggcctcttcattcaagctaatcttcctgctaccccagggactcttgattaaatttgcccaggaaaccccttcctgctttctctcagtatgagcctcccaaaccacacactgcaatgtccatgccccagaaatagagaaagcactgagtttaaacagtgctttctggagtttcttatcctgtggctataagtaaatgaacttgtgactaagcagatgataatggataatcttgagctgagctatttcatatggttcaaggttatgcaattttccaagtttaatccaaatgtcctcaggtcccactggtctttggatataaatgagctgacatggaaagcagtgagctcagagagctatttcactgtttcatgccactacttgttctctcaggaccttagcccttttgcaaagtctcccaaagtatttcagctggctcttacaggtaatatcggccacgtgctgttctgctaccattgggggtcctatttttgctttttcttctttcattttctgctttagaaagtgccccctccctcgatgttcttcctcccatcccatacacacacactgggcactatcatatcttccaggcacatttatttttgtggctgggcatgattgccacttctagtgggcaccgaagtcccctctttattattgccacagccaccaatgcttgagagcagtggttctcaactggtggcttctcaatgtctagagacattttgggttgttataatacaaggtgggagtggggatgctattggcatccagtcgggtagagaccaggggtgctgctaaacatcctgtaatactcaggacagttccctacaataagaaattacccatcccaaatgtcaatactgctgagactgagaaaccctgctccagagccagagtgtgcagaacaaacagagttgcattgtaaagcaggagaggagactctcatccctttttgtgttaagccgtaagcttagagtggcccccaggtagtgttgcctgtactctatgtcttagttaatattttggcaaacagctttctgctttttgcttatggtccctcatctctttggggtcaggttgtggacaggacacatgctcctcccctctgacctctggggcttggcttatcttcacactgggtaaggcttgctgggcctgggtccttcttcccttagagggagttattttcgtgagaccccttaatccctaatgcagatatgcttctggcacccaccagttggtcctgacacatctgaaccccagtgtagatcccagcttccatgcaaacaagatagagaatcttttgtgacttagtgtccaaggagtgctgaacttaggtgagtgctaataaagattagagcttgaagtttacactgtgtgtcagttaggactctttcagtggcaagtaataaattaacaaagaatttgttaatttgttaataaattagcaaagaaacaggtctatattggctcaggtaacaggaaggcctaggatagggctggcttggagtaaggctgggttcaagtcacctgatgtcatggacccagcatctccctctctcaaaccccttcttctgttggcttcattctcaaaaaggccctccctttgccatggccagaccactgccacagccccacctcacagctcccagattcaagtccaatggatagagccatttttctagtagctcctgtagaagccctaagatttactaactcgggccatgcgatgcccctgaaccacatagtctacaagaatgctgagtgtgactggctttgcccttggtcacggactctgaccccgcacagtctgaaagtggggatggggttactgggaaaaggataagggacgttgagggacaggcggctgcacatggcttagaagttcaggctctgtataacaggctgtggtattaggtcaggaaaggaatcactaatgaagaatgtatccttttaaaataataagaaagggttgataattttgtgttttaggaagtcagaatgcagggtgtgtggagcagaggggctcagaaatgtagagatttctaaaggaattctgcgagataaaatacacctgcatgttcctctacttacagttttcatagcccagtaatcaggcacatgctccccttcctcaacctttcagtatcttgaagttataaactgatctttgctcgataacatgccaagatgtattcaacagtgagaaaggagtacatatatttttaaatctttattcatgttatagattttctctaattgcttgtaaaatctcacatctttattttaatcaatgactttctaaaacaatgtctcattattttctttgaaacgttaaaagtggagattggagtaccttttagttccattagacttcaaagtgcattttttgacatatgcaatactatttttaaatataactgttaaataaaaattcatttttaaggaaacaaggatagtagtgaggcttaaataaaataaagcaactaattcagtgcctggaaggtagtgtgttcccaatgaatagaaactcctttctgtttatgtctaggaacatttacaaattctcatgaagaaaaaagaaacagaatacatccactacaacttgtagacatggagatgttcacgtttgttaagaggttatgacctaagatatagcttcaccttaaatctttggttttaaaatatgtaatttaataattataatttaacagtgtaacatgaattagagatcaaactgtgcgagaattttcaaacattattgtatttttcatgctttatatggataaaaacatagcataaatacgatcaaaaactgaaatactaaaactcccttgagatctttcttctttcaggattagcagagacagctgagcaaagtgagagatttttgttcccaagggaatagacagcccagctggggggagaaaacttggacacttggaataagcaagggatcatttagagttaagctgtgtgacactgactgcagatggcaggcatcagcaagcaaggcactgatcagaggttgccccctcaccagactggaaaggtgaaggagggaggaagagcattccaggtgggggatcatgtggagaaataacacctaggtgggcatgagcctgacctttctgaggagcctagggatactcacctgaccagaaccaagcttggtgattaccatgagcccacaggatggagctcttgcaagccagacagaggtgtttggaccagatgcagtggtgcaatacggtgtgagggagaaagacatgctgagggaagatccgtcttcctgtcgtgattaggatgtgctagacagtggggaagagactggagtcaaggaggccagctggaggttactgcagtaatctagaggttagatgaggtgaactgtacctttccagtggaagcataaatagagaacaaagggtgatttgaggagatacgcagggattcgtgtcagacgtgattatagggaatgaaggagaagggaagggaaatgataggccaccagtttttaagtccagagattagaaaattggtggcatgtctgacagaaatggcagagtcaggaaggggaactggcttgaaggtaacatggtaaatgcagtttggatgtattgagtataaagtgactcaagaaacctccatgtgagaaagttagactttcagcttgttctgcagggctgtcaacatcacttcctgaatctctccctcacatctctcttaaatatctcttgaattcatcctgttccactccgcccccatcccattgtttgagttgaggctctcatcacctcttgcctccaattactaccatggtaataggtctagccaattttccttcctccagtctcacccgctttcatccattctcctccatgtctttgaacttttctctcatgttttcattaagcctatatttctgttttcttgactatttagcaattatctaggggtattataaagtgttgcaatggaatatgaatgggactttctttgcttttctttgaaaaaagcaagtaaaggatttagattactttccaataacttatgagtgttgaacattatttcctttagtctaatggcactccgggactagaccacaaggatgacatgatttataaggacttcattgatttccattttcaactcctgccctagatctgagtgtctgcagggtgaagatggcagtttatgcctctgtgagtccccagagcctggtaaaattgctggcgtgtatagagagtcggcaaatcccagttgagatgaacgaatgggagcagagagttgggtatcagatgtgagttaaattagttggaaacaggctgggcgcagtggctcacacctgtaatcctagcactttggaaggctgaggcggggggactgcctgagctcagcagtttgagaccatactggacaacatggtgaaaccccatctctactaataaaatacaagaaactagctgggcatggtggcacacgcctgtagtctcagctacctgggaggctgaggcagaagaatcgcttgaacccgggaggcagaggttgcagtgagccaagattgcaccactgtactccagcctgggtgacaagagtgagactgtctaaaaaaaaaaaaagttgaaaacagacgtggtttctgagagaggaatatcttagaacaaagagtggggaaccacttcttaggctgaccaccttctcggtgatgcatgagctgcgtgttctgatttctaggacagaaactgccaagccctgggtcagtagtgtagagtcttgataagccagtcccagttcttccctaagtctctgcatgaccttgagttcatgaggttttccacagggattcttgtatatctctgcagggtgatccagatattttgaatgggaaacaaagaaatggaaacaaagaaatatcagttttgctgttgttttacactgaagaaaaactaccgtacaggatttcaatttttctgtcttcaaatgccccggttctagcgtgccaaaccaagcagaacttctggttcaaaatggaatccatgcatttagagtggggtcagatcacacaagcaggttacggactttacggatgatgatgttcaaactgttccatcagaaaaaccagccccctccataaatatcaagaacaggaatatgatttaaggcaaagccaactgcatctacacccaagaactttgcaggcacttgtcaaaagggggagctcaaattagatttctcacaagaaaaaagtaagcttaaacttgtttcccaagctacccagggaaagctgcagagacaggaatgggggcttaagaagtcaaattgcccgcatttcagaaaatacaaaatcaaatcagcccacttggagtttttgttttatactttcagtagaaaacccacagcatcagtgtcttatatgactgccacaacagagagtctgggtgtcaacaactacttaattattattattattgttattattatttgagatggagtttcactcttgttgcccaggctggagtgcaatggtgcgatctcagctcaccacaacctctgcctcccgggttcaagcgattctcctgtctcagcctcccgagtagctgggattacaggcatgtgccaccacccctggctaattttggtacttttagtagagacagggtttcatcatattggtcaagctggtctcgaactctcgacctcaggtgacccacccgcctcagcctcccaaagtgctgggattacaggcgtgagccaccgcacccggccaactacttaattattgatagtgagctatgtagtgagtaggttgtcaaacataatcctgttcatcctgactgtgtcctttctaaattgttactgaaatccttctcatttagattgtggctatagatacgggattatccttattaattcaccattgttttgcttttccccctttctttctaaatagtcagttgcatttatcaggtgagttttttggcaaaagccatcattctgaagtggcacaattcccagttacagccttctgagagagatttccaattcggtgagtccagctgggaagataatacatttagatggccaagggaaactctaaaaggaggcagcacccccaaggcaagtctcccttggctggactccctaccgccaggcttgagcccttctaatggatcctccacacagttcctgagctgccattgccatgggacagcatccactccttagcgagatacatatggccatgcaggacttggcctgtgcttctctgtggcccattctgtgctttgccaccagcaacacctcttagacttctctcttaccagcatcccagatatcaccaccagggacaaggaatgagcttctctccctcccctctgcacccccagccctagagcagagtctagcacatcagagaggtgcagtgagtatttggtgtagaactccacgatctgcaaccccctggtctgtttttctagggctctgtccacttctattcagcataaccaagtttcagtagctagccaagcccccaattatctgtccttctaaagaaggtgaggcatagaaagagcttgtgaacattatgctttatggcttacccctgtcacaggcgtcacttatcaggcctctgatatgcatgcagtaaacagaccctgatagagcagcaatctgctctgtaaatctgggtctcctgcttcagctcaacctctgatctcctggttggcctcctggggccccttagtatctggattttagttcctttaggagtcactacatcctggccaacttggcagagttgatctttggtgacattcccttgtccctgcctcttttctccattttctttcacccattcagtgccctctcttgctctcaagaaaggacctgaaatcagccttttgcacattgttgtgcctgggagtggggaactgtgaaattagccctgaccgtgtgtcagctcacctactctttcttctttgatgggagcaaatagatgggagcaagacatctttagagtcacacagatctgggttttgagtcctggatccatcactggttggttgtcttttagcaagttatttggcctctctgagccactgtttcctagtctgtaaaatgagaataacaatgcccacttacaggagtaaatatggcacatggtcaatattattatttagcctcttctgaaaggtcatacaagggacagagctggaatttgaacccaggcctgcctgactccaaaagcagtgcccacaccatgatagcacattcttccctggtacacagtgaaccagccaccaaagacgcttgttgggtgaacatgaatttaagtcatcaatgcagagatgcttaaggccccaagaggttcactttcaaaatggagtcaaattcagagatatgccaatgaagaaagaaaaagcagctcaaatcctgctttgtctcgcaagaaaaaatatcaaaaagcaagtcgttttcttttgatgcaaagaaaacctctttgaaatcctcttactctcagactttcttatgaagcagggagagattttccccaaatcttctttccctgataccactcttctgcttctccatcccttttccacctaaagcctattaaataaatcaacttaatgtttctcttttctttgacttgctttccactggctaattaccgggattccttaaccctgaagcaagccatcagatcattctagcaaacaagaatcttttgcctttaaggattagggaaagtagagagacattgcaaatacacacaatataatgtagtcttttctttaatttaattcctgtcacaaaatgatgtgaatttatcattttctctctccttcttcaacctagaagcaaaccgtgaggtcattgtaacaaataagaatcctgtgccttgaaaagattgggagagctgagtaaaagttaccatattccctcccctggaggtaactaaaatttaaagcttagtgagaatcatagtataataaaaggtcagattctcagctgtcagttcattcatgttgttataacaaaatatctgagggtgggtcatttataaattaaacacaaatttgtttcacacagttctagaggctggaaagtccaagaccaaggggccagcaggttcagtgtttggggaagacccattcctcatagacggtgccatctagtgccctcacatggcagaagagacaaagggcaaaaagggcacaaatgctgtgtcctcacatggtggaagagcaaaaaatggcctacgctagtttccttcggcccatttatacagtagtgattcataagactctgcccttatgacttaatcgctttcccaaatgccctaccttttaataccaccacagctggggagtaagtttcaacatgaattttggaggggagacaaacattcaaatcataccacctgggcaaggaattttaagcatcattgaaaaggaggtgcatttttgaggctggagacccttcctgttctgcacaaagttggccctgtagaccttctagtcccagaatcaaaaagtttgggagtcaggccctcagcaccttactggagtcccatcatcaaatctccccttcccagcagcgaagtagccatctgtggcaagagggaaggaaagccctatatgactctggtctacatgaaccctcaccagcccctgtgcagcatccccagccccatcaccaagctcttcctgtaagctgagttcagcgtgatctttaccaagctgaggttggagaactgcttttgctacagggctttgatgtccatgaggagaaggtatttctccttcctgcagcacaaacccctaaatggcaaatgcaatcgctcataacttcatgaggaatctggagaaggctcaacatactgtcctcaagttttcactcagccctgaaccctggaaagacaccagctttcattgggagtccctgggaaccacagcaaccccttacgaggagggagggatgagtggctggcaccctatgacaagtctctgtcagggctgacttcactgtttatgcgagctgttcctttcactccctgatatttccataggaattagaagagcaagcatggttcatgtttgcacttgctttctctggaatttcagatgtttggtacatcaagggaaaaaatactttaacacatagagatccatatggcagcttcttcctgcagtgatgatacctactctggcaaccagctaaacagttcaagactctttcaacaaatattgtttgagcaacccaggcatggagctcccagaccaatggggcaagcagacatggaacaaatgataccaacagtgatgaatgcaccaaagagaagtgcactactgcaggagtgcaggggagtccaacccggtcttgaggaggagtctgggaaggtgcccctttcccaaaaattcatgtttaagtcaagatggagaattaggccaattgggagagccttcagagtagaaggaacagtgttataaagactgtgaggtgccttcaatgtcctataaggctggagcatagaggacagagagaagtgcataagcccatcaggccagaagaagcaggagagctcacaaagagccttgcagggcacatagggatcggtatgtctatcccttaggtcattaagaagtctatgaagaggtaggccatgatcacatttgtagtttttgtttttgttgttattgttatcgttttttgagacagggtctcattctgttgcccaggctggagtgcagtggtgcaatctcagctcactgcaacctccacctcccaggttcaagtgatcctcccacctcagcctcccaaatagctgggactacgggcatgcaccaccatgcctggctaatttttttattttttgtagaaaagggtttttgccatgttgcccacactggtcttgaactcctggactcaagcaatcttcctgtcttgacctcccaaagtgttaggattacaggtgtgagacaccacacctggccagatttttagctctaaaagaatgcactggctacccattgtagaatgaagtccacaggccgccatcccttctcatcttagtttggcagcctctctcagcccccttaattggatcaccaaaggtctgcagcaccctggcttggtgaacctccctggtattatttcccacctcagagcaatcctccctggagcagagattgaccaacaccagctggctgtatccctgacatgggagctgctgagtgcagaaaatgagcctcgtggtggcttctgagtattagggaatcagtgtctaatctttagtgggtgacccagagggttgagctcctggcaggagaacatttcatgggtctggggagaagaaaatgcaccaaggtagtttaattaaatacactcattttctcactggctgcacttcagtgtgacctacttaattctgaaggcaagttacttggattttagatatgcttcaccctagaggagtaagacatttgaactatggattacctttaaagcaacaaacaaaaggctttcatttattttgatgacaccatacacccactaattattgcctagctctgaaaagggaaaatatgattcattgtagatttttttgttttaataatgtaagttaacacaaatgcacgtgaaaggaaaggttttagagtctggcagatctgggcggaagcctggctctggcaccagcagcaggacctcaggcactttaaattgcctgaccctgagtttcctcttcttaaaaaaaaaagaggtggcagggagtggggatcataacatctacctacaacattgttgtgacaatgaagtagagctgggaatcaaattccaactccatgatcttagatatgaattgtttttcgagtctttctatctttgtatgcttaggtctgaacataaggctggcacaaacccacaaatgtatatttcatttcatttctactttcaacttttgtattaggccattcttgtgttgctataaagaagtacttgaggctgggtaatttataaagaaaagaggcttaattggctcatggttctgcaggctttacagaaagcatggtactgtcatctgcttctggtgaggccttagaagtttacaatcatggtggaaggtgacgggcagccagcgtgtcacagggcaagagcgggagaaagagtggtgggggaggtgccacacacttttaaacagccagatgtcgcatgaactcattcatcatcaaagggatggtgctaagccattcatgaaggatatgccccatgatccaaatacctcccacccagccccacctccaacacgggattacatttcaagacgagatttggaggagacaagtatcaaaactatatcagccttcatcccaacgatgcccagtctttccttttaaacattgctcaagaatcctctgctctgtgaggactaaccatgcctgatttgagccattaaatatcccacagtttcttacgaacaactataatttttttccatctacatgtactgttagggtgccttgaggaacattaccatctgactgccctacagaaagttgggcatcccaaccattgatttaaaaaggtaggacttttttttgtaaaataggcattgcaatgtattgattcctatgtggtgtttctgttcttatgtatcattatatttgactactatttttgatagcatatttgatgattaaatgtgatataataactaaaaaataaatagcctaatattctgggtgagtctaaagctattactaattagaaaagacaaaatgtgacatggctctatttcttaaaaatcattcttatttcacgagtaatatatcaaaaaaggtggtagaaatgttatagataatgcccttttgatcatcccgtgatcctggtcccctgccttttccccaaagacaaacattgttatcagtttgttgggcatctctctagtttgttttctgtgtgtatatgtgtgtgtatgtatccctgtacaaaaatagcataacatagatataatatagttttttaaacataaaagctggccaggctccatggctcacacctgtaatcccagcactttgggaggttgagacaggcagattacctgaggtcaggagtttcagaccagccggggcaacatggtgaaaccctgtctgtattaaaaatacaaaaaaaaaaaaattgccaggtgtggtggtgcacatctgtagttccagcaactcaggaggctgaggcaggagaattgcttgaacccaggagacggagcttgcagtgagccgaaattgtgccactgcactccagcctaggcaacagagtgagactctgaaagctgtcatttgcacatatttatgctctacttgcttttccattcatcactatgtatttctatctatataagtctactttattagctttaaattgctatatagaattccatagtctagataaaccacaatttatttagtaattatccacctgaagaatggctacattgattatatttttcattattacagtggtgtaaagaacatcttcaacaaccccgtttgtgcaatggttaagaggttttctaaagcagatattgaagactgaaattgctgagttattttgatgtgcacattttaaacatgaataggctctgccaattgccctccaaaatggacagttttacctgcacttccaccagcagtatatgagagaatgtgttaacacacatcctttcaacatgtaatattatcagactttttaacttttgccattctgatgggtaagaaatgatatattatttaaattttgcatagctctatttttcagtaattcttcaataagccataagttcccaattaaattacagatacataaagggttcagataggcaagtgttttatattcccctctaacagcacagtgctaggcacagggtaagcacccaagggatactagataattgattgattgctttgagcgattttaaaattttaagaattaaaacaattcagttgattgaattcaaattttgattggccaaaatatatttcttacatctaataaagatgtatcatctaatttctttctttttttttttaacttttaagttcaggggtacaagtattaagtttgttacacaggtaaacttgtgtcatgggggtttgttgtacagattatttcattacccaggtattaagtctagtacccattagttatttttcctgatcttctccctcctcccaccctccaccctccaataggcctcagtgtgtgttgtttccccctatgtgtccatgtgttctcatcattaagctccacttatcagtgagaacatgtggcatttgtttttctgttcctgtgttagtctgctaagaataatggcctccatctccatccatgttactgcaaaggacatgatcttgttcttttttatggctgcatagtattctatggtgtatatatacaacattttctttatctagtctatcaccaaggggcatttaagtggattccatgtctttactattgtgaatagtgctgcaatgaacatgcaagggtatgtgtttttataatacaatgagataccatctaacaccagtcagaatggttattattaaagggtcaaaaaataacagatgctggtgaggttgtggagaaaaaggacacttatatactgttggtgggaatgtaaatttgttcagccattctggaagacagtgtggcaaaacctcaaagactgaaagatgaaaatacctttcaacccagcaatcccattactaggtatatacccaaaggaatatcatctaatttctaatatccacctcagagaaaaatttagtgccaactacagttgatgtggaaatagcctaatgaaaaggctagttgtactaaggtcagaaaatgtcaaggagtaaaaaacaaacaaaaacaaccaggaaaacagctgccacttctttaaaaggctaaccacccccaaaaataattcaaccaaagagtaaaagacaacagggactgtcttcctctgttctggcttagactgaaatacctatactggataatttataagtaacagaaaattatttctcacagttctggaggctgagaagtccaagatcaaggcaccaacagattcagtgtctgatgaaggcttgttctctgcttcaaagatggcacctcttgctgtgttctcacatggtgggtcaatgagctcccttcaacctcttttataagggcaccaatatcgttcatgaagacagaaccgtcatggcaattgcttcctaaaggtcctgcctcttaatactattgcattgggggttagatttatacatatgaattttggggggacaccaacattcagaccatagcagggaggaaaattgcattagaatactttttccctaaagaaaaattccagtgactaagaaaaagagtctaaagtgaaggccatcaagcatcctatcgtactaggtacctttggagcagtttaagggagtcatctccagggcgttttaaaatctctgactgattaaatctgctgactttgtggaaagagatcaggctacaagcagggaaaattgtctggatatgtaaggaaatgaagtaagaatcaaagatcaaagtaggtctccgtattcaagcagaaaggaggccatgatgggcagggccttggccaaggaaagtcagcaactcttcctgagtaaatcagccaccagaggggcattatgattctgaggaccacccctcatgtgcaacccctgggactttgttcccaggcacctgttggtcaccctaggggagcattccatggtaaggttgctgcttgttgggattgtacaggtaaacaattccctgaagagaccatttgagcctgagtaagaaggtgagatctacactgtgtcacacggaagaggaaggaggagttagacatgtggatggataagacatattgccttctaaatgttctccactttgccttgttctccctctcttaaggagaattaggttaatgcccattcaaattcttctctttcttctccctccaatgagaattcagtctttgtcatctatgccctgtatcctctctggtgtagaattgaggaactaggcagagacagggagaagcagcaaggaaaggaaggtggttggaaaaaggatttagctgagagactgcaacctactgctaaactagaagcctcagatgtaaacccagcacccagcatagagcctggcacatagtaggtaccaaataaatagttttcaaataattagctgattgaaagacaagtgacaaaggaaagaataaatcatctgtgatgaggaggaagcagatgaaggaagaatgaaacaggagaaatgttggcagataaaggtggaaaatggaatcgtattgtatagtctcaatttttagaatctatacatgtctatgcactgaagttttgggacacagtaggcaaaatgtcaatagtagttattcctggtagataagattatgagtaattttgtttacttttttcttaccaatatagtacagttttctacatgaaacacctatttcttatgtgagatcataaatgttattttataaaaagaaatgcaaggtaatatggcctgagctgtgtacccctaaaattcatggcttgaaggcctttccccagcgcctcagaatgtgattataattgaagatagggcctttaaagaggtaattaaggtaagatgaggttatttgggtaggcacaaatccagtatgactggtgtcataagaagagattaggacacagacacactcagagggaagaccatgtgaagacagagggagaagacatctatctacaagccaaagagagaggtctcaggagaaaccaacctgttgacaccttgatcttggacttccagcctacaggactatgagaaaataaatatctcttggttaagccatcagtctgtggtactttgttatggcagcctgagcagactaatacagaaggtacacattttaaaagtgtcagagaatgattcaaggagacacaaagaggaaagagaagagcataagagaagtgttttgagcaatttgggaggaaggctctggtaaaatatagagtattgttacaatcctagcaatattgcataccttagaatagtaagatataaacacctttggtgggatagagagctgaatttcatgaccgagttgggacaccccacagtaattaacataaagatatggcagtacctgccttgaagaatctgctctgtggtgctcttgaagcaaaggtgaagaagtttcaaggaagggaggcacctctgagaggagcaaagggagagaggaaagtaagtacgccctcagagaagactggcaggtccaaagggtagcactagagagaaggcaagtgagatttttacttttccttttggctgccttccagttcattagcttgtctgttgtctcctgggcatctttttgggaagagaagaattcaggcccatttcgccaaagacaaataggactctccttgcttctgcctcctgtcctgtcagttccagttgtcggtgtcagcaggctcctgcctcacatgctgctgggtaccatggggaagccatttcccctaccaaaccctatggccaacggcagatgttacaggctggtggttcatcacagggaacagtggtctttcaatatcttcctagtcaggacccatgtcctttgggggctgttgctagtgctacattgtctagtatatgagtccactagtcagtttctctccttgatcattgctgttcaaatccaaatgtgcttctatattttctttagtcaataaacattccaaaatgtactgctcaccatttgaaaaatgacagctttgttgaggtataattcacataccatacaattgacccatttaaagcatacaattaaatgattttttaaattcctggggttgtgcaaccacccccacaatcaattttagaacattttcattgcatcaaaaagaaaccctgaacttattaacagtcactgtcatttcctcccaaacccccagccctacataaccactacttttctatctatagaattgcctatttctgaacatttcatataaatggaattatataatatgtggccttctgtaactggcttctttcacgtagcgtaatggtttcaaggttcatcaatgtcgtagtatatatcagtacttcatttcttgtcaaactgccaaataatattccattgtatatacataaaatactttatttatctattcatcaattgatggatattcgggttgtttctactttttggcttttataaataagattgctaagaacactcatgaacaagtttttgtgtggatacaggctttcgtttctcttgggtgtataccctacaggaatttctgggttatggtaccactatgttcaaccttttacagaattgcagactgaaagcagctgtaccatttagtcttcccaccagcagtgtatgagatttccaaattctctacatttctgagaacacttattctgtatcttttttttattatagccccatcctagtgggtgtgaagtggtatatccttgtggtttttgatatgcatttctttgatagctaatgatgctgagtatcttttcatgtgtttattggccatttgcatatcttctataaagaaatgtctactcaggtcctttgctgatgttttatctggattatttatcttttttattattgagttgtaggagttctttgaaagttagttccttaccaaatatataatttgtaaactttttctcctattctgtggattgccttttcactttcttcatggtgtcctttgaatcacaaaagttttcagttttgataatgctcattatatctatttttcattgttgttgcttgtgcttttggggtcatttctaagaaacaattggataatccaaggtcatgaagacttacacctatattttcctttcagtgttttatgattttagcccttacatttagatctttgatccttttgacttagtttttgtatatggtgtgaagtaggggtgcacttcattattttgcatgtagatattcagttgtcatagcacatgtgttgaaaaactattctttacccattgaagtgtcttggcaccattgtccagaaaaaaatgaccataaatttaagggttgctcaatattttctaagaatgtgtttgtaatagccatgcaaaaggtcacatattatagtattatacatagtatgtggccaacaatttctcatcagattgaagaaatgacactgtcccattctagttcattttaaagatgaaacaaattcttagtaagtggctgagcaatcacagcttgttttacttatacctcagtttagacaaaattattatctgccatgtgttcaggacctgagagcccagacagtgtttgatgaaccagagtttcactggctgtgattttaggagattctttccatattgattgccaatgtcttatactttggttttctgtcattgaggagaatgacttgcaggttgtttctgatgattttggaccaactctctgtgaccaccttcaccaaggaaagccaggtgctcaagctaaggagaaattaccccttgacctgctctccacatggcttctagctaccatttttaatttctgtactcttccctcctgcccagctccatttccaaaatagcaagaagctttggcttggcaaggaatccctggggttgcaatttatcagcaagctgtggacacagctatttcctatcttttggcaaggttcagtgatttgacttgtttcctgcatggaatgaaaattttgtgaagggtgtcaaacaagaaatactctaggggcacataaatgtctcctaatttactggtacagacttcactatggaaaaaatatacatgagtactttgtgaccctcaaaactaacacgagtgttgatctctatgtcagatagatagatgatagatagatagatagatctatatatatctataatatagatgagcctctgcagtctttagaatcccctgccttagaatccctgggggtgggatacagggaacttgttaagatgcatattcctgggcccctactgaatcagaagttctggaggaatgaatgtagagatctgcattttaacagacaccccaggtgagtttcatgtagtttcatgcattaaaatttgagaactgcctacttgggagtttttgctaataccacaagctttggaaacatacggaacctgggttaaacttcaatttcttcttctgtaaaataagggtaattctcctgtctccccagcacgagaggagtggtgtggagtagacatgcaaatagagcccagggtttagtacagtgcaactttcacaacaatgtccccactctggggcacttgatgagcattttgcataaccccaatagggttgccagataaaattgaagacacccagttaaacttttatctcagaaaaataataagttttgaatataagtgtggcagcagtgctgagggcagtttccagagtctagggttggtggaaagatttaggaagttgtcccttgatagcctccatgcctcaacctccagccttcccagaaacactgtgagctcccagattattttaataaatccttttttaaagctttaattctctaatcaatttctgttgcttacagctgagaaccctgactgatacagcatctgtaactctctactcaacaactgaccatctgtcttccattctcctcagttccctgagctctccctgaagtcatcagggagacttaattgaacaatctctcaggcttttcttgctgagagattttcttggagaagtatgtagaggtcatggtccacccaagacaacctgcaaggaggaaggagctagggaaataaaaacctgacctcaatgtgccgccgcagacccttcccctctaaagctaattcctcccattggtcaaaccccactagaagccggtggacaagagagcctgttgacatgtgcattcaggtcagtcgtctcctgggacacagaccagggtagagagaaggggagagtgagactggaggggcagaagaaatacatccaacaagcagggtatgtatattgtcttggctctggtagtaacagagcctgagatggagattttgtgcaagtgactcctaggggcattcctgggagaagagtgtgaaggagggagggagagaagcaggatggggcaggacaaggagctgagcaaagatgtggtttcaggattagtctagcctcagcctgatcctatgggtcactttggagtgaaaggacagaaattgcttagaagcaaaggagctgggctattgtacccactctccccaccaacaggtatttttagttggtcattagcatggactgccactgatattaatataatcggcaaggcttctcctggtaagggggctcccttcagtcaagggcaagccttaggagaagaagccaggggtgagctgttagctaccaacatccaccacacctggggatgggtgcagggtcaggtgtgtggatctgggcaggcactaatagcatctgttggaaggacatacagctctgttgacaggtccaggggaggaaaaaataactttctttccactcttagttcttagctgtgattaattctgtaatgaaagacagattaataagataaaagcaaacagaagctcattaacacgtatattttacatatacatgggagatatctaggcaattactaaatctcaaagaagtggcttggaattccagcgtatgtagcatcttcaacaaaaaccagtaaatttttagagaagtgacaagacaaaggaaaaggactttgagtctctaggggtaaaaaattatgggaaggcagatagacagtagataaaggctagttagtaaagcttgttaatgtagattcctctggtgccctctccaggctgataagggtctgaagttgtcttcagtgatcaacctttgtctttcctggtagagaggggaagaagcctttcctcttgtttagtgaccagtgaaaagtaaatttatgccctacttttaggcaaatggcagggggagggggcaggtgggaggcggtgacagagaactacttctccattgccttcagcttaaaataatccttatgccaaagtggcacattttggggtggcatattctggtctcctacacaggacatatcgctgggtgaggaggtaaaaaaattatttttcctttgtgtttttctgaattctaaaagttttctaacattgaatctatttttcataactagaaaatatgagttaaataaaatccatgcagcaaaatcacctggtttgttacagatagaagtaacagaaaattaccttatattcctaaccccttggggtgtcctcttgaccacactggacagatgacccctgctcattgtttggcaaatgccaatcccccaagctggccctggttgtcacagagcttctctgtttcatcatactcagtaagccagtggcttagcacttagctggttgtgtgactcataaatcaggaatgcaaccagtgtggctaatggagaggggcaagaggcggggataggctgtgccaccaataatcagtgcaatatgtgtgcaggcatcgttagaacctttagatatggtctcacttaatctttacaatcgccccatgaaggtggcagtattatctccatttaatagatgaggaagtctagactggggggttaagaaaccaaagttgtaatttttgtttggccaccagtgaaaaatgaaaactctagaccaaatgatggatttttaaactgtgtttctagcagcgcttaggcttagcaaagatgccggggataggaggagctgctgagagggaaggactggccatcggcacctcagttatggcagctctgccttggtctgttttatgggttggcagggatagcttcacgaatgtgcagccagtgcagcctcacggggcctgctgggctcacaaggggccctgcgcttaggacctaatgctctgcaggcaccatcgtgaaatccttcataattttgtcttttaatgtgtgttttataagtaaatccaatggacaatggagcgtgtccccgggcttggagctgtaaatcatacttggccccacttgctgttgcctttctgcctccctgggatatattccctgctgcctgctcttgatcctggtgcgtaaggcctctccttgcttccctgctgccctcctcatggatcagcaactggattgcattgggagaagggagaagggagctgtgtttcatgtccttcaacccccaggaggacctggccataggcatagggaggattggggtcaggtgtgccccttgaagtgtctcaggtatgacaagggagtggccatccccatccaggctggcagcatcatggtgcattcagtggatggctcagtaggggcctctcacagacctttgacccgggtaccaagtcatgacgcacatagaaaatggcaacatctggaggctgggtgtgggggctcacacctgtaatcccagcactttgggaggccaaggcgggtggatcacttgaggccaggagtttgagaccagcctaaccaacacagtgagactccatctccatttaaaatacaaaaattagctgggtgtggtagcgcatgcctgtagtcccagctactcaggaggctgtggcagttcagttgcttgaacccaggaggcagaggctgcagtgagttgagatcatgccactgcactccaccctgggcaacagagcgagactccatctgaaaaaaaacaaggcaacatctgtatggcacactgggggagacaagcaagcaaagggagccctggccagccttgactcccattcagcagccccaagggctgaaggcagttctaccctaggcttaggaaatggagtctctaccttggtcttgtgcttcagacaccccttgcccctttcaccccatgagccccacccttcccacaggctgagttatccagaggccaaggggacgtatctaccaaagcctcagccctccttcagaattcattgcttttattcccccagtccattacagacaaatatatggtcttactttgtgtgattaatacacaactcaccccacttgtgactcaccccatgagtttaaaagcactcaacttagtttgcaccctgctcaatcagtaagttcaactagacaagtctgcctttggatgttctggcaatgtcaaattgctatagaaatttgtaaatgcttgcaatcagttcttatatgtatcccacagcagacagtaacaacagtttggtccctggaggacactgagtagcactattctaggctcttctgtgggtgctgggaccctggaatccagtctgaatgacaccaaatccaaatccacaccaagcctgcttccagagtctttatgggcctgttttcctgatctcttctgcaggtgtacactgccctagccccaggctgtttgcagggaggagtgggcagagatgagacatgtgtactgtggtgttcatacacatgcatctcaggcccctttaggtacaggatggagaaaaggtgggaatgggaagagcaggggcaggctgtaattggtggaggaaggaagccacaaggatttgggacaagcctagctgcaggaatccatttctctgttcaccttgaatccatcacagcaccccaatgtgctgaggcctgccagtcagggagctctggaccagatactttccactgtgactttcaatgttttgaattctgatttctatcccatggtcacagttgaaagctcattagcatttggcacagcaagtgggtgacacacagataggtgtcctgtggacactgccatctcactgtgtgggaactgcagtcttagcaactctgccagtcaacaccctcccgcccttgatatacaaaaatacactgcgcttctgatgcctgccccatggcaaataatttctcaacacccagggaaaggattttgtttgtttttctttacgtttgattaaaagcaagcccaggcaaataccccaaaggaaagagaaacaaatgactttacaattaaaatataaacctacacaattagtcattaggcatataaataatataacatctttagtaaatcaagaagcattaatccaagcaatgagatactttatttttcctcttaaattgacaaagatgaaaaccagaaaagaaaatattcagtatttgtcaggatttagggaatattgctgtcttatatactgttggcagatggtcaacagaagacagacttgtagaggtaaatttgaaaatatattgcagaagacttaaaaatgtgtatatcctttgaaatcttgaaaacattgtttcatagtcttcttatgaaacaatgttttcataagatgaatgaaaagttgatgtctgtctcactcttgatttttttttcctcttcttaagctgttcttgatatcactgatgttctgaaacttcactaaggtctgtcttaggttgggcttctcttgccaagtatttggtagcctacttcaaattgaggtttcacatctttctttggttctaagaaatctttattatttctgtgaatattgcttcccctcaatcttctctagcctctcatctacaactcttattagatcaaggcttaatttactggatttctatcctgcatttcctaataatgttcagccctctgtgctaccatggagaattccttggcctgccctttcagctcacgaaactgctctttctgtctatcgtgttattcagcttctctattgagggttttttctttcaacatttaagattattatttcaaatatctctgattgaacatttttgggtaactcgtcctcattttgtggttatattatctccatttttctgagcagattgactatacttattgaaaattcttttctgaataccatattaactccatttcttttggggatctccattgcagagttagttgtctcttttttgtggtgttggccttcctcaaatgtttgctcattcttgtttttgtactgatttttgtaactgaagtttcctgctagaatgtcatctgcatctatttgagagagccacttggagagcagggatgggaactactattggcctaactcttggcactattttcaaaataccagtcttcttaacctgggtttttctttctcgcaggtgtctccagctcctgagagcactgcccttctctctagtccctgccccatacagactcctctattgttgctgactggcctcagcaggtggaagagtagaaagtccgggctaccttgctgcttcttgcctccctgtaactatggcagaaactctgtcagcttctgacatcatacttggcattccctgtcatgcttcctgggccaccttttctctttccaataagattctgttcatcctttattaactcctcagtgtagtcctctcccttttcagtgaggctatttatttaaacttctatcatttcttggcatttgttgtaaaaggcacacatactcagtccaacactttgagctggagctattaaaaaaaatctctgtattggccaagcatgttatctcatgcctgtaatctcagcactttagaagacttaggtgggaggattgctcaaggccaggagttcaagaccagcctgggcaacatagtgagaccctgtctctacaaaaaaatatacaaaaattagctgggcatggtgacacgtgcctttagtcccagctacttggaaagctgaggtgagaggatcgcttgagcccaagagtttgagactgcagcaaactatgatcatgccactacactccagcctaggcaacagagtgagaccatctctctaaaaaacaaaacaaaataaaaacccaacatttatataaccttcaagccagtaatcccacttctaggaatttatcccaaggaagtaatttaaaataaaactttaaccacaaggtgtttcatcacagtaggatttattatgaaaatgtggaaacaaatatccaagcaaaggggattaggtaaataaatgatgacatagacatgtgaaaaataacatggcagaatatttaatggtatagaaaaaaagtcatcaaggtatcattaagtaaaaatttcaggttacagaattgttttaaaatctcctttttgtaaaaagcatatatgttcttatagaaaagggtagctctgcatggtgggatttctggcaacttttgttttttcattttgactatctgtttctccaccattttgggattgtttgcaacatctgccatgtgcaagcttctggttccatcctctgcttacctcccccaggcatgctggaagatggactgccctccaatggtgtgccccgatctacagccccaggtggaatacccaacccagagaagaagacgaactgtgagacccagtgcccaaatccccagagcctcagctcaggccctctgacccagaaacagaatggccttcagaccacagaggtagggttgcagccacagaatcaactggggactggagaatgggggtagggcttgcttcagggcagagccacccagccgctatgtccagggagggaccagggatggctcatcttggaaaaaaaaagtctctgccccacccatgtaaaaattgctgcaaaccccaccccaaaaccctgccttgagggttgctgctttttgtttccatgtgtatgtttgcttaagtacagctttattcaaggatcttgttttctgtggccactgtcaccatgttgatggtgaggactgtgctggttagaggaaccagtcttaggccaggcagctggccagtctcaggggttggcagggtggggagtgggcagaggaaggaaagagaagaccagagtggttggaaacaagcctcgcattttactcaggccctccaaccaggtggacattggaagggcccccaagggtggctctcatagcagaatgtggtgacagcatcatccccagactgttggaagaggcaggtcagtgatgtcccwggacgtggcgggtatcctttcttttctcccagagctattgttgggaagatcctcttatgggtacaggaggggcagcccagaatgagcgctcttagtaggcagggctcaggcatctgcagtctcttcctcttccacccagttcctccttctgacttccttatcttccctatgccccacccccttcaaaatccactgcttaccctaggctccatacccattttctcctatctcttctgtcaaaattatactgaaccaggttcattctgtctgtgcacagcaaaccaatcactgtgacaatgggttttgcaaaagagaaagtttattcatgaggcagccaagtgaggaggcagaagaacagatcccaaatctgcctccacaaagatagggtttagggctatctatgagataaagaagccgggtaatctaaggcatgaggaaagatgattggcagtgggggaaagtgagataatcagtggtctgtgcttgcatagtcatggttcatggctcttcacaggattcatgttcagaaaatggctgtgtttgcatgatcttcaggaagagttttggccttctgacttcaaaaggtcacctcttgggcatttctacaaacccagttgaagggtcagtgatctcaactggctttaactggacaagagctaagcccaagttcctgaaaaacaactttaagcaactgttacagtggtgatctatatgtcagatatgtagtctgtaacaaagctagtggattggttagctatgggactttcagctatatgggttttaagattaactagaagtgagtgattaaaagcaagcaatgcaggttaagtttgataggcttaatcaggttagtccccagttccaaaaacttactggtcctgtcccctcgggccaatgccacctgttttctgagagtacaactcattatctaatgatggaattcttgctcatatcagtgagttgcctctctaagttttggtcagaaaacctgttgcaaattcatctctaaagctcactaactaaaggcctttcagaaatgacttaatctctcagaatctcacgttcattatccacacaatggaaataatacaaaatgagtgaacagatgagcctcctcttataaactaggatatagataagaatggcagtaaggattaacaggggatagttaggcacacagcaccataatccacttaaatgaaacactaatggtggccctgcagacactggagaaggtaatgaggggtgtagacttcagggttgtggtgtccttaatagagttctgtattgtctactttgcctgtgcattaggtggccttctagagacctaatcatcattgccatctctcaagacagtctggacccacagaactacgttcaaaagcttgatgactgctctaccacaggcccagatatttgtcttctagtctccttcccacacttgtgcccttaccctctgagccaggataagccgtggtcaagaggaagcagctttgcctggtggatggcatgatccatacacttgtttccccacctcatttcctgcccccccatccatcactttaaaattatgttttgcagtttacaaagtgcttttaagtctactggctccttaagttcccctaagagcattgtgaagtaagcattatccccattttatagacaaggaaactgaggttcatttgattgagttacatgaataaggccatataagtgttgtagaaggatattggtagctttaaatcagaaaaggtttctattaagaagatagaacatagcttcaagtacattttaaaaatgaatagtgtattagtcagttgttgcctcaataatgctgcataacaaaacacagcaacattcagttgcttgagacaacacctcccgccacccccaccactgccaccatggtcagctgtaacttaaaaaggctcagtctgacttttccagggctggctcagtctgttccatatatattattctggaaaccaggccaagaaagcagcagctttctggggtatattcttatgactatggcagaaacccaagggggcaaaaccaaactacttgaacgcatttcgtgtctctgctcacatcatactgactaatatcccattggccaaagcaagtcaaatggacaagcccaactttaagcagggaaacatactccgtccaaagtggagagagagcaaagaattaggagcaataatgcaggctaccacataccacatacatacacaaagaaatgcaactcataacttcaatgaattcttataaggtggcacatccatgtaaccatcatgcagatgaagacatagaacattatcaccagcccagaaatccacaatgtcaccattcttctcactcctagtattatagatcagtttggtttgagacttataaatagaatcatacaagtgtgagctttttcatgtctggcttcttttgctcaacattatccttgtgaaaatcacccatattgttctgagttgcaataattttctcattttcatcgttatgtatatttccttatatgaatacactgcaatttacccattttacttgataaacatttgggttgtttccagtttggggctattgtgaacaatacagcttttaatgtttgtgtgcatggtttggtggacagcacttcttttgggaatatacctaggagtggaattgttgggtcacaggacaggggtatatttgactttcatagacattgacaaatagttttccaaagtggttatgctgctttatactctaactagcagtggttgagttccagttatggaacaaaagaattaaaaatcagtaagttgtgcttagtctgtcttccttgtggtagcaactacttattaattaattaattaatttatgtatttatctatttatttatagatggggtctcactctatcacccaggctggagtgcagtggttcggtcactgccctctgcagcctctaatgcctgggctcaagcacagcctcccaactaactgggaccataggcatgcaccaccatgcccagccaatttgttaattatttgcagagaggagatctcactatgttgcccaggctggtctcaaactcctgagctcaagcaatccttctgcctcaccctaccaaagtgctaggattataggcgtgagccattgcacccggccactaccaagtatttattcatatgtggtctaggtatgacatagggtgcaaagcactttgttatgttatctcttaatcctcacactaactctataatgttgacattgttgtctccaatttacagatgggaattgagactcagatatagctagggaaagcatgcccccatgccgcacatacacacacaccccacacactttgggagctcatggggctttaaaatggggcgggcagagtcagcccccgtagggcttcagcagcagtggaaactgtcacagaggagtgatgaccacacacacctgcccaacgcagcacccctgggcagatgatgcatatcaatgagcagcctgtgcagcttttgttttcataattaaatgaacatggctgtgttgtaactgttttcaaaataagatcagggagctgataactttagttttaacggtttatatttaaaagataatcagtggtctttacatcctgcgacctcaccagtcactggccattctgagtccctcaaaggccaacgcaaaggttttctgtctaagatgtttagaagctaagtttacctgtgattgatgcttctgtcagcagagctacctcataccaacactcaggcaggctctcaactgcctactatttgcccaaagaaaatacttttcttcctattccctcctgggcctttgatatactgtttttttcctagtgtgtctcttagactctgggcctaagctttgtgcattttcagtatctggctcagtcagtatccacttgcctcttccagtcttccattgcacccctatatgagctactagcatttcaccacgctccccttaggcaccatcaggccacctggttggtggttcttcggcatttttttttaaagctttccttctctagaagatccctttcatgaagcatgtgtcctcatccacaggcctactgcagtgctgccattcagatttacaaaacaaatttgtatgtgaaaggcaatccttgcgaggcctggaaaattttttaatcagttcctataactactcttaagattcattcatcaaatgttcattgagtgctgtctaggtgccaggcactgttccagtgccaaggatccaggggtagaaaagacagacatggcttttgctctgaagcagctgctagttttaatggaggtgggttgggagccaaataatatagaataaataaagcatttatagactctgaatggtgctatgaaggaagtagaaggtcactagtcaggggtagcagctactctatttaatgcagatgccacctcacgtttaaactgctttccaaagggtgatggggcaactaatgttgcttatggctgtgagcaacagcaccttgtgtttggagcccttctccacttcatgtcccatcaaacaaaccatatcttcctttttgtcaattccctccaatccccccgccttatgcctggtgttaataggtgttaactggcaagaagattgtggcaaaaatgatctttcataaattggaactgactgtctcagtggggagctctttctctttctctattgcaccttgatttccccagtcatttggggccttactgactccagagtgtctgataaatcattggcttggtctccttcatcctactccctacctgagctcaacaaacaacacgagaggcagcgctgtagttgcttgtcttctcccactaattagttgttcaggaactttgggctgcctccaaacatttactctctaacctgaatgtgccatttccttaggcttaggactcttattcccccccaccccttaaaatacctcctcaagtattcagctacagtaaaaatgtatatgtggccatagctcaagtagaaaaggctctgacatgtggctggccttccagggaaccctcctgtcttcagaagctgcatattttcaagttgctttattattcttgacaaagtgactggaccgtgctaaaggaactagcatggggactgattctcagctaaggagttttctcccgctcctcctcctgtcccctcccccagtgtctggtcaacatcattggcaaggcctggcccagtctgggaaagacaggtgaaggtccacagagataggagacctgatcaagacaggaggttaggaccagcccaggatttctcctggataacactaatatgagacatatcaagggagagtttggaaagtaaatatgagtctctcccagaaaaacaaaaacaggacattaaaaggagggagcgaacaacagaaacctctgggaaaaccagagaggggaagctattagaagggcactttggtgtcctttctagtgcaagcctggggaaaaaggaaggaatttagcaatacagagatgtgcacctacctactggctgctacctcttgtagagatttgtaagactcggtattcatgtaagggtctgcagtcaaaccagttcaactggaaggctctcagggcagacactgccttatttttctttatattcttcccttgactcctgagcctactttagggttatgaacctaacaggtactcactacctacgtgttgattaactgagacagcctagtcatcactcagattagaaaaggttcccatagcttcaaccccacccatcccagctctgcaccactatcctgtgatgactgttctgtggttgcccagttgcttttctaaagcaggttctgctgccttcctaatgtctgatcttctatctgaagttcaagttgaaaagcaacaactccttttggcactcgatacaaactcccagggtgagtaagtctaagtgtagatggggaagggggctgcggtctgcacagaatgtgctccaggcttggaggaatcttaagagttttacctgcagcatagtctgacccctgcgttctgaggctagcagctggcccttggtggagttgctaagatcaaatatcccctgactgaccttgcattaatgccgtacaaattcacaaagcagcagcaaatacattcacagaatttgagaacaattagggtgtgttattgtgtatcttcctttcatgagacctgtctgaaaagaagtcaaacatctggagttgcagctgccaaagctctcgtctttaatcttttgggaaggaagagaggataaaactaatattttgacgtgcctacaacgtgccagacacactatgacatcatttttaacccttacaactctaaaaggtaagcaacatcatttcctacctgggaaaacagaggctcagaaactagatatctggtcaacatggcccaaggagtcatgatttggctgtgttcaaattcaaacccaggtctgtctccatctaagccccaagttcttccttcccattatctgaaacttaatggcggagaatttagagtgagctttggcagagttgtgagaggtgggatatgaaacctggggccaccatctttagtttgactcatcacccatattgacattggccttgagttaattgcatttgcctgagtggtttcagctgcctcattgggaaagcgaatacaataacattcccacctgtctctcagggatggggcaaggaatgattaatcatggatgtaactgaaatcttgtaggaaagttctgggacactgaggcagggcaatgcacacagtttctgttcccagggatttttcttttcttttctttctgaagatttgtcttcacacatgtgttcatggtcaaattatttactgagtgtctattatgcgacaggcactaaattagagtctgggcaatactataaatgaatgaaatagactaggttcctactgtcttgaagtttacaatatgaggaggaagcaaaaaagaagttaaaaaataaatgcataatttaaactgtggttaaaggccaggaaggaagtaaagaacatagggagagagaataacagagccctatgcttctatatgcctagaaaatccctgcaacattccataagaaaatattagccataattatctctggggaaggcactagaagcccttctctactctttgaatttctttttgccataattatgtcttccttttataattaaaaatactacttatacagaaaaattggtgtctcacacatcataatctcagaagccatgtttttctttgttgtctgcaaagaactatgaaaaggtttgtataatcccatgttaggtacagatatatttgtggagttcaagcaaagctgagaacatctctatttccatttggggggaaagtgagaaaaggctgaacaaaggtatctgcagtcttgaatccaggtctccaggagcagccaagctgtcccaacctccacaggaaatgggctgattattgacatctgaaccccaagataaacaagtccatctgggtcagagactgccaagaggttatcacggtcaatctggtkwcsmyygagaaatggcaggctacttttaattaaagaggcagtatcaagaagactaaaatctatgattcatggggtactaaagctgcagaaattaaaatgaggtaaggaaagagttgaaaagctgtaaaactaggtgagaagccagaggtggcccattaacaagagtcaatggtgataaaactcacaaaacaagaatgttagaagtagaggaaggattggcacagctgcatgagaaaaaggtgctaattaggctcctctcattatggaattgggggccatacttttttttttttaagccagtaattgcaatagaaacacattttcttttcctgtcattaaaaaggtatggggggtgatgttaaaaaaggtttggctggctggaaactacatcagaggggaaaatacgttgtataaagcatcacaggcactgagggacaaaatggtgtgattgtttcttgtgtttatattgctcttctcagcggagggcaaaacaactcacttctccaaacttctagataaaatatctggcattgtgattctttttctcatcttctttctctctcttgcttgggcttgaaatctaaggtttttgagatgtaactagattgtgttgatgaaaagagtcaaactctacaatatttgaagagatttattctgaaccaaatatgagtgaccatggcccatgacacagccctcaggagatcctgagagtatgtgcccaaggtggttggggcacagcttkgktttatatattttagggaggcatgagacatcagtcaaatacatttaagaaacacattggtttggtttaaaaaggcaggacaactcaaagcaaagtgggcaggtggcgggtggggggcttccaggctataggtaaatttaaacattttctggttgagtttgtctaaagacctgggatctgcagaaaggaatgttcaggttaagaaaaaggattgtggagaccaagttttattgtgtagaggaagctcttagatggcagactatagagagagcaggttgtaaattttttacagacttataggggtggctggctcttagttgattatctcctggatctgggaaggaaggaaggaaaacagaggaaaaaggattctctatagaatgtggatttttcccacaagagactctgtggggcaatttcaagatatgtcaagaaaatatattttggggtaaaacattttgattttcttccttgttatgccagagtcagactggaaagtaaaacacaatatacagggtcaaacaaaacctatctgatgagaatttatggtttgtaggttatgactccccaggccccttagataggaatttgggcaagataaaaaaatcagagtttagtcctcaattgcaacgactaccaacctcttaaacatcctcacgactgcttttggttgggtacttttccggcaatgtctcaaattcaaaagcttctctttcataaaacatttctgagaaaatgcattgttgttctaattatttaatttgctaacttaaatacagtgtcattatttgaaagtggatttgtttacggcttggaactttttgagcccatatcatgggagttacagaactttagtttgtcctttatctggaagcacaacttttagagttattgttgttgccatttagaagtagtagtagcagtagtcatcgtttcagtataatgaggctttatattttaatttgctgtttgactgacatcatctttttacaaataaaattaatgttaatagctataattgaggtgactaaccgtcctggtttgctggggcctgagtaggtttctgggatgtgggacttttagttttaaaactttttggcgggccgggcgtggtggctggctcacgcctgtaattccagcactttgggaggctgatgcgggtggaccacaaggtcaggagttcgagaccagcctggccaacatgatgaaatcccgtctctactaaaaatacaaaaattagctaggtgtggtgcacgcctgtagtcccagctactcgggaggctgaggcaggagaatctcttgaacctgggaggcagaggttgcagtgagcaaagattgagccactgcactccagccttgtgacagagagagactgtctcaaaacaaaacaaaacaaacaaacaaaacttatcggccctggataaaccaggataaactaggagaagttggtaaccctctcaatgttatgtgacatacttaattctctcaaagaaaagtaaagagcaggcattatttccttcatttttcagataatagaactgagtcaaatgtcaaagcaacatgtcttgctgcagctaactggtagcaaaggcttgctccatgtccagatctatctggccccaaagtttgtgctctgaatatttctattgtgcaggcttatgatatacagatttaagaaatgaccctattgtaattgggattacaattatatatatatatctgtggctgttataggaatgactactttgtagcctcttaaataggcttggaaatccaactactggattttttgcttagatttttaagcttagaagtacagactgaaataaagagctttgtatcatctgtgtatcatctttaataaacttttgtgaaatcttaccaacagtcttttctaaagaaaagcacttctgcagtttggaacatttccatttccattctggaaagccctcttacctcccaccaatttgaggggaatgctacagtcaatttagctcactttaaagaaggcctctgcattctattccatgccccagtcctcaaagctatttagtgacacccggaatggaagtcagatggaattggtctcataattaccacggttttctttaggaaacagaatcactgccttcttttccttcacaacgctttgtgcgtgtgtgcatatgtgcatgtgcttctgcgtgcgtctgtgtgtgtgtgtgtgtgtgtgtttagcaggcatggggcagtccaatgtgaactcagaaaatgaagtaactactgttgatgaaaagagtcaaactctgtaaaatatttgaagagatttattctgagccaaatatgagtgaccatggcccgtgacacaccctcaggaggtcccgagaacatgtgcccaaggtgagcggggcacagcgcttggttttatatattttagggaggcatgagacatcaatcaaatacatttaagaaatacattggtttggctcagaaaggcaggacaactcaaagcagagtgggcgggtgggggggcaggggcttccaggctataggtaaatttaaatattttctggtagacaattggttgcgtttatctgaagacctaggatcaatagaaaataaatgttcaggttaaggtaaaggattgtggagaccaagttttgttgtgcagaggaagctctcagccgacttcagggagagcaggttgtaaaatgtttcttatctgacctaaaagggcacctagctcttagttgactatcacctggatctggaaaggaaggaaggaaaaaaaaggaaggggaaaggggattctctatagaatgtggatttttcccacaaggggtggctttgcagggccatttcaaaatatggcagaaaaatgttttggggtaaaatatttttattttcttccttgttatgccagagtcagattgcaaagtaagtcacgatatacagggttaaataaaacccatctgatgagaatttatggtttgtagggcatgactccccagaccccttagataggagttgggcaagattaaaaaaaatcagagcttagtcctcactactcttagaaagaatgctttaaaggacaggaggagttaaagacaaataacaagagatgcttagtttcaaggtcgtgtgattttatcagttctctgcttttggggaaaaataagcccataaaagtctttgctagccctagtgccagttcaggctcagaaaacctgagtgtaagactgagccctaaatagtattgcctactggttgttaaagcaagggtacactgacaagtgtggtgcattcattcattcattcattcacttattcaaacaaagttaaactgagagcttatgatgtctcagaactgtgctaggcactgggaacacacagaggaaagcaatgacatcctatctcatgaaataaatagataagactaaaattatgtagagtcaaaattatccttaaatgttcctcaaatcacccataaagtatgatctttggttaggttccctaaacgcagaacctgagataaggatgtaagtaattgaaaggatgcaagtaattctcatgcaagtaattgaaaaagtacactcaggtgaaacctgcatggtaatggaggaagcagggcagggcaggggatcagattcagcaaatgtgtgagttcagtcagcggaacagctgtagtctagcctcagccagatcccacaaggagacctggggcaagcaaagcaccatggatttgtacccccaagaggctaaggggcagccttttttatcctaacaatcaggcatgggatatgggcctatccaggatatgggcctctttggcattcctggaggaggtggctccaatcagatgagggcaattctcaaaagaagggtgtgctgtgagcagttagcagccaacagtcacagcagctgggagggatgctctggcagagtaaaggggatctagagaggggtgtcgccatcagctacacaaggacacaggatttatgtgacatattagaaacatacatatcgtttgctaataaatacaacagaacaatggatttttctccatcagtgcaatagttcaccatttatttggatgcactacagaggaagtagtttgtgttcaggggccatgttgtttgaaaaatgtgcatctctcaacacccagcacaaggaggtgctcatgcctggaggggtgttcccacaggatctgaggcagactatgttcccaggaggcagaccaagatgtcattatacaggatgttaggaagtgcccttgaggccaacgcctgtggaaagggatgatggaagcaggagtgggttaagggagaagtccagccacaatgcaagctgacaacagcttcagcgacccctgctccatgcagctaaatggcttgtgggagctgacctgtttagggcccaaatggtcagacctttatgcccttccatttacctgcacattggcccatcttgggaagggcacaaacttgagtgaggtggctctctgcagctgatgctgtccccagctggaggctacttgctgactgttctccctgcagcgaggcagcaggtcatttctggaatggggctgggcagcaaataactgtgtccatccactagtggaggtgactcacaagcccactcgtgttcacccccagcacacaatcacaagaataggcacaacactgcccctcaccaatgctgttttctcttttaggggatggagagtcagggactggacacatatacttaaagaacctacaatttaattaatgctttaatgtttaatattaattcagaacttttgtcattggtttatccttagttagaagtagatagtctatcctactttttaagcttatttttttcccattttcatttagtgacagtcattgtactaagtaccttacatgcattaccttatttaatccatataaaaaccttatgagagagataatattattattccccattttacagataagggttagagagttggaaaaacttgcccatagtgaaatcatatagccagtatttgaaccaaagtctctctgactccaaagctcaaacacttaaccactctactaaagccaactatgaaaactttcacattaccctttgatggaccatagctcattcactcaacagtgttttaataaacatgccctattccaggctctgtgctgtgttggtattaaagattcaacaaagaaacctctgataggaagcatatgtgcatgcgttcttgtgggtcattcttcctgactgtgtgtgtgcgtgtatgtgtgtgtgtgtatttgtgataatctcaagagattaatgcaaattgtgaggaccttcgtatatttctgtgaaaggaaaataaaaatctcaggaccccaaactcactatggaaagggaaagttaagcttaggagctaagccacccaaaactgccttccattttgttcctaaacagataactgcaaagatagaaggccacataccttccagggggactccctcacaatttcttacaaagaaattccttgtgggccctaagatctttaccctaaaacagagttctgttggatttcaccccatgtaaattaacagcttatcttcacaggtatgggacaaagacaggactaggagtcatccctctgctcacttgagacaaatgcatattttactcattaactattctatgtttcttttatcttatgtaaaaaatgcaagttcattgagcatgagacaaatgcatatttgactgttcctctatcccctcctttcacacataaaatgtggattcagtgaatgctcatcaaagcctcaaaagaatgtaactgtttgcccctattctctaccctcccttttcctttcctctttcccttactgcccactctttcccccttaaatagtgaagtcctcaaaccctctttgggaatttttgcacagatcacaaatgttcctgtgatttatgttcctttttcccaggcacattctcaactatggcacaataaacctctaaattgattgagacttgcctcggtcattttctttggtttacatttcctagtaactcaattcactgttttcaacttaacaggctaaaagagatgctaagagaatgcctgcaaaagaagtcaccattaatgtaacagatagcatccaacagatggacagaagtcgaagaatcacaaagaactgtgtcaactagcagagagtccaagcagaagggcagatggacttcttcagtgtccttcacggcactggatcccatcaaagaaccttgaagaagtggctgccccttgctggacctgaattctactgagtccctggcaagactgtcttacctggcagcaaactgctgcctgatttgttgggaccttctgagccttctacttatcatgtaaatgtattggcacagtgcttacatatgttaataaactgcaaatgtgcagttcagtttgtctctttgcaactcctgtaatacggtctggtgtaaaagtagtgagttaaagctacaggtcagtttatgaaacagaaaagtaggaatgcattttctgggtgaaagagtcacaccttagtgctataactctcctgcccatgatagtgtattctgtttcaggcaagcttattctttccttctttcattttaaatattgtcattacaaatcttaccaggttcacttaaaagctggctttcatccaactctaaacccacatattgaaaaaatcaaggtacaggaaaactccttgttatccttgtttccttagcttggtatgagacagatcggatccagtttcccatgcaccaacccactgcccatggcatgtctttgggaggtgtctgtgaagcagtcatacctgctcctcatctgcctggaaagtcctcctattccagtgtccatgttggcctccagtccttaatgtcaccatgcttgtggccaatgcatccaaataaggatacccctcagggctcagctagacattgcaattttgcatagctttccagttccctttgcttgtcttcttgactgtcttccctctctatcggggtcacttgcaattgttaatcaaagattgaacactgcgtaggagagggagatgatccagagacatgtggcagcaggcatggcttccccttggcctctctgtacactgccccaggactgtcattttggcatctgcaaaggaatcactttagaaagccagcacctggttgatgtgtattcatactgacattagattgatgtgcactgcattagaaatgaggtagctgacacagaaaaaggatgttttgataggaataattttctagtatgtcttgaaacatgttcatctggaagtattttcctccaaagtaatgtagcatgatttttcaaggattgttaacatgcctgggattgggaaagataggactaaagttgtgccaaactatatcaataaattccatgtttagcagaaataggcagcctattggtgttatgtttatgtaacatagtccagagaactgacatgcaggtcaaaagtcagatacgcaacctccttatctgctaactctgttattcttcaaacacaacgtgggtagtgtcatttttccttccttccttccattggcagattgtatatttattcacaaaacattaaatgtccatcctgtgccaggtactatgcagatgttgagggatttggggtctggttagtcgtgactatctatcctgaatctaacagtgacttcataactaggagactgaattagacccttaaggtatagtgtgtgttgcaaatcactctgcaatggaaacttttatattcagggtaggtttgtgtcttaaactaggtgttctaatcaatgtacaagactttaccatacacgcaactatagtttttctaaaccttcatcattttgtgattctttgagaaagggcttttaggaactttatgttctaaaaaatgtttttaacaataataagataaaagaaaaacctgtgattcatatgtccccactggcattactcagcaggagcccccagctgccaaaggttggcagtgatcctgcaagttcaagggctctttctccctggggatgtgctttgtggcttctctttacagctttgtttctgcatcagttcactgctgcatgttgtttggaatttatcaccttaagaaagtgtctctgttttatatagaaacactttctcacttacaggggagaaggaaatgcagggcacatgatctggccctccccagaacaatctggatttcacggagacagcaaccagaagttaaaccatgtgactaaaaatgcatctggctactttttcatgtatgtatgagacagaaactaatccttactatcctattaggataccacttttcattgcaaagtttgtgtcaataaagtcattaattttaaacatatatgggcagttacagagaatctttactgaaaccttaaatttgtatgcagaactatttagactagtttttaaaaatgaagaccttttacataagtgaaccctgtgaatcctccaaaaagccttgtgaagtaggtaagaagaatgctattagcaccaatttacacttatggaaatatttatagtccagtcaactagtaacttttggtgcagaaattcaagtgggggaagcctgtctgcaaatttagttcttttcctgccaccacatggtgccaccatggcaagaaggtctggtgtaactgagagatgaggccatttagaggggaattgtcatggagcctcaggctgggctgagtccaagtctaaaaggataatttgggtgattggagggggctagagagagaggattgaagagggctggtagtgaagacagtgattggaaagggccagtgagttctcagggaatttggttctggttcaggctcacttatccctccagagagagtgaccttgacctggtgtgagaggtcagaacactgagagggactttataattcagagaaaatagaaattgcaccccttgggatatctgcttagacctaaaggtaagggaagccagggacctcccacgttgctgccaatgtcctgagcacagcttggatgtacaggtaagagacagtagcccctcaccctttattcatggcccactttcacagtgctttccacaacccacccccacctcccagggtacctgaacacacccccgtttgcactgcctgtctgagtcctgctaacctgcatctgtttttgatcctcaccagccagacttgcgggctgccccatgtgacactgaagtgcatcccattcacatttactgctctaagcacggttcacaacactggaagctcctctgctgaaatcaggtgacagagctgctgtgtttagccgtcatggtgtcaaaacttacttaggaatttcacataaatagccagctctggcatagactcctactttagaactccagtatccatccttctcttctttcttagttgagcacatgtccacttagaacaaacattacactttccagcctcccttgcagctagaagttgcagcatgattaagttctagataatgaaatgaaataaaagtgaggcatagaagcttccaggaagtcaggctctttctttccccttttgcttcctggtgtgcagaatgaggaggtaatggctggagttacctcagtccattgggccataaagcaacttcgagaatgaaagccatgccaagatgagcaacaagttagaagaagcatgggtccctaattccatagagtttcatgagtcttggactatataccacaaacctctttttgtgggaaagaaatatactttacttcatttaagttgctgtttcaaatgattactcacagccaaaactgattctttttcttttcaagtctgagaaattgaacaaaactaattctaatttgtatgcatatacttccatctttcaaaaaattggaagatcgctcacccttggggccttggctgcttggccacatctggctggagctgatgagtctgcattagctggagctgggagggtctccagattgtgatggtcgctaccactcattgtggcttacacatggtaacctccccatttctgttacctgccagaacccagagacatttgagcttgtaactcctgctccactgtatgttcccaaacatgttgtttttacactcttttcaggagtcattgagatatacaaggtccttttctcctgtttcaccagtctgggaagtggccaatctcaggagaattttctgagcaaattatgaatattacctaatatttaaaatcatgcattcacttgctcatttatttaatccaaatgtatttactgagactcttcaatgtgccagaagttgggatgtggtgagagatacaacatatctggtccctaccctcacggagatggcaaaatagtagaggaaacagaaaataacgacataaagaaataagtcattacagtaacttaagatggggataaatgctgaaaagaatgttaataggagaatgagctggacggaagcaggaagggagcaggagaccatttaggaggctacagctatagtcctgggaagagatgtcagtgcaaggaatagggtaatggttgcaaagacggatgaaaataggtggatgctgagaacattttggaaatggaaacattgggacttgctgatggactgggtgtagaaagtgaagtcaagggagaaatcagggtgattcctaagttttttggtttgagcaacagggtttttggcaagataggggaaaacagggtgggaaaagttttttttggggaggcagtgaaaatcaaaaagaaccattttggacccattaagtatgaaataaccaaggggaggtgtccagtagggaattggatgtacgagtctaaagttcaaggaattggtcaagggtagagctgtgcatttgggggtcatcaacacatggaagatatttaatggcacaggagttagttcacctgatgagaagctactgaggaaagtctagggctgtgccgggagacaccccaacattcagggagttggtggtggaggaagagtcagcagagggtactgagaagtgctgaggcagttaggaagaaaacagggagctcacttactgaagccaacactaaaaaaaaatgtttcatgaagggagaaatggtcagtcacggtgaatgctgccaaaaggttaaatcacgtgagaacagagatgtgactccaactagcaccatgaaggtgactggtgatcttaacaagaacaattccagcagagaggtggtcatagagccagactacagaggatgatgacgggaggggtggtgaggaagtggagggaatgaaaaaaactgtcttttgagaaatgttgctatgaaacaaagcaaaaagaggccagcaattggagaaagagacgggtcaagaagaagttgtaaaacgtgggacatactagagtatgtttctcaacaattgcaaggattccttagggtgaggttgaagctggaagggtaggggcattatccacggagtaaaaaagtccttgaggaagtgagaagagaacagatccagggcgcaggtaaccacattgaaatttaaaacctctgtatgataaacattcacataaagatgaataatagtctattagaagatatctacagcccatgtatcaaagagttagtatagtgatatacattaagaaaaatgagaatttcataagcaaaagacaaatgaccaagagaaaataacatgaacaggcaggaggaaagttgaatggccaagaaaaatacaaaaaatcctcagtgtcatcagtaattaggcaaatttgggttaaaaaaagagatgccactttttaacctatctgattagcaaagtttttaaaatgtgataatatcagtgttgggaagggtgtgggaaagaagtaatgtcagacactgctggttgaaatagaattagtgatactatgttggatggtgtagggcagacaaagctttacctctaccttcataggaaccccagcagggcctgagaattagattgacacaaaacagactagcaggagaggaacatacagatttacttaattttaagttttatgtgagttgagagactttataaagaaacgacggcccaaagaagttgcaaaatctcaatgctttcctactatgttggacaaagtgaggcaattgtgaaaaagtaattaaaatatacaggaaagctaaagaaagataagagttgttttaacaaaattcggttgtttacagagaattgtctctgtctctggtgataaagatatttctttcctcctggtacagagagggcatcttttacatgggagttttatatgctttcaggaaaaaaagggaagtcagaaagttctgcttgaagaactgagcacgttggctcatacctgtaatcccagtactttgggaggctgaggcaggaggatcacttgatgccaggaatttaagaccagcttgggcaacatagcaagacaccatctctacaaaaaaaaaaaaaagaaagaaagaaagaaagaaaattagccaggcatggtggtatgcacctgtagtcccagctacttgagaggctgaggcaggtgtatcacttgagcccaggagatcaaggctgcagtgagccaaggtcgtgccactgccctccagcctgggtgacagagtgagactttgtctcaaaaaaaaaaaaagttctgttcgcacccactttttaaaagtgcttttagctcaaaataacccttatgccaaaatggcatattctggaaaagcatattctgccactcttcaatgtcaacttagccaacttattcaaatttaaaatgtgtatattctttggccaaacaattccatttttaaatatatacctgtcaaggactgaactgtgtccccgccaaattcaaattcatatgttgaagtcctaacccccaatacctgagaatgtgactgactgtatttgtaaatagtgtctttcaagaggtaagtaaggtaaaataaggtcatttggatgggtcataattcaatatgaccagtgttcttataagattagaagattaggacaggcacacacagagggaagaccatatgaagacaaaagagaaaatgatcacctacaaaccgaggagagaggcctcagaagaaaccaaccttgcctcagacttttagcctctaggactatgagaaaataaatttttgtttttcaagcccaccggcctgcaatattttgttatggcaatcctagcaatctaatacaataccctagaaaaatatctgcacgtttttatgaggcagatatttgtgggacaggactcagacttgtagaacttgattcaaaggaatcagaatggcagaggacaaaagagcacaggactacagcagacaccactggctctaccttcccttcaacccctttactgcacccatgctgacttctaactgaggcacccgctgtctgtggcctgaagtctttatctcaccactcccatggcaggagttgccagggcattggcgctattgatgcttattcattcctatcctcatcccagcacctgtcaatcagtcaatgactgatgagagctccttcaaccttgggtggggtaatgctgagatacgtattttacgcaagctcctagagttttcccaggtgtattaagttccagttacccagcaggtagctggtttaataatgcattcctttactggatgcttccttgatcaatctccagggtagagtcattgttgtagttgcaggcttctatataaacagcatcatctctcttgtctttcttttttattatcatagtcaaacatcatcttttccacaacttggtttccaccagtagatagtcctccacttcctccctagcatgagatatacatcccactgccactggtctataaatgttctgtttatgtatattgtaccacaataaaagatgttaagaccaataaataagtaaataagtgttctgttttgctacagagggaatctctgatttatcccagatataagaagttacttggaaaggagccccaagagatatcttaacagaagtcacaaactacatgctttcaggggacaggcaggtgatataaagggatgctgtagggcattgtgagtagtaggagctgggatgagaaggaaaatgcatacacacttaagagcaccacacagtgagcctgtcactctccctgatgaagaaagatatttgcaatagctgactcaactaaaaattgttaagatggcacttcaggaaatgtggtgcccagtacagatttactgactaattgagatttcataatcagtagttgcttgggatgccagaaacgtcttccactgtcagtgagccctctgctccatagctccacttcatcactttgcatttccttctcaggcctctaccatctcacttctgattccactactccaactgaaactacactctagggtcacgaatactctaattgccaaagtcaatgacaccatctaagtcctcatcctgctggacctctctgcatctgttaaaataaattttcatttttaaagcccactgttctgtggtattttcttagggcagccctaggatgggtttcctcaaagttttgtcaacttttgcatttggaaatgctaccctgcttttggtcacccccgtctttctgattctactctttgtcagtctcctttgctgattcctcttcctctgcctgtcccttaatttctggtattcctcaaggttcccttttcaacctttcctcttcagactctacccagttttccttaacaagttcatctgatcccatggcctcaacaatttagatgctatttccactctatcccaagctcctatgccatatttccaaatgaccattgcacacctccccttggatggcctgtgtggcagggattttgtacctattccctaaagcccattctcttccttcctaggaacccagcttggctatatttcccaagttcccttgcagtgagctcccaaattatttcagcaatatttgattcttcttaaattacttcaaaatgtctcacaatttgaattgttatggtctctcatgggagaccataaaaaccagcagcagaaaaaatttatgcttaattctcttgggaatgtgcatgtgatgtgattagacaatggctcacccaggtttttgttttgttttgttttgttttgtttttttagctcagcatagagctaaggctaggagtacttaagccagagggagctttgcaatttcagtttcttagatgggtgttctgcaggtagagctccgccttaaaaggaaaaggggtaaatgatagtgccctttctgagccaaatagactttttcataacattgtcatgtgcttggaagatagctgaaaatttgtttgccttttaaatttgattccattatccagagactccctccctctgttctaataaatacatcagctatgggatggcctgtgaagcaaggtatggcagccagccttcacaggcttcaggtacagaagaccaatcctaactggatgtttcatggctctgtgccttggggcaaattgtggagtctctcagggcttacctccatcaatgaaaataataccatatttttgagggtgtattgtgaagataaagggagatatcaaatgtgtataacatggtgtctgccacctgatcataattatccgccatgcgtcgatactatactagatgcttcgcacactatctcatcaatcatacagtcctgccaggtaaggcttctcagctcccactttacagatgaggaaatggagacttaaaggcccaaggccgaccaggcatggtggctcacgcctgtaatcccagcactttgggaggcccaggagggcagatcacctgatgtcaggagttcaagaccagcctggacaacatggtgaaacccctgtctttactaaaaatacaaaaattagccaggcgtggtggcacatgcctgtaatctcagctactcgggaggctgaggcacaagaatcgcttgaacccgggagtcggaagttgtggtgagctgagatggcgcaactgctcatcagcctgggcaacagagtgagactctgtcttaaaaaataaaaacaaacaaaaccaaaacaaacacagctagtaaattgcagagttgggatttgaacccatgtctgcctgtctatgaaaacccatgttctgtctgttaaaccatgagtaagtgctccataaatattcatttcctttttgtcactgtgcaagtaacttcacagccctttgtatagcatcacatcttggcacttccaagttgtcagtgcctctctaggatcaattatagcaccctagacacaattatgcaaaatttcagctttgtttcttttttttcttaacagtaataaagcagtagcagtctttccagttgtgccacaatattaaaattcatttgaagataatactaataaatttgtttttttttctaaaacatattacaaatctaagcattatctaggtaccatagtaatcactttttcctcttccttcttgaataggaaagtgaaggcctgagctagctgagtccccaaagagaaaggaaatgcaaatataggaggtatacaatgtcttgtactcattggcctcttaactattgcttgtggaaagcaacaaatataattattttctagttttaaaaaataacaggtggaggccaggtacagtggctcacacctgtaatcccagcactttgggaagccgaggtggatggatcacctgaggtcaggagttcaagaccagcctgaccaatatgatgaaaccctgtctctattaaaaatacaaaaattagccaggcatggtggtgtgcgcctgtagtcccagctactcaggaggctgagacaggagaattgcttgaacctgggaggcagaggttgcagtgagccgagatcgcatcactgcactccagcctgggcaagagagtgagactccacctcaaaaaaaaaataaaattaaaaaataacaggtggaaagaatcatgattgtatagcacactgactggcaatatggctgcacattggaatcacctgaggaggtttaaaaactattgctgcctgggtcccacctcctagagattctggcttaactggtctggggtacaacctagaatcaagatgtttaaaaattccccagatggtcctgatgtacagccaggtttgagaatcactggctcagcagagcacagatggaattcatgtctcaaaaattccataaggcagccttaagtcagacttcctgggttgaatgccagctacaccacctactaggtttgtaaccttggcaagtcatttcagttccccatgttcccttttgcccatttagaaaatgaggctcaaaatatctcatgatatcgggaggatttagtaaggatatattgataaagcacttagcacagtctctagcataggaaggtaaacacaaggttattattgttgaactgtgattcagccctgaaattttcaggacatgagcaagcctggcatagaaaattcagctctcaagggtaaatgtaccagaaggctggccctttatttaagtactttgttctcatccaccacaaaatgaacctgttttcaagataagcacttcttgtctaacacaaaatggaccttagacatccctggggtgaggaaagtaatatcttcaagaaaccatcctaaggagcatgtacttgttggttctgggaagaagcactgactccagataatgtagaggaagaaatctctttagttggtttgggctctaggaactttatgatgtccctttaaacttgacatctttcatttgcagactctttggcgggtagttttccccaaactggtaatcggcaagtgagacatgactttggatgtaaagatgtgatttgttaggagttgtagggcagtgaatttggggctttcacatctttcctttgtacagataaactgcctaaaagttagcatcaaatatacaatgttgttctccaggcagacataatactcatacccagcagtgtgacaaggccagcaacactccctgtagatccaggaaagacccaagtaaatatgtatattcaaatacatcaattgagtgggcaaagaaagttaaattaaatccctttaaacaagagatgcttctaaaacagttttttatttgagatcttcgaaagacaaagaacaggagttagagtttttatttatttatttatttatttatttatttatttattttatttttatttatttatttttgagacagagttctggtcttgttgcccaggctggagtgcaatggcgtgatctcggctctccacaacctccacctcctgggttcaagcaattctcctgcctcagcctcctgagtagctgggattacaggcatgcgccaccacacctggctaattttgtatttttagtagagacagggtttctccatgttggccaggctggtcttgaatgcccaacctcaggtgatcctcccaccttggcctcccaaagtgctgggattacaggcgtgagccacggcgcccggccgagtttttatttttaaaggatccctctaactactgttagcagaagtagatggatttgggatacattttagaggttgaactgacagaacttgctgttttggcctggaattgttacagagagcagatgagaaaatcaaagaggattcctagatatttggttgatgtcattttgtgggaaatagaaggtatggggaagaataggtttgggagagaaaatcaacagttctctttgggcctaggcacagtggctcatgcctataatcccaacactttgggaggccgaggcagatggctcgagaccagcctgggcaacatggtgaaaccctgtctccacaaaaaacagaaaaggaaaaattagctgggtgtggtggcatgcacctatagtyccagctacttgagaggctgaggtaggaggatcacctgagcccaggaatttgaggctgcagtgagccatgatcatgacactgcactccaacccaggtgacagagtgagaccctatctcaaaaaacaaacaaaaaagagttctgtttgggcatgaaagtgtttaatgtttattggacatttgggtggagatgtcgagtaggcagttggaaattcaagtctgtagcttagggatgagagcaggtggtctctcagcagtcattggcaatacatgattcgtgggactgcaagagctcatcacgggagagaatataaagaagccctttcccctcattctgtagatgagggaactatgctcagaatagacgtatctgttttcacagtgaatcagcaatagaatcaggattagaatccaaatctaataccactgagggattccaaggtgcaggacttgcagtgctaaaaccatggaagttccaggcagccaaggagggttgatcaccctattcctaggccagtgatcacctaaccattttctcctttggcaacctggaagtgattgattgctgtgagtgctttatttattcttgttttcaagagaagattgttttcattcttttctatgtcaatgaaatattatgttcatttggaagaagacttagctttttcggagaggaaattacaaagtggtaattaccatgttttcttgctcctcctggaataatcagagcaagaaagacaatatttttgatggtggcacatgattaactctcaagacaaagctgaactctcatctggagggagaggggcaggagagaataaagtgcctcaaactgagctcagcatctccctgaactcagccactcctcctgactcttctgtttatgttgctatcacatcttttctctcccctttatctctcccttcctgataccactccagtttcttagctctataaatttgtcctcatcaacgtgccttgcatctgacattcaatgacccactatacacaaaattgctcaaaacagaaactctggagtcacccttgaccttcctttctccctctctgatggaatcttttctcccacacttcccaaatgccttttatacctgtcttttcctctcatgtctcacaaccaccaccttagcacaggccaccaaaacccctggatttctatagaagtctactgcgttctttatctcccactttgcctctaatccaggctccacactgatgacaaaattatctttttaaaatgcaaatctgattatagcacttgctgccttcatcattaatgctttttaaattttaaaatttttatttatatataatagttgtacatattttgggaatgccagtgctattttgatgcctgtcttcaatgtctaatgatcaaatcagggtcactggaatatccttcacctcaaacattgatcttttctttgtgttgggaacattacaattcttctcttccagctattctgaaatacacaataaattattgttaaatataatatccctactgtactatcaaatatcaggacctatgccttttctctaactgtatttttgtacctgttaagatttagactttactaagactggcttcctccatatttacttcaaaatctggctccttccatcacttccagtcagtttctatattcagatcagatctttttggatcctctcattgggaagacgggagatcgtcttatgtttgaggttgctttgcttgtggcagtgattcagtgcctgaatgtaaaggaaacatctctcattcctctcagctgggatccctaccttcagtcaccctcgctgcagttcagcctatcctgctgcgcagcgagaggagtggctgtggtgtgctgggagtattgatcttggagtcaagagactccagtagaattctagctctgtcactttcaatccgtctgactttgggcaaatcatttaacttgtctgaacttcatttgcctaatctgtaaaatgaaggcactccataaatgttaattaaaactgaaacttccttgctctaaatttttagtaactctcattgccagacttacccaatttctcagtctggctggttttcaaaaccctccctctgtctgcagctttaaccaacttgcacatactttgtgctacacaccaggctactggcagccctctggacacccatcacactgtgccttaggcaaaaatgtccactggagcatccctctcgtcactgttgtcacactcattcaccttctgaggttcagttccattgctacctcattctgcaatgaaagttttcttaatccctcaaccaaatgtaatctctccctctgctaaatgccccgtctctctatatatagtttatggtaccaatctattcatgttatagaagttcctgtgcttgtctagtaagtgattaggatcctccactttattgtaaggaccttagcatcataggacacattatgttgagcattctatgtcctcaacaattatttattaaagtacttatgggacaagggcattagcaaaatccatcatctaaatgcctaattaggaatctattaattcatttgttcacttatcaagcattcactgagtgtttttttaagtcctggagatttatagagaattttagacagagttccaaccttgaacgatctcataacataatcagacagctaaaatataatgtgataaatacataataggaaatcagcagataaataaacatgattacaaatactttattttattgattatagtgaaatgcctcaaaaaattccattttagtctttgtaaagtcctacagtttagatacacaaacccatgcatgtctgcttaggcagaaggagcagggaattactatttgttgaatgcctattaggtgctgtattggttcttgtactgctataaagaatacctgaggctgggcaatttataaagaaaagaggtttaattggctcatagttccacaggctgtacaggaggcatggcaggggaggcctcaggaaacttacaatcatggcagaaggtgaacaggaagcaggcacattgaacattgctggagcaggaggaaaagtggggtggggaggtgccacacacttttagacaaccagatctcacgagaactctatcatgagaacagctctagggagacagtgataaaccattagaaaccacccccatgattcaatcacctcccaccaggtcccacctccaacataacagattacatttcaacatgagatttggatggggatacagatccaaaccatatccggtgccaagcaatatatacacattatttcattgtcagaggtattgtgggatattgctataatccccactttatagctgaggaaacttaggttaagaattgtcacataacttgtgtaaggccttacaattagaagtcctgagtcagtttttaaacccaggactctttgatatcaactggcctgtgacatcaactttttagacgacaaccagacagcaacttgagggcctgcgggtagtctgacccaggaacttgagctactgatttggaactacaggaatttgcttcttggccagaaaacttagatatcaaagggaccagggatatttggccaggctaagataagatttagaggaatcattcaaccaggaaatatggtaagatagtccaggtgacaactcaggaaagaattgccacttcgaagccggaacacaaaaccctctccctgaagttctatctttgaaaacttcacctcttttgaagcaccctccaagggaaaggagccaagggctgctcctgttctaagttttatcttctaacctcagcttccactcagtcacctcattagaacaatggaatgtggtgaaactgtaagcacagaatgatgaaggtgggagtgccgtcaggaggaacaccacgctgtgatttccaacaatgtagaaaaagaagctaacattctcaagactttgtggaaagattaaggagacagctttctagggggaagaaatgcaataattcctctaacagatgtgtttgcctcaaaatagaaacaaattgtattgtataatgcgaaaatgctttcaaatatttgtacaaaaaaagtgaggtggtaaataacagactttgctattcttctgtctttactcaaagatctctaaattccactaaagttatgttttccactgtagagggcagagctatggccagacaaggctccttctgcattcaaattgaaaagtggtgagaactgtgcttatttctgcagctggtgctaatatcagtccatagacttaggtgttcaagaaatgcaaaaatttgagttttataactcaaaatctaccatagtcttcattcttccaggtgaaagaaacttaatctcagcctatttagggtttctgtttttcctaagagttatatctttgtaccaggaataccaaaaggctggggtgggagtgcacacgacagacagtatccggacatctgtccctatccatccacactgccatccactgaggtagactttggtctgcatgatgactcattccagtctgcaaggtcctttcctatccagtggttttcttacactcttgtaggtgcacaggaaacattttgtggcttccaagccacaccaggtccaggaaagcaaccccgtgcttctaagaccctatctgcttccatgcagtttgggggcctatgaagttattccattgccctgtgctatgcagggctgcaatagcctctgctgttcaggccctttagccaggaccaaccacactgccccttctccatggatattttccctcccttctggggactcacttgggaaagcacttctagtaccctcactgtcttaccctaatcttccaaatctatcttgagattctcttgctctcctctccctctcaggaccacacatttaaaactccaaaaccaagcggataatctgtgactggaaggagagagggaggtcacggggtagcagaaagtatgagggggaaggaccaggtaggtcttgtctcaaaatggcactcacagttttctgttttgttgttgagtctaaatgatcctctctccccaaaacaaacaaaaaatatgttttttaaaatttaaagacatatttcaaactgtttatagcccaattcatttagctttgatgatctctcctatttctgacagttacaaatgcaaatgttctctttgggaaatcaaatgttactttgagttcctgggatgtttatgcagagctatcagagagggaggcagtttatgacatgggaacccaaacttagccaggggtaggggggcacattttcctcacactctaagacagggctaatagctataatttcacctgcattcctggatagcagccctttcttgccccaggctctggcacgatgcctcccaagataagggtctgataacagacctggctatacaggaaagcaaagtaggtcatcctagttaagtgatttgagggcaattaccttccatttgaggatgctgcctgctccaggcatcttctttaccagctcactgtgggctctccccttcctctggggaaaatttgtttcatcaaggttatttctttgttttagaaagcacagatttgaagacactgccttgactccatacagacagaaagcccttccaggcggcttttgatttctcctggtacctgcagactgcagggcaaccaaaggaactgggatgcttgcagagtgttctctattcattcacagagtcttcccatctcttttctctcttctccacagcaagtcctcttctgaaccctcattgccaaatatctgcatgttgttatggagctgtctcagcacggggtctttgacgcctgtatcctcacacccttagaagatcctgagaaaggaagataacgtgagaaacttcaatgtcttcctgccataagcaatgtcttcctgcaatcagcttccaactgtatgcatccaaaggtggtagaatttgttagctcttttttccttctcagcaaattttagttacaagctggagcataattttcttagcttttatgaagtccttcagaactataggtgttgaaacaaagtgctgaagatattcttcattggaaaacaatttctaacccactccagtttcaagaggagccctgggaaacacacaaaagactgaaaattcccttattcacctgccaatttctccatttactaaggaggtaacctggagaaaatggtttgagtctttgtgctcagttcctactcggaattcaagttggagagaacaatgttgattacatttctagcagcagcaaatacaatgggaagtaaagctcttttggtatgtgtcagggtaatttttatcataaacaattgggttgtcacacattagtcatacgtaagtattagatccataataatgtgttcattctccaactttgacatttaacattaagtttagaatagagatttttcaaccatagctgcacattagaataatctggggatttttaaagcaatagttaagccacacacaatctcagagattctgacttaattgctttggggtgaaagtcaaggtgtcagcattgtattaaaatcttcacaggtgattctaatctgaagctggggtgtggaaccactaatagagagaacataatgcaggctttggggttggacagacttcggttcaaatccctgctctaccactaattggttgtgtgatttggggggaattacttaatgattttaagcctaaatttcctcctctgtcaaaaggaagatggagtagtcatatagttcgaatatatgtccccatcaaatctcatgttgaaatttaatccccaagctgggaggtgggcctggtgggaggtgtttgggtcatgggagtggattcctcatggcctggtgctgtccttgagctagtgagtgagttctcacaagagctggttgtttaaaagtgtggcacctcccgcaatcactgctgctcctgcttcatcttctgccataagtaaaagctccctgaggcctccccagaagtggagcatatgccagcaacatgcttgtacagcttgcagaaccatgaaccaactgaacctctattctttaaaagttacctagtctcaggtatttctttatagcaacacaagaacagctttatacaggtagtgtttaaggggcggtattaaagattaaatgaggtaaccggcatatgtaaaacatgaattgcctggcacagaataggtatgctataaatataggtgctcatcctccccttttatacttgatcatttttaagattcaagtgctaatccttgagggaaacgggggaaaccctatggacctagtgcttggaattgaagtgaaggtagatttggtgttgatcaaagtagagaataaggaggatgaggtcaaatctcaattttctatgtgatgaataatcatacaagggttgcaaatcacagttccataatcgcagctctcagaacattctggtacagtttccttttttaaaattaaaccttctggtaccatactgtagaatctatattttaaatttaatattcaataaagttttcctgaggtgttttcagatatgaaaaatcacttggatattctgttccatgcactttatttgttctctaatattggctattagtaggaaatttacaactccacagttgtatttacaacattcacaaaagataatttattgaagatactccacctgttcctcctaaactcctattttgcccccgtgttgtgctgaacccttattaacctcaacaaagaagcttccatgttcaagaggccaaagaagagatcctgagccaggacatgagacatggggttttattaggggctcacaaacagcagagagagcccagtggcggtgggctggacaatgtatcccaccttcctgcagtccagtggcagtgggctggacaggaaaattgcaatggcttgcaaacatgcagtgtacgtagtattttcacttaacaccctccccttaacaacctccacttggcaaccttcatataacccaaaactcagggcctcaatcccctgcatggcctatgttccacaggatgagacaggggcttagatattcttcatagacaaggagcaaatctcagggttggccactcccagattctatagcttgaaacagtcattcgggtgtatctgccatatagggtcatgatcagggtatgcttacattattgctatcaggtacatttcctctataccacctgccaagaaagagcctgagattgctttctaaatgtcttaaaataaaagctgtgaagaaagacgatgccatccaggccatcagcaaataacaaaaaccctgtgagcaagaacatgactcatgctccgtgctatagctttgagggctcaaggtgatcttctctggtaaaaagctcaagatgccagaaaaacccctggacaggctgagggcaattggaacaaagaattcaaaagaacagaagagtgaggaagagcaggtttggggagagtggaaagaaagacatgctccaatgcttgagataaaccgggtaatgtggaactgggcccaactgattgctttgttggaaaccagctgagccaagagtctaagaatttggtaattctgggtcagatccttttcctcttagcactaacaaattaggagctagcctagcacagggaatgactcgttgtattgctttctttcctcacctcccctctccttttttaaaaaatggggacagggtcttgctttgttgcccaggctggtcttgaacttctgggctcagttgatccttctgcctcagcctcccaaagtgctgggagtacaggcatgagccactacaccctgccttttccctctttttaaggatgtagatattagatactaatttttttaaattaaatagctagaagggaacctgggtcatttcatctagactgtcttcagcagagcaatgctcaacttataaataaatctccaattcatacacacacacacacacacacacacacacacacacacacacacacgatggggtaaaatttccttataaaagttaaaatataaatatattttatgtcatatagtattgactaagagctttggctcacaagcagcacaaatgtgtatgctaatcccagcttccaaattactagccatgttgctatcttgctaagcctcagtttcctcatctttggaatgagaataataatagcatctacatcacagatgtgatgtgaggatgaagtgttagtgctggacacaaaacgaccactccaagtagtgagctattgatgttaaaaatatggggaaaatcacatatttataattgatgacatatggtatggaaagcacttaaaacagtgtctggcacatggtaggtgctgatgtcatcaccctcttcttcctcctcatcaccatactagactgcatttcatttcctagatgatatttagtccaagttatttttgtgatacctttctttctttcccctctaattgccaatgcacttctcctaatatgagtgatatgtatctcaatatttcccaaaatgactcaaaaaagtattaaatcacctccacatagccatgagataatattggatatataaataatatatatttttaatttgtatttcaaaatgttatttccatatacagttattgtattttgtaacccaaaagtcaggatacaacgttatatccatggtctgacaaggggacagaacacttagaattgagccttccctgcatcagcttgactacattcagtgatagaaatgtattagacttggccaagctttgtcctcaaaattgcttcctaatcaaattctggcctaggaactccttggcatgcctccatgcaaagatggaatgggtctcttcttgaggagagtactggtgggttcctccctggtgcaataggatgccagccttcctcttcactgtctggtttctaggacatctgctgtcaaacagggtctctatctaccagtattccagagccttgcaagagagagtagcatcaaacagtctggtctgcttctatcaaaagcctccccaataaaaaagatagatacttgttattggctgaagaatatacagtttttcacctttccaggtactctaaattacagacttgtatcacattgaatccaaggctgcctatacatattaacaactgatgtttattgagcactaactagtgctaggcattatataagcactttacttacattatctcacttaaccttctctctctttatatatatatatatatatatatatataaagcagaaatacagaaagagcctggacccagaaaacatccatgaatagctgcattggccatggatggcctgaccctggacttattatatcagaaaaataaccccctaagtaattctgatagattttttcattcttggagccaaacacgtttcaaattgatacacttcattttatgaataaggaaactaaagctcagtgagtttgggtaatttctccaaagtcctgtggccagtagatgctagaaacaggatttgtacccacatctgcccagcaccaacacacatgctcttactcacaagagcactgaagcgccctcccatcactgtatctgcatcagttcaccacgtctcatccttcccaaaccatgtgtcacagaactcagatattattcatagatatgcctcagcagaaatgttttggtggtaagttaagttctaagaacacagagttttgtattccctttttgtagagaaccacaaagcatatcaaaacgtcagtttccaaaaaaaaacaaaaaacctattattaagaaacctgcttgactttgattaattcagtggttcccaaacttatttgagtacggaacgcatttttttaaatgacttttctataaatatcttccagaacattgttcccttgaacgccaatttgggagatcactcactgaattttaagcattatttcctcagctttggtttaaagtaaaaggaaagtgagtcacaattttgtccattctgcacctcctggtcccctatgaagtcccaaaggataaatttctttgagaatctggtgctcagggcaaaatatgtacctcctgaggaagttatttgcttcctttttaaaaataaaagtatgtgacttacagagcttctccttttgttttggctttctggaggctgagacaaatgggaagcaattatcagctcaggttcctgggttttacagatttgttgttgttgttttttttaatctgatcttgatttttcctcttgatcttccctgtcttaattctgtatttgagttttatttggcattattgtatatgttcttgtgaatgacattatgtttgtggaatagagtggagtacaaattcgttaaataaaaatcaagactgacctgaggctgggcgcagtggctcacgcctgtaatcccagcactttggaggctgatgcaggtggaccacaagctcaggagttcgagaccagcctggccaatatggtgaaatctcatctctactaaaaatacaaaaattagctgggtgtggtggtgggcacctgtagtcccagctactccggaggctgaggcaggagaatcgcttgaatgcaggaggcggaggttgcagtgagccaagatcgtgccactgcactccagcctgggtgacagagtgagcttctgtctcaaaaaaaaaaagactgacctgaaaaatacaagtcatagggcctgtttgtcaacatgattgtactgatagtatctgatcgaagaatcggtgtagtttttaataattgatactataaaacttgaaattacggcttatgaatatctaatgagaggaaggaatagattttcaaatggggatatattcttggagatagaacataaatgcctttgctgaatttttattgaaattaattatacttctctagattgccaagctaaatcaatatctataccatcaaattcagtaaccaaattaatcacaaccttgcaaaaataaaataaaattaagaaagacatgccctgtgatacatacctatttcaggaaacctagttaaccatggttgaatagccatcacttccttaagaaggaatacaatttgctataattgtcaacacagaggagcagtaagttatttgtgaagttggtgacttgtgccatttattgaagagtcaacccaacaagccccagatcaataaacaaatgtcaactaagggacatactgtgaaatacagtaggcaatacaaagaaatatgatctcgcggctgctatgagagaacactcaagtattaagaaggggctaggagaagcagctcagaatgttatttgcagcttttgttttaaaacgaactcctatagcactgctttcagacatcatcaattgtattgataatctttcatttttctatatggcctctcttagatctttaaaaccctaaagtccagattttaatccgagacatggtgactgcttagataaatttcatgtgtgaagatagaacattttaaaatattagcatttgtttctttctctctactttttcaggcagcaaaaagatgtcctcttggtggccttcagaaaagggttcttgcaatataaacgcaaagaaacaaaagggatctgattttatcttttgagtttctatgtcgatctttggacccatggctgaaaaaacagcttgagagaaaagagttttcaagaacaaaagccaaatccctcttagagttggttagcctgcataaaacagaaaatggaaaagcttgaatacagtttatttccctttcttgtagaagaagtctggtagataggctagagcaggtgtggttatcagagattcagactctgtctatatttcagttacctcctagtactagcttgcagcctcaagattacctgctggtacaagatggttgctagagctccaaccattataactacatctgaggcaataggaactagggaaaggcaaagagaagaccttcctgctgagtcagatcacttacgcagccgtctcagaagtaccaggcaactcttacgcttatatttcatttgtctgattgtagttacatgaccatgctgggcttcaagggagcctggaaaacataatttttttagcagggcacacagctgattcaaaaaaagaaaccagcacttgttactgaagcagaaagggagaatagatgtagagttgcaaataacagtccttgccacatctctaaagaacccaagggggtaaagttgatacctaagtgtaagttgagaataattcttgattatgcaggtgcaaattttctaaccctagatgagataaacattctttggactggaggatgagcaaaataacagaaaggacatgaaaagaaaatagatgttgtgcatccccacgcgggtccctgtgccccaagagtcatcatcagatcctccagagggggcaccagaaacctcagatagactggcagatccaaaccagagaagtcctgtgccttgcacctgatagaggcctggtagataacaagcttcatggcatttctcctgacctgcctggtgagatatccatactggaaatggcagcctggcatgtctaggcagcaaagcctgcaagaactccatgagatcccgtgtgatcctacagtagtttggaagagcacccaaaatgtcccaaggccttcacactcccttatgaggggctcaaaagtagctgagaggggccagcaggtttgaagactaagtcagagatgagaaggatatggggtaactttcctggaccaactaccagaaaccagatggggaacccagatgttctagaaatttcctttagggatgatgtacaactccgcagatgccagcagggacagatgcctccctctccctcaacacgtggctctgtgaaaactcctcagaatttagacatgatctagggaacagagggtggtagaaaccctgaactgactggggttggggggaaggcagatttgagagtgaaaattctgatttgactatgttttctttaaaatggctggggttaaattatcctaccaggcagaatggagatttaaaattaaaattcagttatagaaaaaattattttataaaactgagtgtatgacttgtgaaaattcatctgcaaaacatgctttctcagtttgtcaattctcactactaaaagccacttttgaaagctcagaattttggcacattcttcattgatgtatgaaaagttgtaacaaacaagtattttgctgtttcgtcattgcttcaataatattgtacctcatactcatgactcacagataccctttttagcccttgccaacaagccaggcattgttgtatttgtacaacagatacaaataaaatttgtatttcccaacactttagctgcatctaagtgcccaatttgtcctagcttgttcaggactttactggttttagcaatatagtccagtaccccagaaatccttccaacaatcccagacaaaccaggatgtttggttaccctctctgcatcagaatcacctggaggacttgttaaagcacagattcctgggctgcacccctagagcttttaattcaataggagtggggatgggggctcaagatcttttatttgtaacaagctcccaggctacaaatctagggaccttgttgcactgaccaaagacacaggtcacggtttttttccccaacattaacataataaagcaattgcgtcaatccataaccaacataacaatgacaaatcaatgatggattcttagcaaaaactttgaccaaggtctcaagtttttctccttttcttttatagcagttccctgaacatggcagctctgtggagctgtaccagagttcattcgtgggaggtaagcttagaacttgccccttagcccttccagaggttcattaagcatctaatttttcatattaaatccctttctgctaaaaccagcaagagtgttctgttatctgtaactaatcttgatgcacacatcatggggacactgggtcacagggtttgataagtggtagaagaagggggaaagaagtttgtgcacatttcagagacaagaggaaaaggaaaagcagagatttcctgtgagtgcaaaggcctgtctaggcaaagatgcccctgcccaccttgggccatttacaaggaaaacacttacaaacccagcagtagaaaaccatatcaatacattcccaaacaattactacagtcagcagagatgacatcattctccttcccatcagaacaataagcctggctctaactctataaacagtaaaagcaaaatgtgtttctctaacagatggaaatgaataggtttgaagttgatagtgatctttctgtggtctaaaaggcctcacccaatacaaatatcttaccctagacaataacaaatgtaaacacaaccaaacacagtgaacccccttgagccgagtgaaggctgccagaaccagagacccaggtcctggcaaactcagacatttaaggacaatctagaagaaaggagtccctaaattttcacacatctccaaagaaatcaacttcagagctattccttttgaatttttatttaagccttaaaagttaattcaccatgtaaggtagagaggcaaaaagagatgacagatatactctccactaccaggtcactaatctgctcaatcaagcatggcagggaagcaagtaaaccatgaaatctcagtgtagacgacccttgattttaactcaaatatgccgattaaatccttgacattggattatgcatatgtaaggtaccagtgttagatgttaaagctaatatttctcctgatgaagcagcacctttgctaggacttagtgagttggtaagcgtgcactgacaaccctgtcctacagcagtggcatccacacactcagggaagtaccacacatcgctatagtctcattctcttgtagtgttacaggcaacttacaccatctctgattcacttaaaaaattctcagctgacttgcaaaataattgcaacagactctctttgtgtaaacttgattactattttgtaaggtcccgtttctataaggccaaggaatctgtgaaatccgtatttttttccttcttttaaaacttgaatttttatcccaatagatactttttacccataggacttaatacaaagtataaaattgtcatatgttatggtttttacagttttatttctgcttttctttcctgctgcacttgcaatgaacttactgtaataattgtatccattcattagaaggcactttatatccaacaaatcttcaagtcacagggtttgtaagaggaaaagagtggttaagaatataatgactagtttctactcttgaatatttccaatctttcctcaacacagcagcaggccctttgtgagatttaaacccaaacacggctctctctgctgagaatccctcaatggtttcccattgcgttcagaataaacacaagccccgttacaaggcctacaataacaggccgctcatctagggtgttatgtgagttaataaatgtaaaattcttagaagtgtgcctggcacacagcaagtgctcagtgaattctagctgtccttctccttccttctcgccctttccctcctcctccatgcttacctggcaatgcttcccatgacctctcccttgcctcactctgctgtcagccaccttctccctcctccagtatgctgcattcacactggtcatcctccagattcttgaacacatcaagcttttgcctatttcagaatccttccccaagcggttccttccctgtcatccaggtggccacttctcatcttttaggcctaaatggctcctcctcagaagaacttccttttctgcctaatctaaattggtcccccctattattttcccacagactaagttcttttcttttagtgtcctaattacaacttgtaattgatacttgtttgttttaaatgttcagtgtcattctttcccatcagcccttaaactctctctgttaggaaagaggacagatgttttgtttgctagttatttaacactgtgtttgccatctagaggaaactcaattagtatggaaggagaaaaagaaaaattatttaaaagtaaattcaatatttattaaatgtttaccatgtggctaggcattctactaaatacttagaatgtattagctcctctaatctttcaaatatctatgagctatgttattatctctttttcacatttgtaaaaagtggaactcaaagaattcatgtaagtcataccggtaataagtgtcagagctgagatttgaactgaggtctttgtagctccaaatcatttgcttttcctctcataccaagttgcttccagtaacaagggagtggaagtatgtgaaattacacaatatgataaatagctccttctgcctcatttatggcatgtaaaatttccctgagtaagtggttcagttgtccttctggaattgaaacatcaatgagacaattttgctgccatgtaatgagcttttccccgggcatgtgctatatcttttatcagcccaagtaatacttcagggcttgtgtacttaccatgtattaattgtatgactttaaaatattgagtagtgctccctcaagggcatgctccctcaagggctgtgttttctgtcaggtgccattgtggacttgggtttgttaaatgagaaagtgatcaatttccagagcaaccagaagaataccctgcagagtgagctcaatggaaagaaagcaatcaagtgttaaggggtaaggggaaataatggcaagaggttggggatggcggggagatctattggttccaaatcagatgcgctcagtcttaaaatcagtaacatctcaagttataccagtgattactcccagactaaaggctctttgactcccatttcatttcccaaatagtgagatgttcttgaatatcaaattgaaaattagaaagccaagaaaacaagagggaaataataatatttaacatttactatgctaggtcttttacatgaattaacttattttgtcctcaaaaaccctcatggtagacactaatattattcccaataaacagatgagtaagctgaggcacagaaaggtaaaataagttgcagtgtggtcttactaaaaattgtattggatgatgaaatcagcaagaatgatggaataagaaccattgaatatcatctcctctacaaaagcaacaaaaacactagaaaatattatgtcaacttcttcagaatcctggatattaaacaaaagcttgcaacaattcaggaagcattaattcaagaaaaatgactgaatcttaacaaattttttttgacattttaacttgctttgtttctatgcctctctcccacctctgtggtagccttgaaaaccaatagcccactgttactgtgaaaaccagaagcttctgggggacacacattagggttggagttctttcaaagcctcattttcagagaattgtcattgcttgacctgtctgcgaattccctggaaaaccccacttgcagagtttgtctttatctgacctactagagcttgcccagtgacaacattttcaccaagagtgtttattgaaaacaatcagtggcagttatatacaatgaaacagctatatgaagcagcaataacaatttgggtaagcaaaaaatcggaccaaaaaaacttagaaaaatctggggaatgacattccatagggggctttgacaagttccaacatattcctggaaatctggaagtccatgcatgtgtatagagctgtgtacaggcccaggaaatacttaagaaagtcctaagctcatttctctggctgaccttgaggctctgcacaagcaagaagtagaaatttggctgggtatagtggctcacgcctagaatcccagcactttgggaagttgaggcaggagtattgcttgaagccaggagttcaagaccagtctgggcaaaataaagaggcctcatctctacaaaaaatgtaaaaaatatccaggtatggtgacacacacctgtagtcccagctacttggaaggctgaggctggagaatctgtgagcccaggagttgaggctgcggtgagctatgattatgccactgcactccagcctgggtgatacagcaagacccctatctctaaaaataaaataggccaggcgtggtggctcacgcttgtaatcctagcactttgggaggccgaggcaggcagaccacctgaggtcgcgagttccagaccagccttaccaacatggagaaaccctgtctccactaaaaacacaaaattagccaggcgtggtggtgcatgcgtataatcccagctactcgggaaagctgaggcaggagaatcgcttgaacccgggaggcggaggttgcggtgagctgagatctcgccattgcactccagtctgggcaacaagagcgaaactccgtctcgagaaaaataaaaagtaaataaaaaataaaaagaggttgaggttgtaaatggtgtgcctaagcattgacagtatgtcccaatatgtacacaaaacctcttagcaaaggctagaacacttactggtttcaggtatctaaggatatctatatccaattattagctgaccacaaagctgactgagcagatttcaatggctatacactacaatgaatatagaccttgcagaataagtttagaaatgccattaaacaaacaacaataagaaaaaacagaaataacaacaatcctggggaagaaggaagaatcagattttcaaagttgctatattttataatttaaaatgtctaattttcaacaaaataagagggatatctaaaaaatcaagaaagtggccgggcacggtggctcatgcctgtagtcccagcactttgggaggccaaggcgggcagatcacgaggtcaggagatcgagaccatcctggcgaaccctgtgaaaccccgtctctactaaaaatacaaaaacattagccaggcgtggtggcgggcacctgtagtcccagctactcaggaggctgaggcaggagaatggcatgaacccggggggcagagcttgcagtgagcagagatcacgccactgcactccagcctgggcaacagagtgagactccatctcaaaaaaaaaaaaaaaagaaaaaaaaatcaagaaagtatggcccatacacagagggaaacaaaagtagtcattataaatattcactaaggaagcccagatgttggacttaatagccaacgactttaaaatacctatttaaatatattcaactaactaaagaaatattatgtctaaagaattaaaagaatatatgagaacaatttctcaccaaatagagaatatcaataaggagatggaaagtatcaaaaagaattaataaaaattctatagttggaaagtagaacaactgaaatttaaaaattatctagagggattcaacagcagatttgagctagcagtagaaagaatcatcaaatctaaagatagggcagttgacattatccagtttgaagattagagagagaagaaaaaaggaatgaagaaaaataaacagagccttagacatctgtgggacacatcagcatgtcaatacactcataatgagaatgccagaaaaagagaaaagaaacaagagcagaaagaatatttacagacattatgactgaaaacttcccaaatttgatgaaaaacattaatttacaatccaagaagtcactacaagctccaagtagaataaaactcaaagagatccacccatagacacattattgtcaagttgtcaaaagacaaagatacaattttgaaagcaacaagagggaagtgattcatcacatacaagtgatcttcaataagattaacagataatttctcatcagaaactggaggtcagaaagcagagggatggggtgggagtgggggggcatcctgtcaaccaagacttttatatccagcagaactaaccttcgaaaataaaggagaaattaagataaacaaaaactgaaagaatttgtcactagcagacttgtactacaagaaacactaaagggagtgtttcaggctgaaatgaataaaaaccagatagtaagtcaaatacaaatgaagaaataaagagcactgataaggctgggctcagtggctcacacctataatcccaacattttgggaggccaaggcaggaagatcacttgaggccagaagttcaaggccagcctgggcaacatagcaagacactgtctctacaaaaaaatttaaaaattagccaggtgtggtggcatgcacctgtagtcctacatacttgggaggctgaggcaggaggattcctttatcccaggagtttgaggtggtagtgaactatgatggcaactgcactccagcctgggcaacagggcaataccctgtctctggaaaaaaaaaataaaagagtgctggcaaaagcaactacattggctgatataaaagatagtataaatcttttgtttgtaattctttttttcttcctatctaatttaaaatgcaactatataaagtactaatgtaaatctgttttgttgggcagataatatatagagatgtaatctgtatgacaacaataagacaaaggagtggtggggcagaactatataggataaaatgtgtgtatactactgaaattaagctggtattaatcctaactagattgttataaatcaagatattaattgcggctggaagtgttagcctcccgagtagctgtaaaccagctggtttacagctactcgggaggctgaggtgggaggattgcttgagaacaggagtttgagaccagcctgagcaacacagcaagactctatttttaaaattttttaaatttaatttactttaaaaaagatactaattataatacccaggacaactactatgaatgtaactaaaaacatgtatagtaaaagaaataacaagggaattaagattatacaccagaaaatatttatcacaaaaaaggcaataatggatgaataaaggaataaaacataaaaaatgaatggaaaacaaatagaaaaattacttacataaatcttaccttatcagtaattacattgaatgtaaataaattgaacattttaattaaaagacagaactacattttgtaaaaaaaaaaacaaaacaaaacatgatccaactttatgccaggtacaagagactcccttagattaaaagacacaaatagattgaaagttaaaatatggggaaaatataccatgtaaacagtaaccaaaagagagatgaagtggctatactaatatcagagaaaacagactttaaaatatgatggtaaaagactcaatccagcaaaaagatacaacaatatacatacatatgcacctaacaacatgaagcaaaactgacagacttgaaaggaaatgaaaataagtcaacaataatagttggagacttcaatatcccacttctaataacagaacaaccagacaaaaaatcagcaagaaaactgaatacttgaacaacattataaaccaactagacccaacagacatggatgaaccttgaaaacactatgctacactttttcaaacaaaaagtcacacattatgtgattccatttatatagattgtttagaacacagagtacagagagtatattagcagtttctgggagttgtggggaggagaaaaagggaagtgactactaataagattttttttttttttgagatggactctcactctgtcactaggctggagtgtgcagtggtgtgatctcggctcactgtaacctctgactccctggttcaagcgattctcccgcctcagtctcctgagtaactggaattacaggcacgcgccaccatgtccagctaatttttgtatttttagtagagatggggtttcatcacattggccaggatggtctccatctcctcacctcacgatctgcctgcctcggcctcccaaagtgctgggattataggtgtgagccaccacgcccggccataagatctcttttgagggtgataaaaatgttctggaatttgatagtggtaatgtttgcacaacagtctgaatatactaaatacgactaaattataagctttaaaggggtaaaattttatgatatataaattaaatctcaataaaaattatatgaagttgggagttcgttgtgtcttaacacaccttcagctattttcacttgtggattatctagaaatacaccatgtattattcaagacttctgagggtgctccattaccaattcattactttatattagatgttgctgtcccagagttctcttttaaaacatatatcaattgccttaagggtaattgccatacgaagtctctaactccctcatgtgagtggatttttagtccccagagaatgggcagagcatgggcaaagaatgggacaccagctttttcaggctcaggactccatttagcccggaggggaggagaaagaaacattcctatctccaattatcagataactctgtgcccttagaaatgagttttaacctttctaagcatttccttgtaatttgctaagcgaaactaatattaattgccattcatgtgtcactggagtttcgctaaaatttatgagatattaagcctgagtcaaccaagctgggaagggcagtaatggggcccagcagggaaggatgaagaatggaaaagaaagacagaagaaaaaccactttctctttatccacaaaataatacttgtttggcccacatcatagggctactgcaaggatcaaaggatgttgtgtctgtgtaagtgctttgcatccacaatatgccacacaaatgagaggaatcattactgtttaatgagctagagaagcagttcactacattattagtggtctgagttactgttcagttctcacgtgcaggatctttcccaaatttttcatagaaaaaattggtctttaaatgattggtgtgttataaatatgaaataatagcattgtcattaatgattataaattattcagcaactgtgactgaattacataaaaaatttgtctttaaaagattggtatgttacaaatatgaaataatagcattgtcattaatgattataaattattcagcaaccgtgattgaatgacatatcaacaaaagtctaaagtacataatcaaacgttctcaatatgttgacagaatttgagcagaatcaagacaaagatttaaaagcactttgttaatgggaaaatggcaaataaatgccagttattataattaattgaactaagaaacttttattcattttaatttttaagctcatcttgaaaaatattaaccaatttctaatgcagtcccatgacagtatttattgtgccatctgctggaagtttctgaaaaattgatgaggtgaagatgaacaaaatgataaacggcacagcacattgtattttaagtacacatattcctattcttcacatattaaaatgaatgtaggttaagttcctggcatgcatttcttgtattaatatttgctatgtaaaacattttaatgctaaataaatgaatgtgtgtcttgaattacagcatcatcattcactcattcaccaatatgttttgagttcttgctgtctctgccaggccctgtgctaagaaccaagcatgcaaggaggtataagtcactgtccctgctcacatggcatttagggcctccatttggtgggggagaagacagattcacaaacaactaatgtaacacactggaaaacaaaagctccatgggggaaactgaggaggggcctctcaaatccaagggatggtagttttttccacaaaatattgaaatccactatctttgcataattgggggaaagagagaagaattatggaagaaaaatcaaactaaggaaatgaagccaccaggcaagtagaaaataaaggtataaagaaaacaaaactttctccaagcctgtgaaacatcacaggtgtcaagcagtctccgtgatcatcagattagatttaaattagtctagccttctgcctattaaatgcaccatagatttcaatacagaatatataaactctgcagaccaatatatttatgatgaaaccccaacataatttgccctacaatgaattcagacataagacaactgtaatgagctttcatcttactcagcaggctcatcccaatcagtttgccaaccccacaaaaatgcaatcctgcattttacatgactgaaatttttggaccccacccagggagctttagtggggactaacaggtaggtgtaataaaagttatctttagaccagtggttcacaaacttcaatgtgcataaaaatcacctggagagcttcttaaaatgccgattgctgtccccttcacccccaaccccgagggtttcttattcagaaggtcctaggcatcctctgagaatttgcatttctaacaagttcccaggtaatgttgatgctgctggtccagagaccacacttgagaactactccctcagactatggcaacacaaaggaaacaaagacaaaatattcatcagctttataagccttttaaaataacttatggtggtttgttctgattttaaaagaaatacagggtatattgaaaaaactgaaaaatagagacaattacaaagaagaaaaggaaaatcacttaaaatttcaacacccagaaataaccactataaacatttagtatcttttgttccatatttcttttgatgtgtgtatgtccacacttatacagaattgaactcattcggtgtacataattttggcatctgattttttctttgagtatcctattttgagcatattccatattatctaaaaattagccaatagagagtacatcaatgatcaggaaattgccttgagcagctagggtttaaaacatgggacctctgaaaaacgggtagaacacaccacagacttgacccattcaggaggcaaggaagctggggaatttatcttatattttttctttgtcattagttgagggccagtgcttccaagactattaacttttcaatactgctggccttccaatgcttggccaagagaaagccctaagaaagtcgcaggtgcttccaataggatgccactggtaggtaaaggaatgatgagtaagtatggataggctatgggcgggtaatcaataacagctgctacaggcaacacatctagagtgaggatgaagcctcccacagagaggactttgagaagcacatccatctagtcttctattacgttcatttgttttttaaaatatcagtcctattattaaacagttacatcttgcattctttctattgaaacagtttttatagagattgtctttcaggagatgttcttatgaactaagccttacatcctgctgtactcgtggcttggaaatgaaggaccctccatcagcttgctctgaccccataccttccagcattccttcatgctgcattattttctgtagtagttcagcgtatcttagactgcctgtggttgtctccattttagctctctttctacaggtggtagagttttctgagattaatgtattccacttttctccaaatcgtttaagctgtcttccagtcagtaccacctcactatgggtagggcagctccaagctgtttccatgtttatcttcttagtgtgattttagggatgctgaaaatcttgcctgccccaaattctggcctggtagagacagcctgtaagagagttcatgggaacagttatatctaggggccagttattctatagcaattcccttttggagtccctgagctgtcaagaaagtcttagctgagctatgggaagttaaaaggagaatccatgcatgtgggaaacgagagtcagagttccctgggggcactgtggtggtgacagctgtgatgaatgtgagattcctaagggaaaggaagatctcagaggacaggagatagggctctaacatcggctgcctttcagtgtcaatttcccacccaccaatagctttagaggatgacagtgtggttttattgaggaagatgatagttccttctatgtgtactgaacatcaaaggcacatgaactaaacaatggatagtaaatgaatctccaaaagcaagagatgagttcccttgctcaaggaagtgatactggaccagccttagccaccattaaaggagcactagagaatggtagaagagcagtaatagaccactcaggcattgaggatagaaagggttatacttgcttgagttcaaaccactttgagatcctcaataataactgtgtctcttatataaggctcagcagtattcttctatgaaaaataagcaagtcacataaaccctctgaagccaaggcttcatcatacataaaatggatgttgggactatactaggtcctataaatggcatccatatttcccattcaagttcaaaaccaatcatgagatagccaaagaggtcagatagctagaaactacaatgccaactttattactaaaagagctgatactggaaaacctgggcttaggtgcacagcaacagtgggcttcctaatactgcatgctagaattgggcaggcatattcacccagtcactggctcagatggacagcagagacctcttcattccttccttcaggcatggagaggcaggagtaaatgcacactagctgttggtgggcagatttgacagagacaaagacagaaatgggagagaaataggagagaaatggatcaatagtgcttgtaaagatctttcttccaaactcttcctgtagggaatagaaagttactgggtgtattgtactaatgaaagcttctctgcctggagacaggcagagtaataggaataagcaatcatcctctccaataaggataatcctacttacttggcagagtttgctgcaaggcttaaatgaggtaaaatcacattcgtggttcatcacatgggcttaagcttccgacagctctgaatttggaaccatgctctgtaactattagctggccttggcagaatactaaactctttagcctcagtttcctaataaataaaatgaacataataattgtttatttcagaaggttgtcttaagaatcgacaaagagcatttagcacagagctgggcacataagaactccatacctactagatatttaatcatattaaggcatgtaacacagtatctagcacatgggcttactaaatagcagtggtggtggtaattattgttgttgttacttttattggcctagaattgttcctaggcctcctaaaatgctattattttctaggaaaggaggtcttttcagtactgttgttaagactcctttcattggttttgacttctaacttcaacacagccctacttgcaaggagtctatagaaactatcagctgagtcaggaccatttcctgagcctttcccaacacctctgctatttagaggtcagatgtcagctgcaactcaagaaaaagatgcccatattaggagaactctcagatccccatggagctacattgcccagcaccatctgtgttggtttcatgctgttaacactcatcaattcccaattgacagcagcactggttctattccagtaattgtgacaaagaacataatactcagaaactccaggggcaaagagatgtatgtgttcacttagtgtggataagggatttttgctctctaaactaccagagatctaataaacattccttgaacctgtgatacagtgtcctatatccaactgtctcacaatctcttacttttgttaaaacagctttactaaaatataattcacataccatataattcacccatttaattgttttagtagaaacacaaggctgtgcaaccatcatcacaatctaattttagaacatttttgtctcccctgaaagaaacccagtgtccatcagcagtaatctccattcccctgttaggccctctctagccccacacaaatgctaatatattttctgtcattatacattttcttattctgaacattttatataaatggccacatataaaatgtggtcttttggctcctttcacctagcataatgttttcaaggcccatctatgttgcagcgtgtgttagaacttcatgcctttttatggccagataatattccattgtatgagtattctacatgttatttatccattcaccagttgatgaaaatttgggttgttcctactttttttggccgttctgaataatgctgctctgaacatttgagtacaactttttgtgtagacataggtttttaatttctcttggataaaatttctgggtcatttgataaccttaattttttaaagaattgccaaattgttatagaaagcaattgctacattttacattcctaccagcaaaaatgagcatcccagtgatataatttggctctgtgttcccacccaaatctcatgctgaattgtactccagtgttggaggaggggtctggtgggaggtgactgaatcatggttgggggatttcccctgtgctgttctcatgatagtgagttctcacagaatcttgttgttcaaaagtgtgtagcacctccccactttgctctcttccccttcctctaaacatgtaggacatgtctgcttcaccttcaccttctgctatattctaagtttcctgaggcctccccagccatgcttcctgtacaacctgtggaaccatgagccaattaaacctctataaattatcctattacaagaagttctttttagcattgtgaaaatggactaatatagaaaattggcaacagagaggtgagtcattgttatacatatacctgaaaatgcaaaagcaattttggaactgggtaacaggcagaggttggaacagtttggaggggtcagaagaagaaaggaagatgaagtaaagtttggagcttcctaaaaacttgttaaattgtgaccaaaatgctgacagtgaaatggacaataaagtccaggctgaagttgtctcagatggagatgaggaacttattaggaatggagcaaaggtcacctttgctatgctttagcaaagagactggtggcattgtgcccatgctctagggatctttggaactttgaacttgagagtgatgatttagggtatatggcagaagaaatttttaagcagcaaagtattcaagaagtgacctggctgcttctaatatggtcgtatgcatgagcaaagagatgatctacaactggaacttgtattttaaagggaagcagagcataaaagtttacaaaatttgcagcctgaccatgtgatagaaaagaaaaatccattttctggggaggaattcaatccagctgcagaaatctgcataagtaaagaggagccaaatgttaacagccaagataatggggaaaagaactggaaggcatttcagaccttcacagcagcctccctgccacacaggcccagaggcctaggagggaagagtagtttcagaagtcaggcctgaggccctgctgccctgtgcaacctcaggacatttctccctacgtcccagacagttcagatccagccttggcttaaagggccccagatacatctcaggccacactgctccagagggtgcaagtcataaaccttggtggcttccatgtggtattaagcctgcaggtgtgcagaggacaagagttgaggcttgggagccttcatctggatttcagaagctatatagaaacatctggatgtccaggcagaagtctgctgtgggggtggagccctcatggataacctcttctagggaagtgtggaggggaaatgtggggttggagttcccacacagagtccccactggggcactgctcctctgtgaggagaaggccacaatcctccagaccccagaatggtagatccactgacaacctgcatcatgtgtctggaaaagccacagacactcaacaccagtccatgaaagcagccctggggactgtaccccacagtggcacaggggtggaggtgcccaaggccttgagagcccaccccttgcatcagtgtggcctggctgtgagacatgaagtcaaaggagattattttggagctttgtgatttaatgcccgccctcctggatttcaacttgcatgggcctggtagccctttgttttagccaatttttctcccttttggaatgggagcattttcccaatgtctgtaccccccattgtatcttggaggtaactaacttgttttgattttacaggctcataggcaaaagggacttgcctaatctcagatgagactctggacttaggcttttgagttaatgctggaatgagttaagactctgggggactgttgagaagacatgattgtgttttgaaatgtgagaagaacatgagatttgggaggggctgggggcagaaagatatgatttagctctgtgtccccacccaaatcgcatgtcaaattgtaatctccagtgttggaggaggggcctggtgggaggtgactggatcattggggcggatttcctctttgctgttctcacgatagtgagtgagatctaatgagatctggttgtttaaaagtatctagcacctccccattcactctcttcctcctgctccagccatgtagggcatgtctgtttccccttcaccttctgccatgactgtaagtttcctgagccctctccagcaatgcttcctgtacagcctgtgaaaccatgagccaactaaacctcttttctttataaattaccttgtctctgtagttctttacagcagtatgagaacaagctagtatacacattttctccacatcctcaccaacatttgttattgtcttttttttctcataaccatactagcatgtgtgaagtggaattttgttttagtttttatttccattttcccaatgatgttgagcatcttttcatgtgtttattggccatttatatatcttcttgggagaaattactatttaagtactttcctcattttttaccaggttatttgttttattgttgagttgtaagagttttccatatgttcttgatacaataaccttattagacacgtgatttccagatttctcccattctgtcagttatttttcattgtcttcatactttctttgaagcacaaaaggctttaatttttcggtagtccaatttatttatttttctttggtttcttgtgctttaggtgcaatatctaagaaaccactgcctaacccaagttcataaagatttactcctatactttcttctaagagttttatagctttagcttttacatttaggtctttgatgcattttgagttaattttcgtgtatgatgtgaataaaggtctacatccattcttctgcatgtggatatcctttgcagaaaagactattctttcacctattgatgtcaaaactaaactaaccagggatttatgagtttatttctggactctccattctattccattgatctatatgtctatccttatgcctataacacacaatcttgattacttgaagtttgtggtaagttttggaatcaggagtgtgagtactccaaatttgttcttttcatgtcattattgttttggctattctagatatctttcatttccatatgaattttaggatcaggttttccatgaggtgtataccataagtttccatatattatgttttgttttcattcatcttgaatattttctaattttccttgtgatttttttcttcaaaccatggttaataacatgttgtttaatttttacatatttgccagtttcccatgtctgttattgatttctaatctaattccactatgattggaaaagatacttggtattatttcattctccttaaatttattgaggtttgttttgtgacctaccatatagtctattatgttccatgttcacttgagcaaaatgtgtattctgttgtaaatgtgtattcttgagcaaaatgttgatggagtgtgtcctatatatctctgttaggtcaggttggtttatggccccattcaactctttcatctccttattgatcttctgcctcatttttctatccattattgaaactggagtattgaaatctccaactattattgggaattcggggggaggttttattgtcattattgttgttttgagacaggatctcactgtgttgcccagactgtagtgtagtgaccattatagtccactacagccttgaactcctgggcccaagtgatcctcctgcctcagcctcccaagtagctggaactataaatgcacaccaccaagcccagtttattgttttttgtagagatggggtcttgctatgttgtcctattgccttctggccttcactgttgtggtgaaaaactggctgttaatcttaggatttccttgtatgtgatgaattatttttatcatgctgtttgcaagactttctttttgtctttccacattttaaaagtggaaagtgattgtgtttatcttacttggaattcactgaccttcttagaggtatatgttttctatcaaatttgggaaattttcagccattgtttcttcaaaaatgttttctgtcctttttctcctctaatttggtgactcacactaatgtatatgtgggtgtccttaatagtgtctcacatttttctgagactttgttccttgttctttattctttattctgtctgtttttcaaactgaatcatctcaaaagatctatcttcaagttcaatgtttctttcttctacaagctcaaatctactcttgaacccctctagtgaatttttgatttcagttattgcaattttcaactccaaatttccacttggttattttaaataatatctgtacttttattgatattctctattttatgagacattgtcatcataccttcttttaattctttaagtatggttttctttagctcttttaacatatttagaattgcttctttaaagtctctgtctgcgtagtttatcatctgggtccttttgaagtcagtttctatttctactaattcttttcctatgtatgggtaacagtttcctggttcttagtatgtctcataatttttttgaaaactggaaattttaattaatgtaacaactctggatacagattccctctcaccccaccccaggagagtgttgttttccttgtcatttgcttatttgttaggtgatttagctgaactaatgccatgacgtctctttcccctgcagtgtgcagcctctgatgtctctgctcagatttttttccccttgattttatcttttaacctggatacctacagattgtccttggattggcataagcaacttactggtcaaaggttgtgcttaagttcattcagctagttagatttgtactctaatactggatgtatgtgtgatttgtaaactattgtcacaattcagggagtttatttttatttatttttgtcctacatttagccagtgataactagcttgaagattccctctctgatcattcctaggaggacaaagctttgggcatgcacacattattccagagagccaaggatgactatgattatttttaagcctgacttcctaggagtcatccttgtggcaaagtagtatattgtgtagtcagtatttgctcatggggttatgtttaagtcacttgtgttgatgagtctgtgtgcaggttggggaatgctttcaagtctgtgcatgtcttgctctgattgctcctgagtgggtgcaacctagcataggtacacagctttcctgatccccagagttgtctgtgatcccagaagagctcttcttagttatctctttgccgtctcttggtttttctgccactttgcttgtggcagagctatcagcctcctcttaattgttctccactaagatcttcactgttttcaacaaggcttttctctattctcttttccaaataaaatcggttcctctggcagagctctttgtccttatgatctgcctttccttctgtgcaaaaatcctatacaactgcaatgaagctgaagatagagatatgctttatctagtgtggcacccccaccctatcagtggacatgtgggcaggtttaccagcctgtggtcttttggacttgtttcttctggtatggaccctttattttatgagttggggtagggatgagttgtggtcccagtatcttttgtctgcaatgcctgagatagagcttctgcttatcaatagtgactggaaggcagaatagagacccagttctctcagccatggctgtccaaaattacctttttctgcagaattacatacattaaatacaactctttttaattacatacattacatacactaaaataatttgtctgcagaattacagagattctgcaacatggtactgagggttaggggagagaatttctagtggcctgccctttcatggtgaaccatgagcccagactgagagagagagacagagcccctgtcttcttagctgcaaacacttggagtagaacttttgtaacacagagctggaggcagaggtgagagtaatgtagctggttgcagctcaaatgccacaagctgccactgttcttaacaaaatttagtagactttcttgaatgaatgtttcttcattgtcatattccctccagatactttgaatgattttttaaaaatagttttcatcagttaaataactgttttgctggtgagaagctccatgtaactcctgagctatcattttggaagtcccacctcatccttttttactatttctgtccctgatcaacagttggtgggaagagcatgaataagcaggaagtcagcaatcaaatgtctcctttgtggaaagttctcttaagcagttagattcacagaaactatagattctatagaaactcatagatactatagatttctatattgtatattatggatttatcattagaaataataggagaatttacattctgggatcttcccatcctctgtatcttcaacccctttaaccattaatgagtagtattaactttgaatatgttaagtatagtaggtgtaagttgtaatttttttgaggccaaaatcagctgattaatcatggaattaatctaattgattattttagtatccctaataaatctgattttaggtttgtcaataaaaatttagggtaagattaaagatcaagggaagatccgtaacttctaaatttaaaaaaatatttttatgtaagtaataaatgttcaccacagaaaaaagagttatagctctgcttctcaaagtattttgattgtttaggctttcattctagctaatattcactccagctttggtctagataatagtcactctacatttggttaaatcttaacacttttcattttctttcaaccataatttactggttaagatcttagactcagagttggagtctagttagaaacaatctaggtatttcaaattgaggagttaataggaaaaatagttacaagtgctggaagggctgaaggagtaaaaatgagactatgagataactgagaaattagcaactgcaggaatctgctaccaccctaaggctggagcaaaagaaaggaagaaattgctgttaccagtcccgtcaggcattcatctctattactgctgaggcttgctattgctgccagaaccactgacacatcactggggtctgcagctgccaccactgctacacactgcttaccagcagctatagcccacagccagtgatgctaaaattgccaaaggacaccggagtctgtagccatcagaggttgttagaggaagaacagtggtttctcccacctcccatcagtgctttccattggcactgagagtttattgaaagaaaatgttgtttacagggtctagaattcaggattctcataagcacctcctgatatgaagcagaattttctgctgtgatggaaatgttctatgatctgtgttgtctgatacaatagcccctaattacatggggactattgagcacttgaaatgtgtatgagatgactaggaacaaaattttaaattagtttaatttaaaaagccacatgtggctagtagtttccatactggccagcatagatttagcatctacgatgcaaagcagataatagaagtgtgagattggagctaggagtaggcaggcataacgctcagatcataatgctcagacagacgtggttcccaccctggctctgtcactcacaagctgcgtagccttgggcaagttcctcaatctctgcgagccatctggaaaagtgacaataataataatacctcttaggattaaagagttattggaacaactaaacaagatgatgcaaccattctgcaaaaacctgactcatggtaagtgcccaataaatgttcattataattatcacttaaaagaaatattttcaaaactttgatcatggggaacagagtaagatgcagaaagcctatggagagatggtagtccaatttgtctcctaatgtttcttttagctataattttgtgaatgtatttgctaaatattttctttctcccttttttctatgttattgtctttttgtctagctggtaatttcaatgtcttcttattcttcttatattatggatcacttttccttgacttaattgtcatacattgtggaaatttcatactattatggaagactgacttaattatcatatgttatggaagttcatgattatgtcaaaataatgtttgttggacctgacaccatgatataagctttcttgctctttgctcttttgttcccaggggtgatttttctgacaccactctgacatgctaagactttaaccagaacacactgcactgtttatgttgacttttccttatcatatgcttaaagacaaaaaagagttataaatatttacaagtgttttataatagttctaatacatttcagaggcttaatttattaagaaatgtcatattttgtgccaaacctagccatctctctcataatctcttttgctctttcagtggtttaagagaatagatgagcatctagagatatatctcttagacaaataatgttgatacagcctatatattgtcagctgcttaaagaacaatattccaattgaaatgacaggaatctcacaagacagaaccactcttgcaactgtgttaaaggagcacctttgtttaagtcagaaacggtgctaatgagacacacctgggagtgaaatgattttctcataggggcaaaaaacaacaataaaaaaaataatttcattgctcaactacgtcttagacatagtatttttcttagataacttacagcgagactttggaaaaagaagaataaacataaaacaatgctgagtcctaaatggaaccaaacccaacaataacaagatgagctgcatgcagctacagtgggctgctattcataatatgtgatggcacatcaggcctttcaccaaagtcaggcaatgctgtgtattgcactgaatgtttcctgtggatcctctattaacactagtgggagctctttacattaaaaaagtcataagtcccacaactgttctgcaatcctctcctcatattaaatctactcatcatgtctgggggagttatctttaaggaaatcatttgccaagactcagatttttaaaaaacattctaaggcactagaatatggaagtgaataatttgctccaatcttcctttccacctctgaacaaaatgtagccagtgaaaggaaattagcccctggtcattagtgcttttcaaaacagactatctagttgcctgccctttcagttacagctactgtgacgccccatattctgtttaacaccatatataactcctggcataatgcctggacaaagagggcaatttctctccaactttgactttccagatagtcatacttgatcaccaaagccagggtggcctggcacattcttaggtagccaagatgctcaaaattatgggattatttcatctagaagggctgtgaatttccattttcatgcactttctacactccaacactcctacataattctatttctgataaaggaagtaaaggaacaatctggaggaagcaattgctgggctatcaggtaccctggggaccacaaaactggtccccttccttacacactgaggtgaagactccaagagctggagtgaattgacctgttttcttctgattctttccagggcaccgtgctactcataacaaaaatgcattgaataaaatgcacagcttccacttagtggagagtgggagtgcaaggacacactaagtgtcaggcaccaagctaagggttttatataccttctttcttataattctcatgccaaagcttggaattcttcttcttattttgcagatttatacactgaggtttgagggtttaaataacagagttagtaaatgactgagccaggattcaaatacagatatgtctgactgcaaaggccattttctcaaaccactatgctatactctagtgtatatgcagaataatactcattctaaagaaggaagcattgttggttgggcacagtggctcaagcctttaattccagcactctggcaggctgaggtaggtggatcacctgaggtcaggagttcaagaccagccaggtcaacatggcgaaaccccatctctactgaaaatacgaaaattggccagacacagtggctcatgcctgaaatcccagcactttgggaggctgaagggggtggatcacctgaggtcaggagttcgagaccagtctggccaacatggcaaaactccatctctactaaaaattaaaaaactagccaggtgtggaggcgggcgcctgtagtcccagctactcgggaggctgaggcaggagaatggattgaacctgagaagtggaggttgtagtgagccaagatcacgccactgcactccagccctaggcaacagagagagattctgtctaaaaaacaaaaaaggaagcactgtcaagacatgaagaataatttgagatcacaacaggagatggtgagatcacagaaaacatatccagaatattattatcccttaataataatgattaatagctaccattaactgagtgtccagtataggcctggcactttatatttgttattttatttaactatcacaatctccctgtgaggtagggataatcatacccattttttaggtgaggaaactgagaattagagaaattaaataactttccccagtctcacacagttggcagatagtaaaatgaggcttaaatccaaatctaagtgacttgaaaccccacacctcacttaccttaagatgcattcctgacccatggaaactgcttaatatatattgagcacatgaataaataaaggaccatgaataaacagtggctggaatggagcatgtatctgttatgtaatgcccatgttggccttgattagaagctcttaaaaacaaatgagtaacaaatacatgttttgttttgctccaaaaggtataactgggacagatcagtggaaattgcagacttcctgtggcttcctgtacaggaacctggcttcaaagagtccattgcctgaatgaccttcaattctgtgattcagagattctgtgagagtctgtgtctctacagagggataataagggaaaacattcccacagtgagagctgcctagtaaaacagtgagctacccattttggaagatgttccaggtacatgactacatgccagaaatgctgaataagaaattattaaattgtgtggtgtagaaggttgtttggaaaatggctgcagttattccctttcctttattcattctcctttgcaagatgactcttaagctcctcccattgagagatggtatttccccaacccttgaatctgtgttggccttgtgactggctttgcccaaaagaatgcagcagaagacatttcatgccaattctaagtctaggcttcaaaaggccttgcatagtttcaatctcctttttgaaaccctgaggctgccaagtgaacaaactgtagctagactagcctgctggaggattagaggctacatggaagagaatagaaatgtcccagtgaatagttagctaacctctagaagcagaaccacctagctgccttgtagctcaccacatattcatgggcaagctcagtggagaccagaagaaccaactagttgacccataaactcaagggcaataagaaatggttgctgcatgattctcataagcacctcctgacatgaagggaagataaaaggaatgcctgatgtccctgtcagaatagttcatgccactatcatctgcctgtatgtcagaaggcctccaggggctttccttaatggacatagcaacatccaacattaattgggcatcttactacttgccaggaaatagtcttagtgttttgcataaattaattcttaagcctcacaacgagcagcgaaaaattgattattgttatgaaactgatttcacagatatagaaaccatgtcagagaacttaaggaacttacctaaggtacagagttagtaaatgcccagcccagtattggaacccagaaagtctaaagccacagttcttgctattagccacaccacattgcctcctgctagtcgtcctaaggggaaggttgtgtgcaggaactatacttgcactcacaaaacctagtagttgtatttcctgattattttcaccaggctttctttgcagagtctgggatgtcaccaaatatcttgttcatgttccacgcttctcccacctgaaagtcattttcttactgcctgtttctgagtaatctcactattaagcttgaaacctagaatctatgatcaggagaaatgttttaaaagactcattaccaaaaacacaggagcaagtagaagaaacactccttttccaaaagagaattagttctccagtatgagagtttccattctattcacagttggaaatgcgtgtaaatcaggtttaagaaacatatgagatgggcttatgcgaaggccttaagtagggaatcaaatgctaaatgaaatgttaaaagcaggtttaataatcatgcctgacatccaagatgggtcagtttttttttctcctagatatagtttccctgaagctcaagataattacaaaatgtcttaaatccctgtttttcttattgaatacaatggactgccaacatttcaactacagttaaaccagcccaacaggaaaaaagccaaggaatgtgtctattccaacattttctgcaaagtctggtagtatatagctctctgttttgagaaatcttaaatggaaattccatttacaaaactggatgaaacatgaccaacctatatatacttttctagaaatttcttctgccttatctaatttccccattagaggaggcagtatcacttacttccctgccattgtgggttttttcccagatacctcttggggccctggtgcagttctccccacccctaacgcacacacacagagtacagcttagtaattgttgacttaattaatgtggggcagtgggaagcccctaggacccccatacccaccccccgcccactgctagggatttgaccactgcctctaggcagagtagtgtcagtgcctgtgtgtctgcacagaccttgcttttatttcacccactatgtaactgatgttttaggaaactctggtaatttcaactccctcttgcccatggctttttaaggcccagataggagcccccaaccccttccaccctttaaattaaccaccagactcttgaaagcaagatgtcagtctcgttctgggaagttttcatggaatccttcctgccccctcctcccctcccctctcctctcctttccttttcaactgtattttttttagaagctttaggttcacagcaaaactgagcagaaaatacagcgatttcccatatcgccccctgccctcacacatgcacagcctccccgactatgagcatcccccaccagatggtatatttgttatgatccacgcacctacgtggacacatcattatcacccaaagtctgtagtttgtgttagagttcactcttgacgttttatattctgtgggttttgacacatgcacaatgacgtgcatctgccatgatagtatcatacagagtagtttcactgcccccaaatcctttatgctctgcttatttattcttctctccctcctaacccctggcaaccaccaatctttttttttttgttttgtttttttgagacagagttttgctcttgttgcccaggctggagtgcaatggcgcaatcttggctcaccgcaacctctgcctcccgggttcacgcgattctcctgcctcagcctcctgagtagctgggatcacaggcatgtgccaccacagccggctaattttgtatttttagtagagacagggtttctccatgtttgtcaggctggtctcaaactcctgacctcagcctcaggtgatccacctgccttggcctcccaaagtgctgggattacaggcgttagccaccacacctggcccaaactttttactgtctacatagttttgcctatgcagttttcccatattttcaaaatgtcacatagttgcaatcatactgtagtattttgacttttcagattagcttatttcacttagtaatatgcatttaagtttccttcatgtcttttcatggcttgatagcccatctttctagtgctgaataggattccattttctggatgtaccacagtttatccattcacttactgaaggacaacttggttacctccaagttttgacaattataaacatagctgctataaacatccatgtacaggttttagtgtcaacatacattttctacacctttgggtaaatactaaggagtgcaactgctggatcatatggagagagtatgtctagttttatatgaaacaaccaaatggtcttccaaagtgactatacgattttgcatccccacaaggaaagattgagagttcctgttgctgtactttcttgtcagcatttggtattgtcactgctttggattttgaccattttaatagctgtgtatggtataccattgttgtttttacctttgtgtatttatttcatttttgccttttgcttttgtgtatatactatactgtgaaattttcctattttcctccaacgtgttttcataaaatcatgcatgattgatgtgaaagaaaggcaacagtctcctttccacatcagactcccacttattccatgcagccataagggacccaaagttaatagtttcttatactggcttggaaataggtattctatctcccttctctatgtctgtccctcccattatattccagtctcacccaactcaagcctagacctgccaattgtgtgtttttttttaacttaagaaaattttatgtaggaagacatactgtaactttcagtttgtcttataactatagtaagaccatagaatggcttttacaatctcagatgtctctagttgttaaacgtcccatataattctcctattgtcatttatgttacaatgaatttgttaatcaaattaaagacaacatttgttctatccagagttcttactaagatagaaatattttataaataagattcttgtttaaatcatctctctctcttgaatattatctttaagattataatccattcaatttgagcaaaagtataattattttagttacggccatgttttaaaattaaaaataaaagtgatcatccaaaattacatttaaaaagagtcaagactgacccatgtttttattgtgaattaagttgttcattagtagagttacttggaggctgaatccacattgaggataactcaattctactttcagacatggcagtgtggggaaaaatccaacccagggaaagaggataatgaagaggaccgtttgatgaaaagaaattcttcatcattaatggaaaaggtggagggccaggccgagcaacgagagagaagagtttcctcttcccacaaattcttcctttggcagcaaggaactctggattggagaaaggagtggagggacaaaagctggcagggcttacctggtttgaagatctctgcaataaagatcttccatgtacatgggctgctcagggttccatctcccctcaaataaataaatgaataaataaataaatacatagttttaagttttgtcaaatttatgcatacaaaagttaactagtaatacaaggtttattattcaaaaaatatatgtcagcaacctcctattccaccattttccctttcaaaggagaaatcaattaaactcttctagatgttattaactgcctcaaaactcatctgaaatacccaacttccctggtctccactatattattttcctccattcaagaagagtgaattttgattgtgaggttcttaaacttatacaattttgagacctttttaaagaaaaagaatgtaagattccaaaatatcaaattagatagagccttggaaaggtccctgatgcttaagcttcattattcatagtacatctgcttctgccttcaagtgagaacatacaagatcctttgtattaaattatcccattgctgcctctaaaccatctccccatccacataccatgtcgagatcaccaaatctctcaataatttgacattcaagtagctccccaaagcccacctcctctataaaatccgttctattgaattgaaatatagtcatatttctttaatttcactttctctaaaaatttaactccatgttttccttcacttatcaacctatgatactacttatcccattgtgcttattttttgtatttctttttccctagctttattaaggtagaattggcaaataaaaattgtgtatattcaagacatacaatgtgataatttgatatacataaacattgtgaaatgattaccacaatcaagttaattaacacattcatcaccttacatagttaccattttgtggtatgtgtatgtgtgtgtgtgtgtgtgtgtgtgtgtgtgtggtgagacacttaagatctactttcttagcaaatttcaagtatataatacagtacacaactatagtcaccatgctatatattagatccccagaacttattcatcttatttttatttattttattgagatggagtctcgttctgtcacccaggatggagtgcagtggtgcaatctaggctcactgcaacctctgcctcccaggttcaagtgattctcctgcctcagcctcccgagtagctgggactacagatgcctgccatcacgcccagctaattgtttgtatttttagtagagacagggtttcactgtgttagccagtatggcctcgatctcctgacctcgtgatccacccacctcagcctcccaaagtgctgggattacaggtgtgagccaccgcgcccaacccagaacttactcatcttacaactgaaattttttctcctttgaccaacatcttcccatttcccccatccccctagcgaccacctttctacttgctgcttctgtgattttgacttttttagattccacatataagtgagatcttacagtatttgtctttctgtgtctggcttattttacttggtattacgtcctccaggttcatctctgttgttgcaaatggcaggatttccttcttttatggctgaattatatttcattgtatacttacatcatgttttctttatccattcatctaccaacaaatgcttaagtagtttctatatcttggctattgtgaataatgctataatgaacatggacgtgcatatatcctttcaacatactgacttcagttcttttggatatataaccataagcatgattgctggattatatggtagttccatttttaattttttgaggaacctccatactgttttccatatagcatacaggtaaacctaggagatatttcaggtttggttccagaccaccacaataaagtaaattttgcaataaagcaagtcacataattatttggtttcccagtgcatataaaacttttgtttacaatatactgtagcctatcaagtgtgtgatagcattacatctagaaaacaatgtaaaataccttattgctaaaaaatgctaacaatcatctgagcctttaatgagtcatgatctttttgctggtggagggtcttgccttgatgttgatggctgctgactgatggttggtgaaggctgcagtagctgtagcaatttcttaaaataagacaacaatgaactgtaccttattgattgactcttccttgcacaaaagatttctctgaagcatgtgatgctgtttgataccattttacccacagaacttccttcaaaattggagtcaatcctcttcagctgtgttgctgctttaactaagttacataatattctaaatcctttgctatcatttcaacaatattcacagtttcatcaggagtagattccacctcaagaaacgactttctttgctcatctataaaaagcaactctttatccattaaagtttgatcatgagatggcagcaattcagtcacaccttcaggctccacttctaattctagttctcttgcaatttctaccacagctgcagtttcttcttccacttcaatcttgaacacctcaaaggtcatccatgagggttgcaatcaactttttccaaactctcatttatggtgggttttttttttttttttttgagacagggtttcactctgttgcccaggctggagtgcagtggcacaatctcggctcactgcagcctcaacttcccaggcccaagtcatcctcctgcctcagccacccaagtagctgggactacaagcacacaccaccatgcttggcttttttgtacttttagtagagatggggttttgccatgttgcccaggctggtcttgaattcctgggctcaagcaatctgaccacctcagcttcccaaagtgcaggattacaggcatgagccactgcgcccagcctctgtgttgatattttgacctcccatgaattatgaatgttcttcatagcatctagaatggtgaatcctttccagaaggtttcaatttattttgcctagatctatcagatgaatcatcctctctggcagccatagccttatgaaatttgtttcttaaataataagacttgaaagtcagaattactccttgatccataggctgcagaatagatgttgtgctagcaggcatgaaaacattaatctccttgtatatttccatcagagctcttgagtgaccagatatattctcaatgagcactaatattttgaaataaatctttttttctgagcaataggtctcaagagtgggcttaaaatattcagtaagccatgctgtaaacagatgtgctgtcatccagaccttgttgttccatttattgagcacaggcagagtagatttagcataattcttaagggaattggagtttttggaatggtaaataagaattggcttcaacttaaagtcaccagctgcattagcctttaacgagagttattctacccttaaaagctttgaagcaggtattgacatcttctctctagctacgagtcttagatggcatcttcttccaacataaggctgtttagtctccattgaaaatctgttatttaatgtagccaccttcttcaatgatcttagatattctggataatttactgcagtttctccattagaacttgctgcttcaccttccacttttatattatggagacggcttctttccttaaacctcatgaaccaacctctgctagctctgcagcttcctcacctctctcagccttcatagaattgaagtgagttagaaccttgttctggattaggcttttgcttaagggaatgttatggctggtttgatcttctatccagaccattcaaactctgtccatatcagcaatagggctgttttgctttcttatcatttttgtgttcactagagtagcaattttaatttccctcaagaacttttcctttgcatcacaactttgctaactgtttggcacaagagacctacctctccgcctgtctcagctttcaacgtgccttcttcactaagcttaatcatttccagcttttgactcaaagtgagagatatgtgattcttcctgtcacttgaacatttagaggtcactgtaggattattaattggcctaatttcaatattgttgtgtctctgggagcagggaggcccaaggagagggagagagatggggaaaacagtcagtcagtggagcagtcagaacatacttaacatttttctgataagtttgccatcttctatgggcatggtttgcaatgctcccaaataattaaatagtaacatcaaagatcactggtcacagatcaccataacagatataataaaaatgtaaaagtttgaaatattgtaagaattaaaaaaatgtgacatagagacatgaagtgagcacagatcactgggaaaatggcaccaatgacttgctccatgcaggatttccagaaatcttccgtttgtaaaaagcacagtatctatgaagcacaataaagcaaaatgcaatgaaatgaggtgttcctccactaatttacattcccaccagtagtgtgccaagtttccctcttgtccatatcttgccaatatttatctcatcatgttgataatagccatcctaagaggtgtaagatgtatctcattgtggttttgatttgcatttccctgatgattagtgatgtcgagcatcttctcatatacttattagctatttgaatgttttatttggtaaaacatctacgcaggtcctttgcctattttttagttatttgttctttggttggttttgttttgttttttgtttgtttgttttgtattttttgcaattaagttgtatgggtttcttatatattttagatattaacttcttatcagatacgtagtttgcaaatactttctcccagtccataggattgccttcccattctgttgattgtttcctttgctgtgcagaagctttttagttcgatgtagttctacttatgtaagttcgcttttgttgtctgtgcttttgatgtcatatcgaaaaaaattattgccaagaccaatgtcaaggagcttttcccttatgttttcttctaggagttttacagtgttggctcttatatttaagtctttaatccatttcaagttaattttttcacattgtataagaaaagggcccaatttcattttttggcatgtggatgtctagttttttcaacatcatttattgaagaaactatcttttcccctttgtacattcttggtgcccttgtcaaagattagctgattttatatatatatatattatatatataatgtatatatatataatatatatatgtatatatattatatacatgttatatatattatatattatgtatattatatataatatatacataatgtatataatatatatatattatatatataggcttatttctgagctctctctactgttccattggtctgtttttataccagcatcatactggtttgattactgtagctttgtaatacagtttgaaatcagacagtgtgatgcctctagttttgttcctctctctcaagattgctttggctagccagggtcttctgtggttccatatgacttctaggattattttttctatttctgtgaaaaatgtcactgaaattttgatataaattgcattaaatctatgaattgctttgagtactatggacatcttaacaatattagttattctaatccatttgtttttaatgtaattttaaaaatcagagttattacctaggaatccaacttacaagggacgtgaaggacctcttcaaggagaactgaaaaccactgctcaacgaaatacaaagaggatacaaacaaatggaagaacattccatgctcatgggtaggaagaatcaatatcatgaaaatggccatactgcccaaggtaatttatagattcaatgccatccccatcaagctaccaatgactttcttcacagaattggaaaaaactactttaaagttcatatggaaccaaaaagagcccacatcgccaagtcaatcctaactcaaaagaacaaagctggaggcatcacgctacctgacttcaaactatactacaaggctacagtaaccaaaacagcatggtactgataccaaaacagagatatagatcaatggaacagaacagagccctcagaaataatgccgcatatctacaactatctgatctttgacaaacctgagaaaaacaagcaatggggaaaggattccctatttaataaatggtgctgggaaaactggctagccatatgtagaaagctgcaactggatcccttcctgacaccttatacaaaaattaattcaagatggattaaagacttaaacgttagacctaaaaccataaaaaccctagaagaaaacctaggcattaccattcaggacataggcatgggcaaggacttcatatctaaaacaccaaaagcaatggcaacaaaagccaaaattgacaaatgggatctaattaaactaaagagcttctgcacagcaaaagaaactaccatcagagtgaacaggcaacctacaaaatggaagaaaattttcacaacctactcatctgacaaggggctaatatccagaatctacaatgaactcaaacaaatttacaagaaaaaaacaaacaaccccatcaaaaagtgggcaaagkatatgaacacacacttctcaaaagaagacatttatgcagccaaaacacacatgaaaaaatgctcaccatcactggccatcagagaaatgcaaatcaaaaccrcaatgagataccatctcacaccagttagaatggcaaccataaaaagtcaggaaacaacaggtgctggagaggatgtggagaaataggaacacttttacactgttggtgggactgtaaagtagttcaacccttgtggaagtcagtgtggtgattcctcagggatctagaactagaaataccatttgacccagccatcccattactgggtatatacccaaaggattataaatcatgctgctataaagacacatgcacacgtatgtttattgcggcactattcacaatagcaaagacttggaaccaacccaaatgtccaacaatgatagactggattaagaaaatgtggcacatatacaccatggaatactatgcagccataaaaaatgatgagttcatgtcctttgtagggacatggatgaaattggaaatcatcattctcagtaaactatcacaagaacaaaaaaccaaacactgcatattctcactcataggtgggaattgaacaatgagaacacatggacacaggaaggggaacatcacactctggggactgttgtggggtggggggaggggggagggatagctttaggagatatacctaatgctaaatgacgagttaatgggtgcagcacaccagcatgacacatgtatacatatgtaactaacctgcacattgtgcacatgtaccctaaaacttaaagtatcaaaaaaaaaaaaatcagagttattagcagcccatgaaccacaattggtataaagttacttctgcacatcaaagaaaattaatttagctattgtctaaattactaaattggggcaaaaagcccttttctagatgctacaagctttataaagggaaaatactatttctaatattcgacttaacatggctgctttggttaaaaaaaggataacatattaaatatttaaaatgaccagatggtaggtttgaatccactgaaaacaaacccagcagggcaaactcacaggcacaaaatgtaactcaaagcattaatagagctgaggctgtttttctttagcattatgaatctcttatttgcaatgactataccagagctccaaagaggcagtcttatacatcaaactgtcattaaaatatgtggctctttcctgcagtgtcatgttactactgcactgaaaattttatttttccagtaacactggaggtagtaattagaaggtctattatttctggccaaccataatggatacaaccataatggacacaacccaaaggttaattgctgtgctacaaacactgcagcaattagctttcagagtagggagtgacagggaatgtatttcaagtgaaagttagtttttaaatagaaactatcctctacgtcatgcgcataaacttccctaaattaagtcagtgcatgatcaaattcacaatgttacatggagggagtgaagccatgatagagctttcaagggttagggaaagaagtattagggagagaacttcatgagggaaggggttcataccactggaagttctaactgcttcctcccaagttcctctttgcttctgtactcttctatgcctctgctcagcccagcctcctccagctggggtccctctactgctgtttgttcctcaaactgctaatgtctcagcatcaggtcagtggccacaagccggcctatcccccagtatgtgtacagggcccaggcaggagtacaaaggaggacaccatgctatatgtctacatagctaaaattcatatatcaaactaacaaactgctacttgaaatatgttctatcctcctaccttgaaaaaatgtacctttataaagacagaaatgtttttaatgtgtaaagctatgttttaatgagtaggcaaaatatcaaaagtagataaattcaattattatggcacgtgtttgcatagtccggtgataggctggagatgtttgggtaagtaattaaataaaaacttacacagtttacaagttacatatttacccctgtgaaatttactttcttcccttcattttagcaaaatcccttaattatattgtcataataaaaattttcatatagtcagtcttctatgaatactaatgccaaattacataacttttctgaattattgcagctcttgggatttttcaactcgattttaacttggagaaactttgctctgctaaggcagtagcaactggaattatcaataaaattcttaaagtcatacctatttttaaaaatgagaaattaaggtttgtagtgtggcatgtaaggagcttagctgttactctgtcctgacaaaaagtagaaagttgaacaaactgaaaatcaacaactcttcctagatctagcagagaagtaaggacacagagcaagccactgcccccaaagttggagagacaaacaggcagatacacagaatcacaatttactagagcagaaacccgccggcagaaacctccaggggcatgagtacagggtaggaagaccagaactgtaactgatgaattgctagaggctcagggtggtcaagactaagaatttaaaactccagggggtcagctgggcacggtggctcacgcctgtaatcccagcactttgggaggcctaggcagggagatcacgaggtcaggagacagagaccatcctggccaatacggtgaaaccccgtctctactaaaaatacaaaaattagctgggcatggtggtgtgcacctataatcccagctactcgggagggtgaggtgggagaaccatttgaacccaggaggcggaggttgcagtgagccaagatcacgccactgcactccagcctggcaacagagtgagacacacacacacacaaacacacacacacacacacacacacacacacacacaaagggggagggggcctagtctttggagggcacactcacacttttgtaagttttacctccaggagttcttccaggttctctcagtgaaaatcaaagaaaaatcacctcctacatccaacagggagaggtgaaaagaaccattttgaaatatgtcaaaatattctgttctttttaacaaggcctgccctcaagagaaactaccagagcctaacctattacagttttagcagagcctaaccaagctgatagatgggaaatatccaaccccagccccctctagacatcctgtcccacccaagaagggggataaaaactaagaagcacttgtgaagtttccagcctagggacacaagctcactaagactgaaatctaatcataggtctatagaatgtttcccctcctcccacatcttaacaccgcatcactgaagcccatttactccagtgcctttcacccagtgcatcatgtccagctttcaactaaaaattacaaggcacactacagagcaaaaaacacagtttgaagaggcaaagcaatcatcagaactagactcacatacggcagagatgttggaattatcagaccaggaacttcaaataactgtgattaatatactaagggttgtaaaggtaaacgtagacaacttgaaagaacagacggttaatgtaagcagaaatgaaaattttaaggaagaataagaattgctagagatataaaattctataacagaaatgaagcatgcctttgatggattcattaatagactggacatggttgagaaaagatctctgagtttgaggatatgtcaatggaaacttccaaaattgaaaaataaagagaaaaaggacttaaaaaaaagaaacaatatccaagaactgtgaaacaactacaaaagtataacatatgtgtaacaggaataccaggagaagaattagagaaaggaacagaagaaatatttgaagcaatagtgactgaaaatttccccaaattaatgtcagtcaccaacaatgttagaccaactctctaaaatctcttccagaagatagaagcagggggaatacttcctagcagcattgccctaataccaaaaccagacaaaaacattactagcaaagaaaactataaaccaatatatctcttgaacaaagatgtaaaaatcctcaacaaaatattagctagtagaatccagcaatgcataaaaagaattgtacagcataaccaagatttatcccaggtatgcaaggctggtccaatatttgaaaattcattcatgtaatctaccataccaatagactaaagaagaaaaatcacatgaccacatcaatagatgcagaaaatgcatttgacaaaatccagcacattttcatcataaaaactttcagcaaactagggacagagggggaactttctcacttgctaaagaacatctacaaaaaccctaaggtaacaatatacttaatgatgaggagcttacctatagaggaacaaaaataaagaatgacatccaacttctcagaaaccacgtagacaagaagagaggtggagtaaaagtgttcagagaaaaaaactaccaacctataattctgtaccttgcaaaattagcctttaaaagtaaaagtctgtttcttctacttttggtcaccactgtcccctagcatcagcccagaggaacaatgcaaagagaaagagaaggaaaatgaggaaaaccgtcagatagttccatatttacagatgaagaaactaaagaggatctgaataatttgctcaagttcacacagcaagtaaatgctggagctaggttttgaacccagggattttgaactccaaagtttgtgttcttaatctcgtaccattgggatgaaattgtacagtgaaagacaagcgatgatatagatgattgcctaagtattccaaatccatcctgacaaaaaaaaaatcattctagttcatcactgctcactatataattaaatacaatgaaaaataaaacaggctttatttacttctgtataaatcaacttactacaatttttccttccaaataatggaacaagtattcacttgaatttcaaaactatcgttttcaaatgatactttaaaagtatcgttttcaaacgatattttaaaaagtatcgtttttaaatgatacttttagtgatacttcactgcctggtagtcactagagcctgatcacaaaaagatctcattaagttcgtagaaactggagagaaatagtcttccaatgtagaaaattagaaatttaggggaaaatattcttcctacatagaaatttattctgcaatacatcaactatccagctcttaatgatgttaatatttcttcatcactacctgtctcccaacatcagtaagcttttgataaaactggggaggaattccccactccaaattcgtctttccccacagattccaaaactcttactctggttgttcagggttgtccttctaggtatggaaatatgacattccttttctgcaacaggatgatttatctgacaagaatagcctccatctacaagttactttgcatttttcaaagtacttctacaagttcatttgcttctcatactattctgcctgtttcataggagggccttacaggttaggtgtaaacacttgtaacgaacttggcactatttgacttacagccagtgctcaattaacgttaaccatcattacaactattgtcattcctatattgtgaggaaactatgccccttaaagattagggtaatttatctaatatctatgacagagttggtaccccaaactaggttgatttctacagcagttcaacttcctattagggtttgtatcaataaaactgtgggacccgccagggctggaatcccactgctacctgagcatccagttggtgaccaggctccccgaattaataaaagtatttgttgttgtttttatagcagttgtccaggaagtatctcctttcgaactcaagtcacttgggcaattggctttacaaagcaaattggctccgtttaaggattcttgactcctgaaatccgcaaggaagtgggttcttttagagccagcgccaagagcttcaaaaaatccttctaaggtgaacccctccggacccggatagcgagatggggctcagccttgcgcctcgggggtcgtaacagacggcaaggtggaggtggcttcccggccccgcagccggacctcggcaccccgagcccgttcaccggggccgggtcctggcgggccgcggagtgaggccgggcggcgcagcgcaggcggtgcccgggcgcagggccagtcccgccgccgccgccgccgccgccgccgccgccgccgcgagcccggacctgcccgcccgacctggcggcgcagtctcgcgggatcgctcagctctcgctccccgtgcggctctcgaggcagctccagtcccggacgcaaccccggagccgtctcaggtccctggggggaacggtgggttagacggggacgggaagggacagcggccttcgaccgccccccgaggtgaggcttccacggctgggactgggcaggggccgggcgggtgccgggggaagcggggagggcctcgaggggcgaggggccgcggctgggatgaggcgcgccgggagccgcaggtgctggggaggcaacggcgggacggcccgcacctgagtttcctcggaagcgggaaccggctctgaaaggcgatgccggggccccgcggcgccgcgcaggccaggaacgctgctgtctggctctaggcctggggcaggttcccgggtgtggggcgctggcggaccgggcatcagtgtgtgttggggcgcgggtaattcgtaatccggggcctacagccttcctcccgcaaggggactgccttcgcccttcccccgggacagatttgcgcactttcctttcgacggcagcactacaccctcctagccagtgaaaactgcaatgttgctcctccactggaggaatcctaaaagtctccctctagttggccttacgaaaatcgagaaaactacatacccagaagactgccacaaaaactgactcttcagagtcttttacaagtttaagaactctttgggtcttaaggaatttcccagggccttagttttcttgtacttaataagctttccaacaggggcccttagattgtatgcttatattaatcctttataatttactccgaatcaccagctttccttttttcctccatcttactcttgccattccctctttttaaccctgtcttccatacagcaccaacctcctagcatcggtttcctagaggtgcagcttccttagcaaatgatatattccatgctaaggcaggtggaagagtatctcgttaggacagaattttccgttgtttttccagtgtttgttacctggggtgaaaatcttaactctgcactttgactccacatttgagtttatgacaaatgttgctgatacaccctccttttgtttttacagtaattgacccaggactcattttcaggaaagcctgaaaatgagtaaaatagtgaaatgaggaatttgaacattttatctttggatggggatcttctgaggatgcaaagagtgattcatccaagccatgtggtaaaatcaggaatttgaagaaaatggaaatgtttacatttttgttgacgtgtatttttctacccctcctaagagggcacagtctcttcacctgtgaaccaattactgttcccagatgtatgaaaatggcctacaacatgacgtttttccctaatctgatgggtcattatgaccagagtattgccgcggtggaaatggaggtgagtagtgcttcatacgtttattgaatagtagtttatgctctgttctagaataaactagtaaaaataagtctatttttaaacagagccgatttcttcaagttgtgtacaagttgtgttttgaaaagtccttttgaaaattaaatccctctactgacttatgttttgtgtacctttgcggccctgtttagtagattcgtttgaatagggttcattttatataatgaagtatggttacacatgatttctaaataccttgtacctagaaaatattttgctttcctgaatcaagtatgatagttcttctagaaatgcgaattctgaatatttttctacttcactgaacatgtaatatttattgcctggactaaaactgaagaaatttacaagtttttataagtagttgtaatattcacttggtacagtttttctgaaataaataaattatcagaatattttgttgctgtagactgtattttaaggctatcacaaagtcactaaaaagtgactttgttttctaagcatagcacttatatgttctttataagatacttgttaaaagaaaccacttgggaggagtacagtgacactaaagattgccttaggtgccttagttacctgtctctggtttagagatatgcaaattactagggagtgtgagaagaaagctacctgtacagacaggaacctgccttcccatacagatttgttaggttgttaagtctcctgaaggaaactagacacatgcattgtttttgtagtttttctccagaaaaacagaatagtaaaggcttttttccctcagattgttgctaagagaggaaatccctacaaatttaatatatatactatttttaaaattgattagatttgattttgcagctttgaaagttttctattgttgttcagttgaatagttgtctgactgcctcattgtggactcatgtctggaataggaaagcttataaatactaagtagatgttatttaaaaggatagtacagattatattattgttatctttcagtggtttttttcaaactgatgctagatgtccttttgaactgaacaaatgatgcactgagactttcatgaatcagaaccattttgatggttcaatctgattcaatatgaagtatatagtgagaacactgtgaagcaataattacatcattcattcacttttttgctgatgataatatgttttgtagtgttcatgttttaatagtgttcctaaattttttaaatctaatttcctttgtatgtggtaactacatacattttaaggtttttgttttttcttttagagatggggtcttactatgttgcccaggctggtctcaaactcctaggctcaagtgatccgtcctgcctcagcatcccaaagtgctaggattacaggcgcgagctactgcacctggctgaccattttaagtttgaatgctaacagtgaccttataaattcatatcacctagactcaagagagatgcatccctgctattaaatgcctgtaattataagatggtagcaactagctttgttctgcacgtctttttaaaaccaaattttttttactttcaaaaaaattactttttaatttacctagcttctttcccaagtagttttgtgcctggatattatcaagaaggctttttgttcttacctcttttatatgattgctaatactaccaatctcttcattatataattttccacttataactaacctttctcatagcctttactaatgaagtttttttttttgctataaatcatacttcagtaaatttaaggatacaaaagaagagagccatcaagcagtcacaataccagcattaacctaagtctatagaagaaaggaaagagaaatgaaaaggcaaaaataatgtcaccctggctcagacttttaatccctatatgtaatttctcagtgtatactattgtgtttttcctactgcccctttcctatttatccatatacagtagtattctcttttagttcctgtatttgaatgtccaaaatcctataagttgagagttgtaagtgaccctaaagatcatatagagcttcttaaccttttttatgacattaaccccttctcaagataagagaagttttaatatttaaataaataaaatgtgtaggattacaaagaaaacaaattatattgaaatatagctcaggtaaagaacccccgaacccttcattatacagatgaagaaactgaaacccagaaaagctgcgatttgtccctttgagcactctaatctgatagtcttctctgtctacatggaccataatgtcatctttaactggtttttttttaggcccttgtcctgattggataaacaagataatatttcttatgatttagaatgcaatgtgtaaatttcagactttgctacttatttgcaaacttcatttagataaaaattaaactgggtgattgttttacctctgtttagctctgtctctctttttccttcttacaagtgccttgaatacaaagtcttgttagaccaaaaataaaatctctgtggcgcacacctgtagtcccatctactctggaggctgaggtgggaggatcacttaagcccaagagttggaggctgcagtgagctatgatcgttccactgcactccagtctgggcaacagagtgagacttcaactcaacaaaacaaaatgaaaacaacaaaaacaaagcaaaagttaactccctaatcttcagtctctctagtggtgccacaatgattttattataattcaaatttgtgcagtccactttagggttaaaatccttcatcattttccctaaagctggggaaaaaaagacctggttctagagcactccaggcccttcatgtgggaccctggctgcttgtccagtctctcatcttgtaccttcccacattgcacactctgcttcagccaactgacctatttggagaattcaaatccatattactgtccatcacctctgtatctttacacacactctatcctctggtgagccgtctgtctacctacctttcttcacctgctcaattccttcagttctcagttaaagcaataactgtttttagcgaacccttctttcacctttctcctgagcaaatttaatcaccccactctacacccttacagtacttataatgtacagttgttcttatgctattttacagtgaatctacatgtctctagattgagagtttgttgaaggtagggatggtgtttttttttcatctgtatccctaatactaagtacaatgcctctgagcatggtagaggctacataaaagctaaataaagaaaaaggtaggattttatgtcccaataaggtagcaaagggaattttccctccaaatctttacattccacttctatcatctacagtgtccaagtcaaagacatactaatatttttaggtggtttacatatcattctttttcattctgtctgagcctagctgtaatgaaatatatcagttgacatcctctattttgtttcccacattagctctacacatattcattagaatttgcttaaagaatttgatttttaaccatttctagttatttatatgaagtaaaggaattcaacttttgatcggaccgttggattataagctatatgagtcagttttttttttttcaaacattgtactttagtccttaagtgtatattccagttgagtactaaattatagctgcttgtaacttggcttttactaaaaatgtgttttatagcttctctaaagatcagattgggttttacacctccaacccgattacctttagtttctgctggttcctattgaatttccaggattcactgtgaattagtgttaggatgaggggctgaaaaattgcctgatggctatggcaatgaattgtactctcttagtcactgagaattccgtataagtcaaaagatctatctcactccttttttgttcctagttttcattttgtaacagctagcctgttttatagaatttaagcatttatggtcatttttaatctgtgattatatgagatggtttagagcagtggttcttaaactttagttcatagaccagcagcttgtgagcttgttggaaatgcaagctcacagactcctatcccaacttactgaatcatgatctctgaagatggagcgcagctgtggtttcacaagctgcccaggtgtttcttttgagtgttaaagttcaagacccactggtttagaagtttggattgcaaatttttactgtaaaagaccaaattattttgactttccagaccatacagtctccgtcacagctattcaactttgaaattgtagcacagaagcagtcagacaatatgccaacaaatgagtgtggctgtgtctcaataaaactttatttacaaaaacaggcagtgggctatatttggcccaggggctacagtttgctgaaccttggtttaaagtacttgaaaatgttttaaggatagtatagaatgaaataagtggacattattgtgcattcttatgttaatacattaactgagttatttgttacttactttccacataaattttttaaagtaaaatttatcacaaaccaaaaggatctgactgggacatcttggttctttagttttgtttcagagattgcttaaaatgagggacttcagttttttcctaattttattatgtgaacctgaaatcatttgtattacaaagagttaatttacaattctgcatagtaacggggctttgtaatgaaaaggatgtacagtctaactctcccaagtggaaaaacaaatggctactggttttccattgtgttccttttgtttcatatctagagcattgtgagattgaggtcccttgagagactgatttcatccagaaagagctgagactgatctagggaaaatggaaacaggaatgttgtatttttctttttcaattgccttcattgaggtctaggcaaaagccaggtcacgtattgtgtttggagcagcaagtggtcattccctttttaaacagtctaaagggaagtgggccaaaagaaaaaaaacaactttcctttccacctgttaatatgtgctgttagaatgtctctattcagttaaaaataaatggagaaaaactggataaacagacttttaaggaaaatatctatttctgttgtatagtggcttttaagcatttttattttcctgcttttagaagagtccagtcccttcctgctttcacctttcttccatattctctacccttgtatgtccatacacaaataaagaaaatgtttagtgagattaacctgtttgtttttcaggaaagactatctgaaaataactgtagctattctgaaagtaagacattaatcatataaaatgaaataaatagtgagaagtgttccaagccagttgcgtgtataatgactactgttgtgttttaaaggtagaaaccttccttcgtgatgttgcattgcagtagcagggaaagtcccttgactccttcttttgaaactgcagaataagggcaggcctgtatgtgaagagaaaggatatttctcctgggaggctctgctgataagcacaaggttcctagtccattccttagtattccatgggaagactgttgtgattatttcctttccccaagaatgtggcatgtaaataatgaagctttattactctaggttatatatttgtcatgtgttcattcatatttattgaatatgtacctgaatatgtagctctcccagaattacagtttttcaagttctaaggtttacattaaaaaagtaatttattctagacacattcctttgtagtatcaatcagttaatatgtacatttgtctaatttccaaaggtactctcttctggagaaatgatttaaattttctaatggtccctcacaagaaatagtttaaaaataacaagttttccattatggaaataatgtaaattcctgctttttgttctcttgtattccaggctccactttacattttttaaagaagctgacttgcctgagattgatcacattcgtgaaaataggtagcaaaatttgcaccactttcctatacagtagtccattgacattctcaaagaatttactcaagacttttgtaaccacttaaacagtatttgcccagtgaagtctaactgaaaacatttaagggcccctttagactttagtgagcctgttgttttgctaaggttcatcactttttttttttttttttttttttttttgagacagagtctcgttctgtcacccaggctggagtgcaggggcgccatctcgctcactgcaagctccctctcctgggttcacgccattctcctgcctcagcctcccgagtagctgggactacaggcgcccgtcaccaagcccggctaatttttttgtatttttttagtagagacggggtttaaccatgttagccaggatggtctcaatctcctgacctcaagatccacccacctcggcctcccaaagtgctgggattacaggcgtgagccaccgcgcctggccccaggttcatcactttttttaatgacattttaaatttccttcactcagttttaatcaccatcactgtaaatcgactttgtttttggtgccaatttagagcaagaaatatagcttttctcactgcatgggagttactgtgtatgtcaccatgagtagaaagcacaaatcctgagcttaggatcagaggctttggagtcacttggtcttgttcactggtgatgtggcttgcttccatgtaccagtgggattctgattcatgcttcagaaaagtgacaaacgtttatgtatcccatattttcagtactcagggaagcaaggcactgccaagatactgccacaggaccactctgcttaggttatgctttatatatttttaagaaaccaaatagttctttcttttgacccctctcaattaaaattctagcccagactttcccttcaggatcttacagtgccaccaaccccaggcccatattatggttcctttcattatcatattattatagcatcaggagctagctggtcctttccctgtatatttcaatgagactagctggtgtttattcattcaacaaatatttgaatgcctaaataaataaatatttgaagcactgttcagatacttgacatacagtaatgcacaaacagacctatatgccctcacagaatttatattctagtggagggaatgtaaaacaacctatctgtttttgtcattgtactttcagttctactttttgacaaaggcttattttcttagattactttttttgcccttgtttactcatttccaaaaaatacttttagacttattttaatattattttgccctggtcattctttcattgattttatatagctcttaattcttttaactctgaagaaggagcctcctttccttgtgttctaaggtgtgtttttttttttcatgtcctttccatcttagggtacccagactggttaagcagaaaaggaattgattataagagtagcaggtagctcatagaatcgccaggtgggctagaattcaagctcaggctgtaaggaaacatgctacagctaagatgctggcacaggtatggtctacttgggaacttataagcaagggatttcagtgaggacaactcttggatggaaattatccaggatacttcttaacctgacactagatagttggttgatcctgctggaacatgataccatattgagggcttaaggttggttactgctctgcttctggcaaatgaactactcagcagtagccagatcaccccaagaaggaaaagtctatgctattggatctgggcactcttctgccaccatggccgttttgttcctgagcctgttaagcctatactggtgcaactagagaaaaggctgattgacatccacagagtagattatttagtctacacatttaagagcctcctctgtcttggggcctttgggtttgcattcacatgcaaaaaaaattttttttgagattataggcccattttggagaagtccagtcacacactgcttttccggactcctaataccagttctgtagaactcttccaagctcttgttgcttgcaagtccctatcttgttgtaccattagctatagcccatgaatcaatataacttcttacctgagaccatctttctactgataacatagacagtgattgaagttctgcctgctagggccacctctgaatggagttataatcctatagtagctcacttacaatagctggggccagctattgtaagccaggctgtaattgtttcttcatgagtcatttggtgagagggaactctgcttgaagacgtaggtgtgttttaaggaaagaattataatatggcagaagcaggcattctgagaatgcaagcaatatgctactttcccgtatctttgagatctatccagccacttgaagatggaatgcagttggtccctgacatcatgagtaggtgagttcagtaacactcaattcatgagaggtaacttgacctgatgatctctagatgttctctcctgtttagtttctatgaggaactagtagcaaaagccaaggtcccttttaattatgtagggttaatctcctcatctgcacttgtatcttactatggcatctagggtacatgtctatggcctcatcagctttatgtctttgataagttagattagtgtgatgtcctgtgaagtcggtgatatgtttcactgactgaaattgaggcacagagctgaagagctgatgatgttcccctaaagctgaagctcttaagctttgatgtgcatcagaatcatctgaaggacttgttaaaacacagatcactggctccatccctgagttcctgaatcaataggtctgggatgggatggaaaaattccacatctaacaagttcctaggggatgctgatgctgctcactcaggggccacttgttgggaaccactgctctaaggcaagttggcaaagatatgctgctgtccctactgggtgagaacaaattgcttttgtagaagaaagaactggctagcttagagaggcatacaaagtgcctgagctttactatttgctacaggaaagagaccacatctggagaatcaccttagccaattgagttgaggttgcttaagacaatccactggaaagttgaaatgagcaggtggtaggaactgttacccctgaatatgtttctagtggtgttgccaatctctgaaaatccccttgatctgcagtattgtttttgattttctttcatggtagggagggagacctctaatggtttttgtttggcccctaccataataacatttatccaggaaacaaatatgcctattgtgtttttgctaaatacagctattttaggtgtacatacatggacttggaaaattgcagtgggttggatttaggtctcactgaacccctgtcagaagcccatttatcatcttacctccaaaagcccagtctctctgaagctagcacactgaatctagaatctctgagaaataaccccatgtcagtatgtcttagccccatctaaaattgtattctttcctcttcaattcgtaaccctcagaaaccaatataaattaacagtcttacaactagtttgtaggtctttttttcagatttgattttgacttgatgctcccaaggcgtgctggggtgaaactctagttacaggttgagacattgaagactggtgggatggggcagggggctatttattttcttcttacagaaagggtctaccttgagagctgcaggttcagagcactctgcgatatcctgagccttgtcatgtgtccccactacagaactctgggtctcagtttcctagttacaatatcaccaggtctcttatgtgaatgggaagcacattaaactgatataatttagccacctgcagatcaaactgtgcttggttttcaactccttgagccttaagtcctttttgtccttttgtgtgtgtgtttcattttttttaaagacagggtctcactctgttgcctgggctggagtgcagtggcacaatcatagctcactgcaacctggaactcctgggctcaagtgaacctcaggcctcagccccggaagcagctgggactgtagggctgtgtgcattgacaacctgctatttttttttaagagacagggtcttgctatgttgccccggctggtctcgacctcctggcataaaccagtccttccaccttggcctcccaaagtgctgagattacaggtgtgagccaccatgcccagcctagtgttttacttcccaccttgagtcaaaaattcagagatgccagtttgttattctcttcctaaaccaagcagtaccattagaagtcctcaccctaccctacaatctgataactcatgctcgttatattattttctggttctctggcagcaggcactcatttgatctcccacagcctcgtgttcatggggcatatcattctattatgtacagagaagctaagctaaaaccaagctaagtggttacaaggataatttaattcactttgccatgggttgccagatttccatctttaaatactaacaggatgctcactgcctttggccttagaccagaaacccagttctagagttcctcctgttttgctgagatcacttgcaaaccattctttatgttttttttctgtactagttggtcttcttgattacaaacaacagaaaccaattctgactaagcagaaaattgatggattttggacagcttgtaagatcaatgggaaggcaggagaaccgggttcaaaatgtaaggaggagcaaagggaactggggcatagctaaggtcataccataggattagtttgtcaccagtgccaataccattggatacttcctgagccattgtcactggatgcttatttggccactgcaaggattactgatcgcattgcagcttcctcaaataatctgactatatctgttcttttgcataaccctctccccaggaatcacaatacccagagtatacagatggccaagcttagattaggtgcctatgttttcattgccaggctgtatccctgcatccctcttagcttccatagtgtcttacctacttttggattcccccaaatagtaaatattcactctagagcacagtgtaaaacagtgttactctctgggaacagtggttcatacctgtaatcccagcattttgggaggctgaggcaggagaatcacttgagctcaggagttcaagatccgtctgggcaacacagactctatctctacttgggaggctgaggcctgaggctcacttgagcccaggaattggaggctgcagtgaactatgattgtgccactgcactccagcctgggccacagagtgagaacctgtctcttaaaaaaaaaaaaaaaaaaaaagtgttaacttaccaaggagaaaatttcaccatagcacctacagttgttttgaaattgatctccagttcttctactcaattctttgttaccctcttcataaacttttgagccatagaagttaggtatcataaatctccttagtgatcatcgagttcatcactgtcactttactgatggatactctgagactcagaaacagaaaactacctgccaaaggtagcacaggtagttaaactaaatagttagaattaaagtattagaattaaataagaattagaacttagttagaaataaaatgctagcattatttccagtgaaggattatagaaaatactctatgtattttgattctcatttttcatttatcttactgttggctcaggctgtttttcacgatagagatgtgaattgccttctcacttgccctcttctttctcatctctgccagtactaatagtaactgctatttccagggatttctgccagggactgaccatttccttaaaggagcctaccttttatttcttgatttttgaaactgtaattaataacgctgttttagttattgaatggtagaatctcagaaccaatattaatagttattagatgagttttttgagaatgaaatttgaaaggaggagtttataagtgagatcatgaaagcactgggttactaagagagttgaagaaggtggtgtcactaaaggtgagtaaaaggaacagactgatgcgaccaggtttgatatttgctcaattcatagatttgcactttaattcatgagtttaattcacaggtttggcacttaacgtgctaaatcctagtttaatgatgtgatgaaattcatagcataaaattaaggacataagaaatatctcaatgagtcatgttagatttggtttctgagaatggtacccaggacattttgaggaagaacataaaacatttcaatcacaatttttacttcaaaagactgtgaaaatatgttcatcccagttatgtttcaactgattggtataatgagttcaatactaggctgactacccattatttaaagtgctgtgatttgttctgaaagtactccatatgatggaatacttgctcttgcttcaggagataacgcatcatctggaatgtgatcaacatagcttgaggttttatagtctttgatatgtatcctgtgaacatttattttttttaactgaagagtttctttcatgtggaagagtcccaatcctcttgatatattttcttcccttcatcctcattggcatttttgcctgtcgctgtgctttgggaaagggtaattttcagggagaaatgggtagcagcacagagtgaaggttaaagaggacatactctggagtcctaggaacataggttcatatcctagttctgcttcttactactattgtgactatacaagttacttaacctctcagagcctcagttgcctcagctgcaaggtggagagaagaacaggttgtgataaaggaaaatggtatatgaaaaagcacagtgcctggtttatggtaagtaccaaataagccaaagctctgatttattatcagtagccatagaattggtaaaagtagcattcgatcaggaataaagatacctaacttctaattcagagtacattttggaatgtgagtaacaattttaataagaaattggcttcagttttctcacttgatccaagggcttagattaggtcagtggttttccaattgtgatctctggaggtgctctgaggtcactggtagcaaaggggaatggtgagaagtatctcagcagggagagcttccttttcagcccaagaaactatgcctttatttatttagtatatcggcctccttttaacttcttatttaaagaaaatgtttcttggcaaagtgtgcatgtgtgcacacacagacacacatacacttcgaaaataattaacttaaaggttttctctcaagtcccttccaagtctaaaattctttaagtctattcatctgcaactgaacttggaagttggtagcccacactggatctgacctgagacttgatttttctgtgtgtgtgtgtgtgtgtgtgtgtgtgtgtgtgtgtgtgtgtcagggaaggggggggccctgtttcaaatgtatagattaaagtgccaaaatctaaaatttgggaaattacacataacaatctaggttctgttttcttaggaaaaatggatatacctgacaattctatgcccccatttccaaataatagtctgctggagttgagtagcagcagcttcccaaatactccctatcatcttacaggcattttcatttacctgcctggcctctgaaggtatctgagttttcagcattcagtttatcctctacacagtgcaggaacatcaacattattggattagccaactttggcactgtaaaagaattaaattagggaagtgacttgtgttttccatgtaagaaaattgtttttgtatagcaaaagtacatgtattgcattcattttgcctgcccttgaactatataattacttcttaagtgctgaccaccagttaatcatggcttctgagttagaagaattaaataaacatagtgtgttttaattctttccaccaaaggatctgattaccacatagtcaaaaaatttaggaactaggcttttttgggacagtaaacaaagagtttaccacagtttactagttgcccgcagctccccttctcctacctcaggctcagaggaggatttgcacactgtctgggcactctctccccttcacgatggaggaaactgagaaaagtactgtgctgtttgcactccaagttcctgtgaggtgacaaaggatccaatctcagagcatcattcaaataaaagcaataatatatgtcaaccatggcaaccctgtctctgctcagtcacttgccccatcaggacaggggaacttcccactggtccaacatccttcatagctattgtcctctaattgttgggtgtgggttctgtatatgccctttaagtcagacttgttaattgtagtctgtaatcaaggcttatatttacctattaatttttgtctgcttgaccgttcatttactaaagcagatatattgaaatttctcatgaccatggaagtgtccatttctccttatagttttattgctttttgtttatatgttttaaggctatttttaaggtgtatacagtgctcagcaatgcatttcaaagtatatgtgttgcactttatccagaacctgaatgttttgtggcaggagatatttagttggccatactgatgaaagaagttgtcattccttctttttatctttcaaaaatttcccaaagcttatagggagccctttctttatttttttaatgcagttatggatttgttttttacctttaaaccttttctttcatttcaatggcatttcgagtggaaggagatgctaatatatagagtcagtgtatttcccttgaatcagaattttcatcttctctcactctacttattctccttaggtaatttcagccagttatttcaattaccacttttatactgatgacttgtaaatccatatccttaatttaaagtctcacttctacgtagctttatttaactgcctgctagtagatatttcacactcaaatgtgcacttcagactgtccatcaactggtaaatggttaagaaaattatggtacagccatacagtggaatattactcagcaattaaaaggaatgaactactgatgcatcagacaacatgactgaatcacaaaacaatgatgctaagtgaaagaagccagacaaaaaagaaaacacactatatgattccacttacgtaaaattatagaaaataccactccgcagtgacagaaggcagatcagttgttgtcaggcgtgagagttactgagggggtgaggaggatggaagagcaggagggatgacaagggagccagaggaaacttctggtggtgagggatacatttattaccttgattgtgataatcatttcaaaacttatcaaattgtacactttatacatgttcagtttatcatacatcagctatacctgaataaagctggaaaagaaaaccctcaatactaaaaggctttgaacagaaaaataacagtccttgcccacccttttccacccatatcccagtcctgcccttgagaggcagcctctttgaactgttttaggtgttcctctggtatgcaggccacattctaactaacaggtttactctgttggttatagattaatcagtttagcactttaggccgtttctgtttattctttcctattagggtaattgataattcatttctcttaccctgccacttttacttctcctcctgatacagtttttgattaaatgaatagtcagtgataatattactagaaatattaaatattgtacactgctgagtcaggtagtatactttgattacatttatttttttaataccctcccaacaattaacacagtagttgtattttcatttgttttttatgtaacaatgtctgactatttttagatatcctaacagacttgtcatacacctagcagcaattttcctagtgctcaaaataacatatactctgtcaatctcaatccccgctcctttcccttggagacctttcttcttcagccatctgcccttctgtcaaatgtgttctgattacttctggactagatttgtagttgtcacatggagaatttctcttgtcattcttcagtgttgaatcagctaattcctgggtcccatattattttccttccttgtttattcatatattccttcaatttgtttcaggaatattacatcttctagttgcttcctaaacagggatacttgaaagtttaaattttgtattccttacagtgccaaaaatgtcagtagtctactctctaaatgtttgggtggatctagaattctaggttgaaatgcatttttctttagaattttatagtcattttttcattttcttctagcttctgatattgtcaaatattcacagtttaatttagttacatgtattctgtttttttcccccctctggaaacatttatgaccttctctttgtcttgatgctctgaaatgttttattgatatgctttgtcagtgttcatttattgttttggagaatcatgcatttattctgtaaatatagagaaatggccatgtagcagacactgctttaggcactggagatagagcagtgaacagaatagacaaaatcctttccctctttgaatttacactctagtggtaaaggcaaaaattaaataaactagtacataatgaaatgccagatagtaataaggatttaagagaaatgcaaaccatggtaatgggaaagataagagcaggataattttagataggatgggcaggaatgcctctttgaggtgaattgagtggagactcaaatgagggcacaagactcactatctgggtgaagaggtgaggggaacagcaagtgcaaagactctgagacagaaatacacatggaactataagaagtagaagtccagtttagtggcaatggagtaaataagagacaaagtggtcagaaatgaaactggagacatagcggggaacacggaaatttaaaggctcatgggaattggaaaagactttggaatttattttactggagtctttgaacaaggataaacttacgttttaaagaatcgcattggttggaaaattgactgtaagattagcaagtgtgggaagtagtgagacctgttaggaggccattttagtagttgaggtgaaagataatagtggcttagactgggtggtaatagtgagaaatggtcagatttggaatatactttaaagggagagccaacaggatttgctgatgggttggagatggagtgaaagaagagaggagtaaagaataagttgtaagaccagcctggccaacatggtgaaacttcgtctctactaaaaatacaaaaattagccgggcgtagtggcatgcgcctatagtcctagctgcttgggaggctgaggcaggagaattgcttgaacctgggaggcagaggttgtggtgagctgagattatgccactgcactccagcctgggcaacagagcaagactctgtctcaaaaaaaaaaaaaaaagaaagaaagaaagaaagaaaaaagaatgagttgtaagattcttggcctgagcaacttggtaaatggtggcattatttactgagatggagagtactaagggagtgtttgggaggcagagatacggtgggattgagttgtattttgcatactttgggttcaagatgcccattaacagccaaatggagttgtcccggagcagatgctcattcaagtctgtggttcacagtagacatggggactggatgagtttcccttgagagtcagtagagatagagaagaggtcttggggactgagctctggagcatttcaatgatcataattgggaaatggaagaggactagaaaaggaacagccagtgagacagccagaaatccaagagaattcgtgtcctagaagacaagtgcaaaaggggcctcaagaggaagctaggagtcactgtgtcgattgctgttaagagctgagtagaagggatgttcagaatttaccatcagatttgacaatgtggagtttgttggtgactctggcaagtgatttcactggaataatccatgtcttcttgaaaaatatatgattgaataaaatagtagtatcccattgtgtatgaagagttcataagtctgatagagggagatttaaagattcttttgcagtataagtgaaaaagcatatactttaaacagtaaatatattaattttattcatttgttattaaaatgttttctaactgtatcttgatgtctttaatagcattttcttcctctcgcaaatctggaatgttcaccaaacattgaaactttcctctgcaaagcatttgtaccaacctgcatagaacaaattcatgtggttccaccttgtcgtaaactttgtgagaaagtatattctgattgcaaaaaattaattgacacttttgggatccgatggcctgaggagcttgaatgtgacaggtaaacaatgtttttcatggaaagctactaatggtattttactactggtactagctctctgggatgttagtgagaagctttcattatttaattccataaatgtttattacacacttaatatatgtcaggcactatggtgctaagtgctgtggacacaaaggtgggcaaaaaacagacttggttcttgctctcagggaacttacagtgaggtgagagggacagacagtaatcaaataattatgcaaataagtgcaaaattatgactgtgatagatacaacaaaggaaaggtagataattctatgagaatatataatgatacctttgacctaaactggggaaaggggaaggaaatgactgttgagctaaagtacgaagggtaagggtaagacagaggtaactaggcaatgagaggagggaagagcatttcgggcagtgggaatagcttatttagagaccctgcagggcccctgaacagggagtgagggagcatggcatatacagggaattcaaaagctagtatagctggagtgatgagagtgagaaagaatatggtgcaagataaggaaagagagagaagcagcagtcagaccacccagggcccatctttcatatttttatgctgaaagcagtgaggtctttaatattttaagacaggaatgggtagcacaatcctgtgagcttctgtgtagagcatggcacctgtgtcagtctcctgagggttgggcagcactctggcagtttctgttaggaatccaggacacttccatcctccaactctgtcagccaggtggatgggagagagaaggtagagaactcacgccttttcttgagtgcctcagatgggaagtgttataccttttccacatgcattcctgttggcaagatgtcagtcatgtggttataactgaaacaaatagggaaaatagtaaatgtgtgtcctgaaggaaaaaagcattcaaggcagaggacatgtcaggtgctgccagtcaaaaagaacattaccttatgctatttcactagagtgactggggcaaaggacagatcacagtaggtgaaggagtgaagaggaagtaaagccagaaacagagttcttagggaagctggctataaaagaggaaagtttatgagtttaatgggaaagaactattttaagaactactaggaaaaaggaagaggcaagcatatatggggtagaagaggtcatcaatagtagttttctaagaaggagataggatcccaagcatagatgacattttggccatggatgggaggaacatctgttgtaacagtaggaaaggataggatggctgtggatatagtaggtttgtgtgtttggtaagagttgttgcaataatttctttctgatggtttctatttccattgtgacatagtaagagtcaaggaggtcctctgttgtgagtctgggaaagaaggatatgtgttcgagagaagtggtcatcatggagcatgggagaatgagtcaattagagaggcttcgtaacattttaggtaaatcaggcgatcctgaatgtgtggatctcatctggcctgttgagaacttctccagctgtggtgggatgcttggggctaagcacagagaaggcagatagttgtgctcatctgtggttggggttttgtcagatggattcagtgcaaagataaaggtgcactaaaaaatgaaggataatgagaagggtgttactgaaacaatagcctatgaaagtctaaatagatggggagcgaaatgaagagagaaatgaactaatgtatggagacaagctggaggagatctatcccaatgaggttttttttttaaaggcataatgaggattttttaaaaaatgaattgcaaggataggagcttgcagacgaagggcaggatgcttgagttgatttttggagatagtgtgtacttgcaggttgtggcagggttccttgtgtgactttgattacaggtggccactgcgggttagggatagtcattggagatgaggaggctaaagagccgagaagccagagtgtggatagcttattcttggtcaagtcaccaaggatgatgacagcaaaaggaaaggagacaaaactgatgattcattcaactcatatttcttgtactcttactgtgtgccaggactgttctaggcactagagttacaacaggcaaaaattcctgccatcatggaccttacattttagtggagggaaggagaagattcagtaaataagttatatttatatgagaagacggtgaggcctgtggagaaaatacttgctctttcattatgagattgcctactcagtttcaaagcaggggaggttataacttaaaaaaatttacactggcacctatgcttaatttctaactctgttggagttttggtcttcgtaacttgatttttggagaaacggaattaatctaaatcaaatttattcgtgtttgagaatgcttgatacattgaattgggaagtagaattcattttttaaaattatttaagccctatattaaaccatgtcccattaatataaagcaaacccattaacatccttttatacaatgttagttgggtcagctgcacataaaaataattctagtatggcctatactggagaatattttttcatttctataaataagaccttcaggcttttgtggcatcttatttactttgaaaacacacacaaagaaagaggggaacctctgattaaaacacaaaatctagctcattgaaagatttctagcataatgaaagatttaacataactgtggtaaaaacatgaaggctgcatctattatttgagaaacggcagaactgtgtggttatggcatgcattaggctcttggttccccaggagaatgcctttgccttggaagaaaaaggtgcattcattctttgaggtctgtagtttcctcagctcatcagagcacaggcacattcttttctacgtgaagagttttgtaaactgaactttgttttcagttccggctccagccatcctcgggtagcttgccaatagatgaatcccactcgtttgacccatgacgctccttcttttcatttctccctctttccccacagcagtgcatgtccaccataccacctgagagtctgtggaatctaattttctgttatacttctttccttacactcattttcctgtctttattatgatagtctaactttttctcctcaaaggtatagctgccttgctttcatgaaaacacactttcctattgtgatttatcagaggcctttccatatctcagccactatgctatgacagattttataattaataagtgcatttcaaagtgaaaacgttacaaacatgcttaacagatgtttttataacatgaaatattctactgcgttaagatcaaaatgctgactatacttgttccgtataccttcagaccactgttaatgtaatattttggcaaggtgaatggtcttttttggatataaaaatctcagcataagccaggcatggtggtacacagctgtattctcagctatttaagaggattgcttgagtccaggaaatcaagaccagcctgggtaacatagtgacacccagtctccattaaaaaaaaaaaaaaaaaagaatctcaggcatatacaggcatatatttaaaagaaatattctatctggacctttccgtgatagtgaataaacttgatgaatactgactgacttgatcatttgcaattagagttcatgtggagaaagtaagattttaagcacaattaacttatgaatgaatgtatccattcactgaccttttccacattagtcttgattaatttttttttcctattctctagacagtggaggctgctaatttattctactgatacagtgagacctcatataataaattggggaaagaaactggttagctttttgttttatttttaggctgaagaaactatagaacctatgtggaacttacacacttctggtagatacataatcattttcaagaacaattgagtaacatatagtaaaatggcagatgcttaaccctgcatcctaggaaatcccctcccatagaaactcttacacagagagtcgtgcacaagaatattgattgtagattattcctaattcttttaatgggaaaaaatctaaaagtccatcatagaagaatgattagtaaattgtgatgtacttacacactggaatactaccatacagttgataaaatgaatgtagttgacccacatctgtcgacatggataaatctagaaaatatagtgttaaattttaaaatgtaagttatagcatgctatatacagcatggtgtcatttatataaagttcaaaacctgaaaaacaatactttataaggttatagttagtaaataatgtaataaaaatattttaaaatgcttgagagtaaacaccgaatttgtggtaatgaatacttctgaggagagagagaaggaactaagaccagaaagggtccccactgtatctataatgttatattgctttattttaaaagatataaagcaaaattgacataatattatgttttaataaagctggtagttttttttgtatttcattttatgggcatatgttttagtctgttcttatctaaggtatatttaaaatgctttctcatttaaaacctccagtactttttttttttttccttgagacagagtctctctgtctcccaggctggagtgcagtggctcggtcttgtctcactgcaacctccgcctcccaggttcaagtgattctcctgcctcagcttcccaagtagctgggattacaggcacctgtcaccacgcccagctaatttttgtatttttagtagagatggggtttcgccatgttggccagtctggtcttgaacacctgacctcaagttatccacctgcctcagcctcccaaagtgctggaattataggcatgagccaccgtacctggccaaaacctccaatactttttaaaccattatagatcccccaaaataatactggtatgtacaaactcaacttagtgataaagagatggaaatatctccatctatcactcaggactgtccataaacaagggaggcaaagagcccaacctgaacaaaatggtgatgttcattaagctggtcctcagcctgcctcttgctggtatacttgcctgtctttaaaaacttgaactctatcctgtcaatccagggaaggatctcatttcattcattttaattatcatcactttagttatatggttgctttacttttcttatggacattagaaaataaaagtgaatagacaagatatatttcatatgatataaagacatatttcatatgctataaagagacaagccagtacttatctggagcctaccaattaagataaattcttttaaatatttagtcttaaaaacagaaattattttaaaattatgaattggctaattttttccaagtaagtgcattttcatgttcacctgctttgtatttaatataaattattgtgttgaggccccattaacagccacaagtttttagtcaacttcaaaaatttctactcaactcttatctgtaatccatttagatttgtatctcttcccatcaatcatgaatacataaggtaatattttatagttggaaagcattgcttaatatattgaatcaataaaaatgttgatttcatatatttaatttttataatctttacagattacaatactgtgatgagactgttcctgtaacttttgatccacacacagaatttcttggtcctcagaagaaaacagaacaagtccaaagagacattggattttggtgtccaaggcatcttaagacttctgggggacaaggatataagtttctgggaattgaccagtgtgcgcctccatgccccaacatgtattttaaaagtgatgagctagagtttgcaaaaagttttattggaacagtttcaatattttgtctttgtgcaactctgttcacattccttacttttttaattgatgttagaagattcagatacccagagagaccaattatatattactctgtctgttacagcattgtatctcttatgtacttcattggatttttgctaggcgatagcacagcctgcaataaggcagatgagaagctagaacttggtgacactgttgtcctaggctctcaaaataaggcttgcaccgttttgttcatgcttttgtattttttcacaatggctggcactgtgtggtgggtgattcttaccattacttggttcttagctgcaggaagaaaatggagttgtgaagccatcgagcaaaaagcagtgtggtttcatgctgttgcatggggaacaccaggtttcctgactgttatgcttcttgctatgaacaaagttgaaggagacaacattagtggagtttgctttgttggcctttatgacctggatgcttctcgctactttgtactcttgccactgtgcctttgtgtgtttgttgggctctctcttcttttagctggcattatttccttaaatcatgttcgacaagtcatacaacatgatggccggaaccaagaaaaactaaagaaatttatgattcgaattggagtcttcagcggcttgtatcttgtgccattagtgacacttctcggatgttacgtctatgagcaagtgaacaggattacctgggagataacttgggtctctgatcattgtcgtcagtaccatatcccatgtccttatcaggtaaaagctatcacttggattatgtctctatttacatttaatgtagaaaatgtttcatggaaatatacttgtcatggatgtaaaagttgatttcaggtgagaaaatacaagagccataggtaaggatttcctatacatcaactgaaactgggatgaatgtttcatgacttccttcctcaagctttagcttcagttgtatagtaaagcacttcctttattctctgaaaaattaaattgagctgcaaaggcagattaatagcaataaagagcagagtcagaagaacagaccttgacattgggagaaaaacagaagtcacttttgtcgcattggcaattatttttaattttttagttagtagtaaaaaatcttatttggatatatttaatttgatcatattatcttatagctttttacatagtatatacttacaaaaacagaatttgctttttgcctgactcatctgtcatttctcaattgaaaaaaacacagttgtaacaaaatatgctttatctatttctgattcttatgattagtataagggtggtgtttttaaaattaataaaagtaaatttctgaaaatataaaatttcttaaagcattttagttgaagttttgtaaatagaaatttggttttgttttagtagattttagacattattcctgactctgtgcggtattaactgcattgaacatgagcactgccatcacagtgtatcaaattaagcaatgggaatgtcaaactatttcatataatagcttatatttcagaaagttactgctttataacattgtggaatctattttttatgttggtatgtggggatactagttttacttgccttatacgttgtccataatctattatccatagtttgtttttactatatacttaataagaggctgtgtcttaaagtgatcctgctatattaataatgactcctagtttcctcagtctttttggcaaggttggggagaggaaactattacatattattaaaaagtttaagatctatggttttcaagtttaagatctgtagttattatgttttatgtaagaaactgtaaaatataatagaattagaaaattataatcttcaagtggagaaggatataatattcctgtagttgtagaaattataaaagattgctaaatttgactaagtaaaaaaaaatttttttaaagattctgcgtgacaaaaaaaaacaaacaaacaatccataatcaatgtcaaaagactaactgggaaagtttatttgcatatgacatcatagctgaaaggctaatttctctaatttataaagagttgctacagatcaataagaaaaaaaccatccatctgatataaaaatgagaaaagagtaggaaaaaggttcacaggaaataaaaatgaaaaaactattcttaaacatgtgaaaaagttatagtaaaataaatgtaaaattaaaattaaattatatttccatgtatgatacggcaaacatcttaaaggtgttctaaccactgtgtggtgaaacaataaatagcaaaatacatattttcagactttgctattaagagttagttcaaccttctgttgaagcaatttcgcggtatgtacagatgtataatgtgtgtacactgatactgcccttctgggaatttatagacagatttgcttacaaatatgagaaattaaataataccaagatagtcactacaacattatttgcaaatgacaatagattggaagtaagtatctattaacagggatagtagaataagttatggttcactcacacaatgcaacagcctttacaaagaataaagagctctggccgggtgcggtggcttacgcctgtaatcctagcattttgggaggctgaggagggcggattgcctgagctcaagagttcaagaccagcctgggcaacatggtaaaaccctgtctctactaaaatacaaaaaaattagccaggcatggtggcgtacacttgtagtcccagctacttgggaggctgaggcgggagaattgcttgaacgcgggaggcggaggttgtagtgagctgagatcacgccactgcactccagcctgggtgacagagtgagactccatctcaaaaaataaaaataaaataaaaaataaaagaaataaagagctctatttgtattgatacagaatggtctccaagaaatattagtaagtaaaaaaggcaagaaatgcagagtatgtaatatcgtgacccttgtgcaatgtttaaggttagaatttcaaagtttatgcctgaataaaaagtataatttcaattcttaggaaattttcgcattttactgatacttaatttactttaaccaagtttttataatataaatattaataacgtataaaagctgtaaaatatttgttatgatgagtttaaatgtatttttgtggtagattatagtgggggaaaataggtacatatttagaggcaaatattctggcaattataagaggctactgtatctatcgagaaaaaaatgcgaggaaatcatgccaagatttaggagattattcttaaatatatttcagtattttcccctttctagagatttggtacataaagtttctttgttcagcatttagataaaaaatgtgttgcacttagagcatgcttcattatattatttcaaacctttttagtaaaacagttgaagatttataacttttgttcgttttatattgacaatatagacttctttccactttaagtgcatcactgaaaatattattattcactattttttgtaggcaaaagcaaaagctcgaccagaattggctttatttatgataaaatacctgatgacattaattgttggcatctctgctgtcttctgggttggaagcaaaaagacatgcacagaatgggctgggttttttaaacgaaatcgcaagagagagtaagaaactattgaattgtctgacacaatttttaaataaatagatcaaaataccaaggaactgttcaaatcaatgtactagagtttcattatatcaactattatttcaatttgatttgccaactgaagtttggaaattttttttatgaaagagacgtgctttatttttgcatttgttacaatagtctttgacatatactatttatcatatagtatatgtctgtgacatatactattctatttgaaatatgaatgaatgatttatgaaaggcatattttcttttcatgatttatagtatatccagtattattactgctgtcattggattcattattttgggtacagcattttaaataattttatcctttttatcaaggataaaagattaagacttaagtatatataaagaaacctataaagtatgattcaaatataagtgatgtgttatggtcattatttactaactttaaatcttattacacacagctatgacctaaactttcacttatttgtcttacttaagatgttaaaattcaaacttatggaatattctataacaaaattgatttatatttatgagtaattcattttagttttatatatatatatatatatgcacacacactatatacaaggtactatagctttttaaaaattgttccccattggtttgcttaactcatttcagaactgtagaccatttcacaaataagtttctgaagtctgaagaatcgtattcaactggatttttttgcactattattatatgtctatctcatatttatatactcacactaatttcagtgtaacttgctaatttttaacgttagaaagaaaagacttatatttaaatgaagaccgttaattatattctctatccttttcttctggtttacttttatattacatatttatatattatacaaatacagtattatgtatagtacgtttatgctgttttgagcctccttgccctcatcctttgattcttgccttaatttcttgccagtttactatttatactgacaaaagcaacttagagtgtatacacaaaagattttataaaatcagtttatgtcctagtatttataatcccagattttataatataaaccatagaattttcaactttagtgactaaggatttttggcaaaagatatgtgatatcctttatatcctctactttatagccacacttctaatttgagtaaatcctctccttcaattttcttatagtccaatcagtgaaagtcgaagagtactacaggaatcatgtgagtttttcttaaagcacaattctaaagttaaacacaaaaagaagcactataaaccaagttcacacaagctgaaggtcatttccaaatccatgggaaccagcacaggagctacagcaaatcatggcacttctgcagtagcaattactagccatgattacctaggacaagaaactttgacagaaatccaaacctcaccagaaacatcaatgagagaggtgaaagcggacggagctagcacccccaggttaagagaacaggactgtggtgaacctgcctcgccagcagcatccatctccagactctctggggaacaggtcgacgggaagggccaggcaggcagtgtatctgaaagtgcgcggagtgaaggaaggtgagatttgattttatgtaaaatcatcactattttaaatactgcattacacattttttattaaagcataacacatttggaaagcattttgtgatatattatgtctgtactcttaccccaaggaagtttgggttcagcctataaatatgctatttagtagtttaattcttagctttgagaacagctttaatataggtggttcaagtaggaatgttcatttctgtggcaattgttaagagttccttgtacatttaagtaaatgcaatttacccaaaatacaggctaagttttaattaatactacattataattctgtctaaaaagtgtcaccttatacaaaattataatgtgtcattttatctaaaattattttattttctgaacatgaaaagatattgacattatctttaatgaattttctcaaatggccataggtgaccaaaacacaggtaagccagaatgcagacagctaattgcattaagatctcaaggttatcttacctagtcctctcagactaggctaaatgcaccttctctgtgatcctatggcagctttcatatatttggattgtaattagatacatgctttatcttctcgtagatttgtaaccttctcaatgggagagctaaagtcttactcatctttatgttcccagtttcttacatggtactgatccatggtgggaaatcaataaaacatttgttaaactgaggacaggaatcctgccttattctattccccacaagattccatgttcagccctatatatataagtagtgcttgatgaagtttctgaagtaagtgaaaattatattttaaacaattatttggccaggcacggtggctcacgcctgtaatcccagcactttgggaggccaaggtgggcagatcacaaggtcaggagatcgagaccattctggctaacatggtgaaaccccatctctactgaaaatacaaaaaattagccgggtgtggtggcacccacctgtagtcccagctactcgggaggctgaggcaggagaatcgcttgaacccaagaggtggaggttgcagtgagctgagatcacgctattattgcactccagcctagcaacagagtgagactctgtctcaaaaaaaaaatttgtattttgaagtgttaaagtacacctgaagactgttagctatttattctctgataaaggtggacactggttaggggtgaaactcatgaaaaatggcatcatatttgtgtttgtggatgtgtgtgtgtcaactttttttcttttatctaggattagtccaaagagtgatattactgacactggcctggcacagagcaacaatttgcaggtccccagttcttcagaaccaagcagcctcaaaggttccacatctctgcttgttcacccggtttcaggagtgagaaaagagcagggaggtggttgtcattcagatacttgaagaacattttctctcgttactcagaagcaaatttgtgttacactggaagtgacctatgcactgttttgtaagaatcactgttacattcttcttttgcacttaaagttgcattgcctactgttatactggaaaaaatagagttcaagaataatatgactcatttcacacaaaggttaatgacaacaatatacctgaaaacagaaatgtgcaggttaataatatttttttaatagtgtgggaggacagagttagaggaatcttccttttctatttatgaagattctactcttggtaagagtattttaagatgtactatgctattttacttttttgatataaaatcaagatatttctttgctgaagtatttaaatcttatccttgtatctttttatacatatttgaaaataagcttatatgtatttgaacttttttgaaatcctattcaagtatttttatcatgctattgtgatattttagcactttggtagcttttacactgaatttctaagaaaattgtaaaatagtcttcttttatactgtaaaaaaagatataccaaaaagtcttataataggaatttaactttaaaaacccacttattgataccttaccatctaaaatgtgtgatttttatagtctcgttttaggaatttcacagatctaaattatgtaactgaaataaggtgcttactcaaagagtgtccactattgattgtattatgctgctcactgatccttctgcatatttaaaataaaatgtcctaaagggttagtagacaaaatgttagtcttttgtatattaggccaagtgcaattgacttcccttttttaatgtttcatgaccacccattgattgtattataaccacttacagttgcttatattttttgttttaacttttgttttttaacatttagaatattacattttgtattatacagtacctttctcagacattttgtagaattcatttcggcagctcactaggattttgctgaacattaaaaagtgtgatagcgatattagtgccaatcaaatggaaaaaaggtagttttaataaacaagacacaacgtttttatacaacatactttaaaatattaaggagttttcttaattttgtttcctattaagtattattctttgggcaagattttctgatgcttttgattttctctcaatttagcatttgcttttggtttttttctctatttagcattctgttaaggcacaaaaactatgtactgtatgggaaatgttgtaaatattaccttttccacattttaaacagacaactttgaatacaaaaactttgttttgtgtgatcttttcattaataaaattatctttgtataagaattatggagtattctgtggttaggtatagtagttctggccaaggaagtagtataattttttagattagtgactccatggctggtaagtcagaggcttctttttaaccttgaaggagaatgcagtcaagattcttgctttttgtcactatttctttccaaaaatgtaaattataaagctatattaactgtaactttttaaagccagtgggaaagatctggagtgtgaggggtgaagcaaaaggaacccaggacccagttttcactcctaacagtgtattaggtgatacagacaaacctcccaaaacagaaggctagaatatgtggatgaaataaaacaataggcagatttctgtgatgggggaaaaaaagaaataaaataatattaaccccaaacattaaaaaactaataagatagtgaggaattgccaggttaagatctgggagaagagagaaattctcactacaaagcccaacatttggagctgttttgcccaggagcacttgatgacttggaaagggcagctgagaagtggaacagtgctattgacagcctcaaagggctggaagacaaggggtctgcaaccaccctacatttagaattgtgacctcagagggttggatcttaaaagtacatgtgagttgtacataaagcagccctgcttcaagttgtctgggtagatagaaaaagttcaaaccctgaaattagattaaggtagctcaagcaccaggtaaatgaaaatcttctctggaggaagaaaatgttattttatatactctaaaagtaccacagtgctcatcatacaatcaaacaatcaggtatgcaaaaaagaccattttttgttcattaaaacatgaacaagaattggcacaagcaagagaaaaagatccccaggtactgctgatgtattactagatacacatcatgtaacttaaaagtacaagcaaggaaaacaataagatactacacacctataagaatggacagcacatagtgacttccttccaaagaatccaaagtacaggtggtacagggagagtagcatttacagtggagaaacctgacaaactcagcgagaggtacctcactactcagaaggcgatcaaagtcaaaagagaggtaagtcatgttgagagtgttacctttcatatgatgtgatgaaaattgcagtttacctctgatattcccaaaacctataacctcactctagttgtgaaatatgagatgaatctcagcagatggacattttacaagatagctgaccagtcctcctcaaaaggagtcaaaatcctcaagaacaagggaagtttgagaaactatcacagccaagaggagctgaaggagacatgacaactaaatgtaatgtggtatcttggaaaagaaaaaagcacattagataaaaactaaggaaatttgaataaagcttagtcatccaaatcagctaaatgttctttataattttcttccttctgcttgctttttctcaccttttagtcagatattggactcctggatggatcctttaattttctcatctttcctctccttttgccaatctctttggatttttttctttgaaactttatcaaatgtattttttaatttttgattgaagtttttttggctatcattttttaatttcacagcattttaaaaattttgttcttttttcatagtacctttttgttttatgattattttatatataatgtatttcaagatacacaatttactttttaaagatcatataggaaacattaatttgtaatatttattttgtagcagatgactttattaaagtccctcaatccctctaataattttgcagttgatttttcctggattttctaggtggatgattttttcctctcaaataatggtaattttattcctcagctattagctggaacttgtagccagttaacattaatagtagtagcagtagacatcctcgtcttgtttctttattttaaagaaaatgcctgtagtacttcatcatgaagaacaatgttggcatttgacataagataggtatttcttaatgagttaaaagaatcctattccatcttataagtttttaaaaatgaggaatatgtactgaattttatcaaatgcccttttgctaccaggattagtcagtatgaggctaacttctgtaacaatcctcaaaatcgcagtagctttagaaacttattcatgcgacaggtgtgaatgttcttgaggtagccttccaaattcaagcaaccaccacttccatcttgtggctctgccatctcccactgagtaagagagagagtaaatgactgcacagaaaaaagcttcatgagctagagttgaaagtgatatgcaggccgggcgcagtggctcacgcctgaaatcccagcactttgggaggcggaggcgggcggatcacgaggtcaggagatcgagatcatcctggctaacacggtgaaaccccgtctctactaaaaatacaaaaaattagccgggcgtggtggcgggcgcctgtagtcccagctactcaggaggctgaggcaggagaatggcgtgaacctgggaggcggagcttgcagtgagccaagatcgcgccactgcactccagcgtgggcgactgagcaagactccgtctcaaaaaaaagaaaagaaaagaaagcgccatgcaacatttccagctgcatttcatttaccagaactcaggcataaatctagatgtcttcctgagagggaggagaaacagatttactaagccattggccagcatttcaatctactaatgtgttgtgttaaataaatttcctaacataatgccatcctttaattcattgaataaccctacttgatcatgatgtatcatttaatacttctggatttgatttgttagtgatttatttaggagttttaaaatgtgcatctatatgtacctatattctaaattatttaccagccctgggcaatattacaatatttgtaataagtaagtttgaattttaaaactatttatttttaatagcaaaattcagaagcattatttaatttttttaaaaagcaatttttctttttcatgggactagagtctttgaggcaaaaaaaaaaaaaaaaaaaaaaagcctgctgtcgaccagcctgaccaacatggtgaaaccctgtctctactaaaaatacaaaaattagctgggcgtcgtggtgggcacctgtaatccctgctactcaggaggctgaggcaggagaattgcctgaacccagaaggcagagattgcagtgagccaagattgtgccattgcactccagcctgggtgacacagcgagactccgtctcaaaaaaaaaaaaaagcctgctgtctcagaaaaggtgacattaatttttataagaattacataacagttttcagccaagaaagttggcttaaattacatatttacatttacaataacgaaattggcacgagcactgtgcaggtaaacccaaagcagcaaagtctgctagaaaccctcactttgaaagtctgctacaaaccttcaacaaaattttatgaaatgccatgtttcaaaaagacccaggatacccaatgggatccaccactgctatgctgtttatggttctgaagaaatcttccctacactttcttgatcaaactagactgaaaacagatcataattgccagccatcatcaaaatcacagttttagtgctttcttactttttttttttttttttagtgctttcttactctttgatcttctcagaaacttaccacaggtgggtgtttccagttcctactgctggaaagttttaaccttgccaagcaggcagttactctcaggaaatgaaagatacaatttgtaataaccacaagaagttctgcagttgcttttctgcatggaaggcatgatattgaatacctcactgcccactgcacaagtcagatacttaaattccaagctttaaccgtggcccctgtgatctgtcatgtgcagaagaatcaaaactttcattaacttacagtgaaaatgtgtcgacaaagagcaagaaaaaattaaaagattaatccaaaatgatcaaagacattgggatccagagccaggcggtagtggagagaagcatagtgaagttcgttatgaatattactgaaggatgggagccaaatggaagcagtatggaaagaaatacaatgaaatgaaaatgagaaagacttgtggcagtaaatactaattagaaataaacacagatggaaaattattgctaaggtgagtaaatttagcagccaattctgagatttgtattttctatccctagaaggaaaaaagagccagagaaaacgttgaagtgcaggttttctaattttccaccacaaaaagaaaaaggacatgaaggaggacaaacctagttaagtcttggtagaaacgtcttagagaaagttttcaaataaattattttctaaacacatgccatagttcatcttcattaatactgaacacactttaagtattttctactatttcacttagattaggttttaacaaacatacctagtgtagagtctattaaagcttacatttaatacttatgtttatatactattaattataagtataattataatacatttagaatatgttgaaaagagaggcacaaaatcaatagagattaagaaaaaatttttttctaaagtttcaagaaaatgaaatatctgaatatcttctttcccaagtgctaactagagtaaaactgtctagtttgtgggtttatttccttagggacctattccaggatctaattagtttcactgtgaggaaataagtctgaatatacatactacacattatctagagaaactcaccagcaaggtaagagcttccctcatggttttagtccttcctaactgtcagcccagtgtcccctcatgagaattc

SEQ ID NO: 23656 - DNA, 1646 bp, Homo Sapiens
gcccgggagaggagaggagcgggccgaggactccagcgtgcccaggtctggcatcctgcacttgctgccctctgacacctgggaagatggccggcccgtggaccttcacccttctctgtggtttgctggcagccaccttgatccaagccaccctcagtcccactgcagttctcatcctcggcccaaaagtcatcaaagaaaagctgacacaggagctgaaggaccacaacgccaccagcatcctgcagcagctgccgctgctcagtgccatgcgggaaaagccagccggaggcatccctgtgctgggcagcctggtgaacaccgtcctgaagcacatcatctggctgaaggtcatcacagctaacatcctccagctgcaggtgaagccctcggccaatgaccaggagctgctagtcaagatccccctggacatggtggctggattcaacacgcccctggtcaagaccatcgtggagttccacatgacgactgaggcccaagccaccatccgcatggacaccagtgcaagtggccccacccgcctggtcctcagtgactgtgccaccagccatgggagcctgcgcatccaactgctgcataagctctccttcctggtgaacgccttagctaagcaggtcatgaacctcctagtgccatccctgcccaatctagtgaaaaaccagctgtgtcccgtgatcgaggcttccttcaatggcatgtatgcagacctcctgcagctggtgaaggtgcccatttccctcagcattgaccgtctggagtttgaccttctgtatcctgccatcaagggtgacaccattcagctctacctgggggccaagttgttggactcacagggaaaggtgaccaagtggttcaataactctgcagcttccctgacaatgcccaccctggacaacatcccgttcagcctcatcgtgagtcaggacgtggtgaaagctgcagtggctgctgtgctctctccagaagaattcatggtcctgttggactctgtgcttcctgagagtgcccatcggctgaagtcaagcatcgggctgatcaatgaaaaggctgcagataagctgggatctacccagatcgtgaagatcctaactcaggacactcccgagttttttatagaccaaggccatgccaaggtggcccaactgatcgtgctggaagtgtttccctccagtgaagccctccgccctttgttcaccctgggcatcgaagccagctcggaagctcagttttacaccaaaggtgaccaacttatactcaacttgaataacatcagctctgatcggatccagctgatgaactctgggattggctggttccaacctgatgttctgaaaaacatcatcactgagatcatccactccatcctgctgccgaaccagaatggcaaattaagatctggggtcccagtgtcattggtgaaggccttgggattcgaggcagctgagtcctcactgaccaaggatgcccttgtgcttactccagcctccttgtggaaacccagctctcctgtctcccagtgaagacttggatggcagccatcagggaaggctgggtcccagctgggagtatgggtgtgagctctatagaccatccctctctgcaatcaataaacacttgcctgtgat

SEQ ID NO: 23657 - DNA, 86081 bp, Homo Sapiens
caacacaacagcaacaccacacacgacatcagtacaacacctcgggtccgataaccctaaatcaccaacagacacaccacacaaccgacaccaaacaccagcccgcacaacacacagaacaacgaacaccactatcaccggccagcggcaccacataacaaacaacacaggaaccaccatcagcaagcaagaacggagacaaccacacagagttcaacaccctgcaaggagcactgaaaccacccaggacacacgcgaatcccaacccacacaatcgggacctacccacaagtgccggggaatcgccacgacaggacagcacaccgtcgaccgaggacctaatcctacaccaccactcaatcaagcgaattatgccctaattcatgggacaatcttccatataccatggagatcatgccagccatacggccctttttgcatcctggcctactttcaacttagccatagtcattcttaaggttccatccaggtcttcaacaccaccacgagaatcaattccctctaataagatgcagacaccatcccattgtggggacataccacatcttattcaaaaactcacaattgatgaaaacaccaagcatataaccatgcctagtcagtggttaactttttctaacgttttttgagatgaagttttgctcttgttgcccaggctggagtgcaatggtgcaatctcagctcactgcaatttctgcctcccaggttcaggtgattctcctgcctcagcctcccgagtagctgggattacaggcatgcaccaccatgcccggctaattttgtatttttagtagagatggggtttctctatgttggtcatcaggctggtcggttaatatatttttaggaatatcatagcacgtcttgagagatacacacattcttgttagtgtttctcaagctgacctagcatcaccatagagaatattaatattctgattaatatttatatctgtgacctagatctggtaatgaaggaaaatatagggtacaatatacattattcaggtgatgggtatgctaaaagcctagatttcaccattatgtaatacattcatgtaaaaaactgcacttttacctcttaaatttatgcaaatttttgttaaaaaaagagattatattaattggcattatttcaggcactgttggataagaagaataaagttcttgaagtaaagaaaccccctcgcttccttcaaagaaacccaatacctcaacctcggcttccaactccaaccttggaaatgacgtccaatgtaagttggaaactttttagttgaaatgctaaattcaatatcattgtcagcttattcttaggatagtttagcttaaagcaaatctaatttagcagtgttagtttcccaagctctgacttaaatattgtctttattcttatgtatcaaacatcagacacagaaaaacaaacgagatgaaatgaaatctaaacccagtccttctcaaaaataaaaacacaatttaaaaaatctttccatgaaaaatcagcatcagaaggtagtgctcatgtatatgaaatagaaaaagaagattgagtgatgatcagctaccatagctatcttcccacatggagagatggctgatgactgttggagtcgaagaggaatgaaatgccagaggtgtcatcaagacggacttgcttctggggtgggaatgactcaaagagccctgcccagggccacatctcaccagactcaatttgagcaaagtatcagagttggttaggatttagagggctgactcagactaaacaaatccacaggaaactgttagagatgccatgatgcaaatttattactttacagagagaactataactgcctactggatcaggctgttcctcttggctggtcagcacattatctctcagtatgggacagtcctcacaagaagccagattgtattcagaaggctgatgtgtttcttggctgagggcaggtgttggtgggagaccatgctaacacctgttactacctctgatgagtggctcctgcagagggaccagaaagctcccaccagccagcggggatgtgctgctggataacattctcttttctagactttgtgcagggctttggttgacatattgtctttttttttttttttttttttttttttttttttggagacagaatctcgttctgtcacccaggctgaagtgcagtggtgcaaccttggctcactgcaacctctgcctcctgggttcaagcgattctcctgcgtcagccttatgagtagctggaactacaggcatgtgtcaccacacccagctaatttttatagttttagtagagatggggtgttgccatgttggccaggcttgtctcaaactcttgacctcaggtgatccacctgccctggcctcccaaagtgctaggattacaggcatgagccactgtgcccagcctgacaacacatcgtctttcatgtgtgttaatgtcatcgattagactgctgttttctttttacattcaaaggaatcttaattcgatttccagaccctgctttttctgctttggacacagagtttttaagatgatttttatagatggctaaccttgtctcttatattctgattttatcagcatagctaaattcttgtgagaagtaccttactctgacatagactagctgtatttgtgtctactgatgatcaaacatgaaaaatcctattgcaaaatgatgttatatgcaatacttgttgctttaagaaatattttgctggaaaggaatatagggaaatgaaagtggtttcatttgtagggatagcatggcagggagtgaattttttgcttgtaatatgatttgttaatgatgaaaaataatgaattctaatgtaagtaacattaaaatactatatgttcaataagggcagggaccatcttttatttctctttaaatctttttggcatctagcacagtctgttttgcttgaaataagtcttcaaaagaatatttgatgcttggactactgcagttctcaagctgcttggttctccctttgttcttttaggaagaagaagaaatggaaatggctgtgatctaccttcaaaagttactccggggcagagtcgttcagaacatggtgtgtaggtccaaccgctggccctgcatttctcttttgagaataaattttttagaatgcatatgtgcttggttccttggagtgaatcccttttgcaccctgctatcctattcagctaaactcttgagttgcctacccatttccttctggtgacccatttccttctaatggcatcatttgtccaggtgggtggcacagtgtcaaggagagagacagggaggacctacctgctatttgccatggttgtaactaaggcagtatgaaactcacttcttccttggaattgttaaatccatacattttctcacctgaattttggctatttaagcattatcaaccaggtggattccctaattttccacagtcataatacaattatttgagtttgcatatgtctggcaatccctacattataaatgaaagagctaaataataaattatggttttgaacctttactatatgcccacactatttattctttgctctacatatgttgtctcatttttttttcctatccataatctcattttacaggcaagtaatctgagtctgagggagatttagttatctgccagcaaattcagctctggtcttcccgagtgtaaagccttagccagattatttgtgttgctggagcaggcacacttcacttaaaaaatggactgatataaagccccagttaattttttttcccagatagctataactcataagagattcagatatgatgagtaaatcatctggatgaacaacttgtgtttagcactgttctttactcttctttcagtattttcccaagagaaatgccacagttaaattcagacaacagattattacaaaccagggacagatttattggaaaaaaacatatggccatgaaaaatgccatcctcaggtttattagggaaggagcacaggaaatgaggggaaggttctggtttcttcagatgaccctggagttgtcatcttgtccttgagaggcattctcagaaattaagcacagctcactgaaaactaagcccattttctgcctgagaagctgaaggcacagaaaagagggctgagctctagctctgtgggacacatctgctctgtggaacccaaaaggcaggacagaacccactgttcacaagtgtctcacaagtcactgcgtgtgactcctagtgcttggcacaaagggatggtaacttgcaggtctgtctttgatttgatttgatacagatgtttgaagggaaagaaaagcgactggagttgatccaggagttgcgcacctgccacgcactacaagaagatgaaaagctggtgaaaaaagccgagaagcaagtgaccctggccttacagcggcagaggaacttgcatgagcacaaggttttcctttttttgttttcttgttactttcttgttaaattttctcccttgattttatcatcacacagcaccattataataaaaattaatgaaatgatgaaaaagaaacagccccacaatcccatcactctgtcagcatttgtgtgtgtgtgtgtgtgtgtgtgtgtgtgtgtgtgtgtgatggagtttcactctatcgcccaggctgaagtgcagtgatgcagtcgtggctcactgcaacctctgcctcacgggttcaaatgattctcctgcttcagtctcccaagctgggactacaggcatgcaccaccatgcttggctaatttccgtattcttagtagagatggggtttcgccatattggccaggctggtctcgaactcctgacctcaggtgatccgcctgcctcagcttcccaaagttctggaattcttaaataatgctgctgtagtccttaatttgattggggatgtgcccttactgatttgaatatggtgctattttttctttatttgcaaaacaataacaacaaaacaagaagaatgcattcttttcaactttaagatttttttccttccatttttttccccaaatatccagtgactattgtatttcagttagtgagggctttgtagactgaataaataacaaaagcaacatgaaaaaagtgagaaataagatttatcttaaaatattagcatttattttggagttttagagctgtcatagctcatgctggttaaactgcatattaaatgtgttactgtttcatgatatgtggtgactttcgtcatgacctcccagctgtgtgccgcctgacacagctaagaattacagctccaaaccaacaactgtaaatatttttcctattttcttccaatgtttgtctatatatgtatacacacttttaaatgttattgacatagtatagctatgctttattttactccctctcccacttttctgtaagtcaatctgaaaaagaatcaatttgcacagaatttagtgttatagggaagtaatacttaaagttaatatgaccccccctttagcaacatacataactcttgtgttatgtgggagtcgggcacaaatggtaagcagcctggaaatgaccacaactttgtttctttcacatgacagcagcaccatggatgtttgctgagcttggggaacttttggggggtgaggcagaatggggaggaagcaagccacaggctgtgagatccaacagaggaaccagagaaggaagaggagaatgtcaacactggagtccctgaatctagaagtcctagagtcctggaaaagctcagataaggagcagaatgccctggaagcgctaggccctgagactgtggatgaaaaaatgccctccttggccctttcagtttctgatcatgactttagtgggtatagctaagctaacccaggcttttcagctcatttattccatttagtggatatacatgtgagtgaaatcgtgtccgcctacagctaagggaggagttaatgggcaaagctgtcacttagccaaggactcactctgcttaccttcagctgtacttggatacaccctggatatatgcagggatctgagggagtgagcacctcatgtatagatgcagcaatgctggtctgcccccttcccccttctcttatatttctgtggaaaacagtccagaaaatgcacaacccccaattacgtaacacagtactttctgtgactacagtggagtcccctccctaaacatttcccttaatttcaaattagatggtactgcctgtgcctacccagatttcttgctgagagaagaggctaaacatgaacaggatttctagccacctcaggattttcaaggttgcacctgaccctgagtgagggagcttatgctccctggagacaaggagagaatctatttgtgatctctgggctgagtatctactgtttatgaatggaaggagtagtgagatgctcttagctttgccctttttttccatctctccctattatataagtaaagttgaactttgtggttagaaagtgtgtgtgggctaggaggcaggtgaggatgaagatgggtggtgttggggccaacaaccacacttgactgatgcttttacccatagccccatggcctctgagaactgagtattccctcctttcatacagaaaccaggaaggaagctgagcatagagggagaactgtcactgagaaggtggcatgtgactggaagatgaacccttttcccttacaagcaaggataggagaggaaaggggatgaagttgcaaagtcatcttaaacacttttcttctccatatgtcaaagccaggacacagggattcataaataggcactgtagctgacttctggcagagagcacaatgggtccctaattttgcctcagtgattagatggacatttggtctgtttcctgtgctttttttttttttttttctgagatggagtctcactctgtcacccaggctggagtgcagtggcgccctctgcctcctgggcgcaggcaattctcctgcctcaggctcccgagtagctgggattacaggcacgcaccaccacgactggctaatttttgtatttttagtaaagacggggtttctccatattggccaggctggtctcgaactcctgacctcaggtgatccacccgcctcagcctcccaaagtgctgggattacaggcctgagccaccatgcccagccattcctgtgctatttcgaatattgttgttaatgacttcaaagttattaaaaaagtaaaaagtaccaaggttttctactttcacgttattcaagatcttaactcctaacttgtgtgaaaggaaagatattgaaaaattaactgatatcatgagtgaatttctaggagattcaatttgattaaactccaatattatctttaataaaaaacttgacatttcccttcatatctgagaagacacactttaccttgttgataaaattgaaagaaaaaaaacccattctccatggtcactaacagaaacgtcttgctaaatcctcttgcttatttgagggctgtggtccatcagtgactgaccagacaatcgactttctcgtgcctcagttttcctcataagaacttgggttggagccaattgagaggtaatattcccagtaaaaattaaatgcattctgaaagtgaattgactgccaagagttttgagtaatccagcacttcttctaataatcaccactcataatggaatttgtgtccttaaagttatgttattcttttcaaggtgtcactggttgaaaaccatttggccggactggaaggaagggcactagcagacatgtttgacttcctgtccaaagagctggtgagactgcaggaggagaggaggatccatgcctttgtcatgctggctgagcgccagcggcgggtacgagaggctgaagagagtggtcggcgccaggtggaaaaacagcgcctgcgggaggaggacgagatatttaaggaggcaagtaggggcagctgggtgtgtggaagctgcctagaaggagccaagtcaaaccaaaggaagctcatgacataaaatggcatttggcttttgtttatgcattgagttcctactgtatgccaggcactctacagaggcactgtgggaaactttggaggaaaaaacccagacacgatcccgtctctcctaaagcttaaataacacataatacgcacgtgtatagaattagaaactgtaatgagttccatgaaggaaacaaatagggcccagagacacattttaagccagttacttcacttgctgtgtggagcacaggctggagggaggacagagggggaacaaggcggccaggaaggagctgttgaagtagtgaaggccagagtgagagacaggaagtcgagtattacatccagtttcgggcttaagcagctggaagatgatggtattatttcgtgaggtaggaaagttgagagaggaataagcttaggggcaggggaggaatcaggaaatcagtttatatttcgtttgggacatctaagcagaggtattgtttcagtagatggatctacaagatggaatttagaaatgagggtttggccgaagatgtaaatttggaagttggtgaccagcttctagcctcctactaatctcaacacacttttcttcaaaaacagtgactgagatttagaaattattggcaaatcagaacttgccatcctttacctaatatcactaaggaagaaccagctggggatgagaataagaagaaatggaacagaggagctactatacacaaaagcagagaaaggaaaaagctggtaaaaaagcttcttaggaagataccttctaaatgggaatgatgtcagaaaacatcagctctgtctagcaagggcaagaaagggttaatatagcctttctagcctgatttaagaaccacttaggtaaaaaatgtactcagctatggacccacagattcaaatatcatccatatgttaattctcaaccttcctaattaaaatatagtgactattttccatcctacttccccagcctccattcagattctcttgaagagaaatatgcttgcacataaattataaaccagaaatgtaatatttaataaatttccaaaatatgcatctagatagtgagaaacacagatataaagtcatcgactcatctttaaatacatataaattttgcaggcacatacatgaggacatatttacaaatataatctggtgtgcacaacattagcaagacatagaggaacacacatagccacacttttccttattcacatacatacacgcacaaacgtctccagaaatttacacatttataaagatatacataaacacacaggtacatatacagctatggatggaccatagtaaactttccacctctctactattacgtgactgagctaattgatccatatagatccaacttgcttcctgaataagagggtgggctctatgagagcatgaatattgtatattccctttgtgccttgcacaacacagtgtagatccctgtaactaataggcattcagcagatatattttggttggttagttgtttggttgatactgtattaaactggccattgagactctcccatagagaaggcatagggattgaaggttgatgttttacacataggtgtacagtatcatatactcagaattgtgccaaagtgccaatccacaaacaggtactgaattgttactgagtcccaggcattatctcagatacaaagctatatttagacatgaaacagaaaaatgccctacctctaaaaagctgataatctgttgaggagacagcatacatatacaggcaaaactaagtatgccacagttgatgcttaatctttctatatacatacacctgtaaagcgggcaaaactaaactactttgtttatggttacatacctaggtagcaaaattatagagaaaagaaagtgtttactatgaaagtgggaaggtgctgtggtaaaggaagaaaccatggtggccttctgagatactggcagttactataatacatggcttctgactttaccctaattcattacactgtacatttatgtgctctgtactttttattttgttttatttttctaatctctgagtttgcttgcaatgcacttttaaaatctgtatcctatttcatgatttcaagtaaactttaaaaagaagcagtcaagggctggtatgatagttcaataaattcattagagacccaggatccttctagctttctgctcttctgctcctaggtcgtaggccttctggcaatttaagatgattgctggtattccagcattatgtcctcatgaaaggagaaatgaagagagaaaaaaggaagccaggtctttccctttaagaatcctttctttggtcagaacgtggtcatatgggcaatccagctcctgtgggtgctgggaaatgtagtctttattctaggcacctgtttccctagctaaaatccaggggttctattatgtaagaggaaggagagaaaggacactgcagaatacctcctagtctgtgctacagttagatagtttgaccaagtcacgttgctggtaagaacaaagccaggatttgaaccagcgttattgactctgaagcccataatccttcagcagtgctgtcttgcctgcctgcccaataagatccataattctgaaatgggctaaatgggtgtgggctgcccagagtgagtaggtaggtggatgagaaacagactgatgagatgctaaagaaaatgaatgattagtgaagggactgttgacttattaaatgaaatatatgagctagaaaaagttaaccaatgtttgtgtatttttcttgtgttgtttacaacagcatacctgttttagtgagggtattattgttttttgcaggtggttaaagttcaccatagtactataagctcctacctagaagacataatactgaataccgaagcgaatactgcagaagaacaagccagggcagaaatagagaagatggctgagaaaatcaatgacattgcttatgaaatggaaagccggtgtgtatcaagagaacagattgtagaatggacagcccatttgctggtactcatatatattttttcaagagcttacaatttcaccaccaagtagaaacaaataactcatacttcagcgtccattgttttattaacattaactcttgagaagccaatatgtgtatgcctccgtatgtattctcagttatcctctgcaatctggattactctcattacttactttaagaatactcggaagcatgaaaacaatgtgaatacgtgtgtgcaacattactgggacttcatcccaaggttgctggcttctatgtataagctgtgtttccaacattcccttcctggcaggcagggtaactgaaggacagggtcaaatccaaatttttttgtggagttaaacaaacttgccaggaatgtgatatttcagatcacttaatcaaggaaaaggtgatggtggggtttgaatggagttgcttacacagcaggaaagcataaatcagcagctcaagtgaaaaaaccaaagaaataattcaatttgttttatattttttagccgaacctatcttcagtcagaggagattgttgctgagttggtttatagttttctgatcccagaggtgcaaaaatactttgtcaaagaaaaaggtaagccaatgtaaatgctttactttaggattttttaaagatgtaaattattttcaatatcccagagatttaaaattaaacagagggatgaggaaatttctaaaggaggatcactgagttttcttatttcagagcttgtcaggttctcttcatgctgcctgattctagaatataatcaactctagtacagatgggttgtagttctaataagagtgacagtatcaaaatccaaaccttgtttaaaaggatgttcccaagttttcagaagagctgtatttttttatttatttttttaaaaagcataaaacagatattgagcatataaaagattttcacattgtagcagcctttcagaggcaggacacgtgaaccgtgaatgttaaaaaggaggggtgctagaaaggtctaagtctaccctgctgctctgcctgtaccccaaatagcttatttctgctggaactccatccaagtataaatatcctaatttatcatttgtcaccggtggcatgtttttaaagattgatgcttttagtcaatagagaaagagaaaatactatcttaaacagaaaaataagattcttccatagctctgaggctgctgatggcaggcttgatcctagacagaggggtgcaaccaggagaagaccagtatttaagtgaaatagcagctcagaagtattgaaaattataccggggaattccagatgggcttaagcagaaaaatgcttaacatttcaatttgctcaatcagggataaagaaatggtggagttctaacacatttggagaggacaaagaaatacctgatttttccattgcatggttgtagtgtaatttttaaaccagtaccccctaaggataagcatttagtttgtttccagtttgttttcctgttactaacagtgcttcaatcaatatattttacacatatcctgaccatgcttctgagagtacattcttaacagtgcaattgctgggatataaggtatatgtattttacattttgatagatagtaccaaatttccttacaaaaagattgttctaccaatttgatattaccaaattgccccacaaaatgattgttgacttgcatcaatagtgtatgatagtgcttatacaaaaaattaattttcagatcaagtaatatatttctgtgtcacattatgttataaaaggaccttatgttttctaggaccttaagaaaatatgcaactctgttccacttctcctgagttcaaagtgaggccagcctgcttcaaagccattacacccttggttgaattccaccctaggattgaaagagaggaggaaaactgggtttaatatttactagtttgtggccaggtgcagtggctgaagtctgtaatcccagcactttgggagtctggggcgggaagatcacttgaatccaggagttgagaccagcctgggtaacacagggagacccagttactacaaaaaatattttaaaattagctaggtgtggtggtatgcacctgtagtcccaactactcaggagactgaagtgggaggatcacttgagtgcaggaggtggaggctgcagtgagccgagattgtgccactgcattccagcctgaacacagaatgagaccctgtctaaaaaaaaaaagaaaatttactagtttgtgatcccctctcccatgttgggagtctgagttgaggatttggaggaagacttgagctaacggaatccagtggaacttatctatgggcaagttgaatgagtccttagcctcttccctttatatttttgccaaatcaaaaaagccatatgaacagggagcacactaggacctttttctctctgttcaaatgagaaccatatgtattatatatacactctttacccaaaattaagatgataatatatacagacgattttgaggtatatcactttttgaaaagccaatggatcagaaagaccttaaagatacctgtatatagatataaagtaatagtaactgccaaattttaaatgcatgctaagttccaagaagttcactgaacatttttaaatgtacactatctcaatttctttcaagagttgtaggtatattctcatttttcacttaatggaaattagctcttagagacatatgacttgcaaatttgaaccatggtctatgtgactccaaagcccccactttttcaaccatattactgtgaagtgctaaaaactgctgagtgaattaccctatctaaactacctgatacccaaacagcaaagaatccacagtacttcttgcggtcctttactagctatttgactttatgtaaattacctaatatctctgtgtccatgtttcttcttctgagaatgcggatattaaaatactatcttctaggaggattaaatgaataattacatgtgaactgcttaaaacagtacctggcacaaagtaaggacaaatgctaactgttaacatcatcatcatcactactcctttccaagggcttaggtgcttaccctgatagtgaatattcttagaatttggagctaggactatgttctaaagccatgagctcataaactcatcatcaatcagtaagtcccttccacattaagaactaaggctcaaagagaagtataagactaggtctttatatttgtaagttacttacactctagatatcaaacgaaatgtaactcacatgaagtgcttcaatgttgaataggttggtacaaactcaagtgcggtaagtggtaaatctgggctgatgtagtcagaggagacttcctggaggatcttggacatgagctttccaggttttagagtgcaggcattccagatgagggaaactgctgaggagtggaatggaggcaagcctggtggaaaggagtatgactgggctgaaccagagagtgggaacagagggagcagaaagaaattagatttgggttgggttttacctttaatttgcaaaattatttctatcatgactctcttgaaacatttgggaatggttttgttcagactttcagaatgaaaatttttctattactttggcacagtgaggaacgcacagcggaaacatattcttgcagcccatcagatcatccacagttacacggaaagcatggttcaaaagaaattaactgagggagagcaagatgaggcctcaaatgctgccatgttacttgagaaagaaactcaaaatgagaacaacagctaaggtgagtttgattttccaccaggaaaaaaagcagagaaaggaagaaaagcggcattgttcagctttgtgctgtgctcaaacaatcataatgtgaagattgctgtttaagaaatggaggacttccacttaaattggcacatttcctctagtttatgttatctactgttgagattattagaaaattagagttgatattacagcaattagactcttgtgatacaaaaaagaggactctaaattatttttatgggttcttttagcatgtgtgtacctcgtcaaatgaagctatagaatgtgtcagtgttacatataaacaatcttgttcttatggaagtagacaaggtatgccctaatgcattgtgctagctgtaagcatggcatgagacacagagcctgcccaattctagctcagacaccttctgcagtgcccacaaggggttggtcttgggctcaactaaaggctgtcatactcatgagactaatacagaccatatttggcatgaatgtacttagaaaaatataagacaggaaacagcttccagcaaggcaacatcagacatttctcttcctgtaggagcccttgccatacccatgcagaacacatagctgttttctttagtccttagtttacggagtgcagatacaatacaaggaaaagaggttcacaccgggtgggtacaggagctgccctggcgtaaaacttcacaccccaggggctggaatctcttgtaataattccataggcatagcttccagggtccccaccatggatttgcccagctacaaaagtcaacatactcacagaaactcaaagctgtggttttctattaggtatacattcctcccagttcagatggaatttaccaatcaggggtcatttttaagtagttcaaattgcttagtaacacagttgacacatatcaccttatcaagttactaggagaatagagctagggagtcaactgaaagtaaaattctcatgagaaggggaatggagtgaactttttgcttatactttctccctcaacccttttgtggtagaggcacatctgctgctgttttgccctgaaggtataccaaccatcaggttggggagagtactggggctagggagaaattttagtttggcattcagaagttttgtatattgtccagctctgccaccaattgtataatcttacacaaataatttctctacttcagtccttggtccaatagaatggaatcttaagtctcaatcaaaaggaatcatggaaggagggttgagatgagagggaaggtaagaaatattgcagagagaaagctaataagtgactcttaaatatcaaactgtggctgtaaattacagcagaaaaacttttgactttaatagtaaaataacctctgaaataattgaaaatataaaacatctattacatgtaatgttatatattgtctataaaatgtaaattcaaggaccaaagcatttggctaccttattattgtgataaaagcaagccttaaggttggggtagtcatttttctgacatgcaaatttaataagattaataatttacacaatttgcattgaatgcatctgcctttacttctgattatggtacctactctatgacatccatagtgacctgtgaaatcaagccagaggagaaaaaaatcatcttctatttatacttagtgaaagtaaaatatatttcattaaagcctatgtaaagcatatatgataattataaaatctagttgcagaaaagtctagttgtcaggctaactacagacactcaacaaagatgaccaaccaataaattaaatggttggaacatgaagctaagctgtccccaaagtatatcctccctcttccttcttgcagagggaagcagagaatgacagatgtgagattattcaatgatgtctagggaaaggggcagtagtcatgggccactgatttaaaatacatatttaaaaatacatatttttaattagcttgaacagagagctaataaagtagtgaagaatttctgggccaagatctaggagaagatagaaatttagagggttgggtctggcatttggagctacttttttcctggaagaatatgacaattctagaaaatgtggctgaaaggctgaggagtatttttaaaagctttgcaaaacaagggggacaaaaaacttgagtcaaggttggggccctggtaaaccttcttcatttgggtagggactctaaaagtctatgccctagtggtaagggttaactggaagtaaactatccctggcatatgatatagtttagcttctaatcatctgagtgattttaaaaatctcaatcccagaaattgaacttaacgagatccttggtttctattgcttcaaggaacctgccagaaaaaaaatgtaaattctctttacagaaagttaacattattctagacctctattttcacaatttctagaacacaatcaagaatattcaggtacgtgaggagacatgacagtctgaacaagtggcaaaacaatagatgatagaaacagacctaaaaggatctaaaatattggaatcgttagacccagactttattttttccataagttattggggtataggtggtatttggttgcatgagtaagttctttagtggtgatttgtgagattttggtacacccatcaccagagcagtatacactgcaccatatttatagtcttttatccctcatccccttcccactcttccccccaagtccgcacagtccattgtatcattcttatgcctttgtgattagacacagtctttaaaataactatgttgactactgtggacttctatcctccagaactatgggaaaatacatttctgttgtttaagccatctagtctatggtgtttggttatggcagccccagctgactaagccagattttggtaccaggagttgggtactactgtaacaaatacctaaacatgtgggagtggccttgccactggttatgggtagaagctggaagagttttgaggtacatactatatatatggacattgagggtgattctggtgagttgtcaggtggaaatatggaatatgttattagaaactagaggaaaggtgacccttattataaaatggcaaagaccttgactgaactgtgttctagtgttttatggaaggaagaacttgcaagcaatgaaattggatatttagctgaggatatttctaagcaaagtgttaaaggagcaacttggttcctcctgactgcttatcataaaatgtgaatggcaagagatgaattgaagaaggaaatgttaagcaaaaagaaatcagaatgtgaagatttggaaaattcttagcctatttatattggaaaaaacgagaaagctctttccaatgtgaatgctaagggtgggttaacagacatttgataagtgtatgggatcatatgagcagaaacattgcaggatgaagttaaggaagcctattgattggacttcttgaattagacaggatgggatgatagaactattcagctgcaaacatgcactattcttcaagaagaaggaaaaatgattccacaggagatccagagatcatcagggccattgtcccagtttcaacagccaggtggctttcaccatgagctttggaagaaggaccacccagtggaccccagctcagcagagctatggggtgggaccctgggtcagcagagctacagggacaggacacttacctagagccatggggatggggcattgtagagtcaaaggggcagagccatgggaatgatgttgccaccccagtgggcttagaaagcaagacactaagccaaagaagactatactcaagaattaagatccagtggaatttgccttgccaggtcgtggacttgcttaggatccatcacccatttttttcttctgatttttcccttttggaaggaaatatgtctcctatgcctctcccaccatagcattttggaagcacatagtgtggctggtttcacaggctcatagctggagaataattttgcctcaggacaagtcatatcttgagtctcacccgtacttcatttggataatatttatgagactttgaactttagactttagagttgacatgggaatgagttaagatttttggtattgttggtatagaatgaatgtactttgcatgcaagaagaacatgaattctacctggggtagaatgcttgtggattgaaatgtgtccttgaaaatgcgtatgttgaagctataacccccaatgtggtatttggagacaggaccttagggagagaattaggtttagagaaggtaatgagggaagaaccctcatgatggggttattgcttttatgagaagagacatcacagtgcttctcctctccttcttccactccccctctgccattctccctctctctctcttcctttctccctctcttcctccatcttcaatgtgaagacacagtaagaaggtggccatctagatgacaggaagagaactctcaaccaaaactaaccatgctgtcaccttgatcttggacttgtagcctctagaactgtgagaaaagaaatttctgctgtaagctatccaatctatggtattttgttatgacagcctgagctaagacacttactctgttcacagggtaaatgccaatattgaaaatttcaagagaactggacataataaaaatgatatagcagatttgaagaaaatagaaattccagaatttaaaaatacagtagcaaaagtgagaaactcagtgaatctctcctgagagatatttagaaagaagcacagaaagacaaaaggatagaaattacagaagagagagaaggatagatttagaatagcttaatgatttagaaaaggagaaagagtgagtaggcatggaccactgattgaagaaatttcactactaaaggaaggaataatatgttgggagatcatatggaatacgaattttccaaaaacgataaaagacttgttttcaagaagacttcttaaccctaagcagaataaataaaaagaaaacgatacctagatacaccttagaatactaatactgctgaaagccaaaaagaaaaagaaaaacctttaaaagcattcagagaaaaacgataaattaccttcataagagcaataattaagctgacagttgacttctcatcagaaacaatgaaagccaaaaagatggaatgatatgttcaatatattgaaatagtaaaataaagtaggattctaggcaaacatattcttcatgcaaacatattcttcaagaatggcaacgaaagacattttcagacaaatgaaactaataaaatttgtcactaggagatctgcaacacaagaaattattaaagggtactttttaagcagaagaaaaattatcccagttggaaggttggaaataaatttaaggacaggtatgtggattggcttattgactgcataaaaaaattataagaaacagcaataataggagcaatgcagttataaaacaaaagagtaatatataagtcagaagagggctaaatggattaaatttttctaaggcacttgcattgtttaggaggaggataaaagtataagttgacattgataactcaatgatccatgacaactcaaggatacattttgtaacctctagggtaactctgaaaggataataaagagatatatgacatctaagctaacagaagaaaatgggactaaattttcaaaacactcaatacaaaaagtggatagaaaggagaaaaaaggaaacagaaccaatagaaagcactgaataaaatggtagatgcaaaccaaattttatcactgactacattaaatgtaaatagacaaaatattccaagtaaagtcagaatttaccagactgaataaaaatcatactaaattatatgctgcttgcaggaagcctatataaaatctaaatatacaaatggttgtaagttaaaagattgaaaaagataccataaaaacaccacccatagaaaagcagatatagcaatattcatatcaaagaaaactttaaggcagaaagtattagagaaaaagagggacatgccataaagataaaggtctaatttattgggaagatataatgtcacaatttaaatatacttaatagcacggcctccccctaaatgtagcaaaatttaacagaactgcctggagaaatagacaaatccacaataattctgggaaattttaatctttatcaggaactaacaagcaagtggagagaaaaaacatttaaaaatgaaatatttggctgggtgcagtggctcacgtctgtaatcccagcaatttgggaggccgaggcaggtggaccagttcagctcaggagttcgcaaccagcctggacaacatggtgaagccgtgtctctaccaaaaattaaaaaaaaattagccaggcatggtggtgtgtgcctgtagtcccagctattcgggaagctgaggcaggaggattgcttgagcccaggaggcagaggttgcagtgagctgagatcatgccactgcacaccagcctgagtgacagagcaagaccttgtctcaataataataaaaataaaattaaaatggaatattttagatacataatttttaaaaacttggcctaatggacatttatagaatattacgcccaacaactacagaatgcatattcttgccaagggcagagggacattaccaggggaaagagaaaccagaggagctgtgtgggctggcctgatggattggggtacagaggagcccccagagtaaggccaaattttcccatataatgttagctttaggttttcggtagatactgtttttctgcttgagaaatgtttgaatatctcttgttatttaatgagttatgtcagtaataaaattcactcagttccatggacttaaccattgacacttctataattttttgttttttatgggtttttatatatgtgtgtagtttgtttgtttggttggttggttggtttttggtcagaaagagatgctgaatattctgacttgcaccatcatactgacattcagtgattcagagtggtaaagtttcagtgtgacttttttccagctcagggccaagattgagatttttctaagtaagaacaccatcctcagctactgttacagaacactgaatggctttggaaattggctattgctgcagacttggtaatattttttaatgaatctatcctaatgttgcaaggcagcaaaacttacatgcagagcttatgctatagtaaagtcccttcattggcaactaacattatttgaatcccaaataatgtatttcctatgctatgaaaagttaaaacaagaaggaagatctccattcctacatatatttgcattggatatattttctgagcctaaactacttttctagtagcatttttggaccttgaaacaagtgcaaaggaaatttcaaaattatttatctgcaatggaagcatgttcatcttaccttcaagtggaagtagttaatctgtattgtaatgacctgctaaaaagaaaatatcaagagaagaatctaatagaattctataaatgccttccaagcaataaatatggatatttatataaaagtatataattgtggatggataccagtattggccatactgttctgaatgaaaagacattttcaaagatgagatagggatgagatgagatagggaaaaatctcattttcaaagatgaaatgagaaagaggaaaatctaattacacatcactattaataaatgaacatttgcaatcaatttcaatgacttgaaccgaaattaagcaaaatgttattcccccaaataagaattccattcctttcattaagataactatattacagaaaactatagtcaattattagtagtgtattttgaattttataaaaaatgttgtgaaaatttgttttctcttttgttaaatgagtatccttgattttgtcatttggctcacaaaacctaaaatatttactattaagcccttttcagaaaaagtttatcattccttactctacagcaattacaataaagtagaactaaatataacacatggaagaatctcacaaatatgataagtaccataataagccaaatccaaaaataatccacagtatgaatttatttatataaagttcaaaaccaacagcattaaactatagtgtttaggaatgcatacttagaaagttaaggtgtaacaaaatgcaagaaagtgactactgtaaaaataaaataaaaatcagaatagtgattacctttaggaggtaaagagaggattgtgattgggaaggggtaaatgggagcttatggaatactatttcctgacctgtgtgatatttacacagatgagtactgtacattaatttattaggctgcacattgcttttaggtactttcctatatgtgtcatattctacagttgaaagtaatacaaaaacatatgaaagtataaaactcattggtaaaagtaagtacacggtcaaattcagaatattctaatactgtaatgatggtgtgtaaatcactttttagtatgaaggttaaaagacaaaactattaaaaataatatctacaataatttgttaagggatacacagcataaaaagatgtaaattatgaaattgaaaacacacgtgttgaggagggtggataaaaagtgtagagttcttgcatgcaatcaaatttaagttgttgccagtttaaaatagcctattgtaactataaggtgttttatatattcctcatggtaagtacaaaacaaaaaacctatattaaatacacaaaaggtgaagagtaagaaatcaaggcatggcgctagagaaagtcacctaattacaaaggaatacagcaagagaggaagaaaggaataaggacctacaaaacaaccataaaacaatgaaccagatgatagtagtaagtctttatcaataattaccttgaatgtaattagattaaattctccaattcaaagacatagagtggctgagtggataaaaacaaacaaatgagacctaactatgtccagcctacaagagtctcacttcacagtttaaggactcacatagactgaaagtgaaaggatgaaaaaagatactcaatgcaaatggaaaccaaaatagaacaagtgtaactaaacttacatcagataaaataggttttaagtaaaaaactataaaatgagaccaaaaaggtcattgtgtggtgataaaggggtcgattcatcaagaggctttaacaattataaatatatgtgcactcaacattggagcccctaaatatataaaacaaatattaatagatatggagggagagctagactgtaatacagtaatagtggggacctccagtatcccactttcagcaatgaacagaacatctagacaaaaaatcaatagagaaacatcagacttacactacaccttagaccaaatggacctaacagacatatatagaatattccatccagcagcagcagaatacacattcttctcaaatacacacagaacattctccaagactgatgactgataataagcctaacaaacttaagaagattgaaattatagccagtattttttccaaccactgtggtatataaaatagaaatcagtaacaggagggatttcagaaaattcagaattacatggaaattaaacaacatggtcctgaacaacaagaagtcaaagaagaaatgaaaagggaaattaaaaaaaaaaccttgaggcaaatgaaaatggaaacacaagacatagttatgggatgcaacaaaagcagttctaagagggaaatttatagcaatatgtgcttgcatcgaaaaagaagaaagatctcaagtaaacaacgtaatattacacctcaaagaactaaaaaaagaacaacaaatgaaacccaaaattagtagaaggaaagaaataataaagattagaccagaaataagtgaaatagaaactagaaaaataatagaaaagatcaacaaaactaaaattcggtattttgaaaagataaaattgacaaacctttaactagactacttaaggccaaagagggaagacttaaggaaaatcagaagtgaaagaggagacattacaactgataccacagaaatgcaaaagataagactactataaacaattatataccaacaatttggacaatctagaagaaatggatgtctagacacatgcaacctatcaagattgaaccatgaagaaaatagaaaatcagaatagaccaataataagtaagaagattgaatcagtaatgaaaagactctcatcaaagaaaatcccaggcaggacccaatggcttcactgctgaatcctaccaaatgtttaaatttcagtcttccaaaaaaattgaagaggagggaatacttccaaactcattttacaaggttagcattactcttgtttcaaaactagacaaggatactacaagaaagaaaaattacaggccaatatccctgattaacgtggatgcaaaaattctcaaaaaaagtaacaaactaaattcaacaaattaaaaggatctttcactatgatcaagtgggattcatcctacagatgcaagaatggctcaacatacacaaatctataaatgtgatataccatattaacagaataaaggacaaaaatcacatgatcttatcaatagattcagaaaaaaaatttgacaaattcaatattctttcatgacaaaaaaaactcttaacagattcattatagaacaaatgtacctcaacatagtaaagtccatatatgacaaacccacaactaacatcattctcaacagtaaaaagttgaagccttttcttctatgatcagaaacagacaaggatgctccactcttgctacttctattcaacatagtactggaagtctcagccagcacagttgggcaagagaaagaaataaaaggcacccaaattggaaaggaagaagttaaattgtttttctttgcaggtgacatggtcttatatatagaaaaccctaaagactccaacaaaaaaactaatagaaatgataaagtaattaatttacgggtacaaaatcaacatacaaaaatcagtagcatttctatacattaacaacaaactatacaaaaaagaaatcaagaaaacaatcccatttataatagctacaaggaaaaaaataaaatacttacttaggagtaaattgaatcaaggagacctgtacattgaaaactatcaaacattgatgaaagaaattaaagaagacacaattaaatgaaaagatatcctgtgttcatggattggaagaattaatattgtttaaacatccatgctacttaaagcaatctacagattcaatgcaatctctatcaaaattccaatgacatttttcacagaaatagaaaaggcaatcctaaaattcatatggaaccatgaaagaccccaaatagctaaaacaatcttgaagcaaaaagaacaaagccatcacactacctgacttaaaaatctactgcaaagctatgctaatcaaaacagcatggtactacacacacagaccaatggaatgtaatagagagcccagaaatgcacccacagatttgtggtcaattgatttttgacagaggtgccaagaacacacaatgggaaaaggacagtcttttcaataaatgatgctgagaaaactggatatctacatacagaagaatgaaattagaaccttttctccacaccatattcaaaacccaactcaaaatggattaaatacttaagcataagtcctgatactgtaaaactgcgagaagaaaacataagggaaaagctcctaacattggtctggatggtgatcttttggatatgactcaaaagcacaggcaacaaaagtgaaaatagacaaaagagattacatctaactaaaaagtttcagcacagcaaaaaacaataaacagagtgaagagacaacctgctaagtgggagaaaatatgtacaaaccatacatctggtaagaggttaatattcaaaatatgtgaggaactcaaacaactcattagcaagaaaataaataacccaattaaaaaatgggcaaaggacctgaatagacatttctcaaaagaagacacatacaaatggccaacagatacatgaaaaaaatgcccaacattactaatcgttcgagaaatgcaaacaaaagccacaatgtgatatcacctcatactgattagaatggctattatcaaaaagacaaaaagtaagtgtcgaggaggacgtgaagaaaagagaaccgttgcacattgttggtgggaatgtaaattcagtacagccattgtggaaaacattatcggaggtcctcaaaaaataaaaaatagaactaccatatgatccagcaattccacaactgggtgtatatccaaaggtaatgaaatcagtgtgtgaaagagatatctgcactcccatgttcactgcagcattaatcacaatagccaagatttgaaatcaacctaagtgtccaccaacagatgatggtatacacacaattgaatactattcagccttaaaaaaaaaaagaaggaaatcctgtcatttgcagcaacatgtctgaacctggagggcattatgctaggtgaaataagccaggcacagaaataccagcataatgccatgaaccaggtgtaatgcatccacacacatacacatatgctatcacttgcatgtagagtagaaaaaagttgaattcatagaagtaaagagtagaatgttggttgccagaagctagtgtggtagggagatgttggtcaaaggatacaaaatttctgttaggaagagtaagttcaagggatgcattgtaaaaccgtggtgactatatttaataacaatgtgttatattttgaaaatagcaaagagagattttaagcaccctttccacaaaaaatgaaaagtatatgaagtagtgcatatgttaattagcttgactgagccattctacaacgtgcacgtatttcaaaccatcatgctgtacctgacaaatatatataatctttctttgtcagtttaaagtaaataaatgaaatagtaaaggatgttggcagtaagtcaaagtaaaatggaaagagaatcagaaacggtatttatgacctccagtgtctacatatcaacttttcccaaacaattgttccatggataactgctcttcaggacattcataagcagggctgctcctggtatttgcaagacccaggtcaagaggatgaattgaagcatcatatcatatgaaaatatataaagttgtaaattaggctaacatactgttatataaaatttattctacccacctactttcacaaacatatctttgagatgataacattgaaaaacgggtaagcagctatgggctttatgtaattgaaagatggcaagaaccaaagatggtaagcttagttattattgtacatgtctgactattctgtttatggtccagtaatatttgggcaagtaatgaaataaaggcatacatggttttttaaaagttagaaatacatatgtatatatacaaacaaatacatatatatatatacattatgcctgcagtatacagagaatatttctggaaaggtcaataagaagttggtaggtagctgttgccaggcatggaaactggggactggagttcacaccaggggaaaagagatttacctttctcatgttgacattcttttgtatttttatttttttatgatgtatgtatacaacccagttaatgtacagatttttttaagtgctagaatttggaaactgacacactgtgaagtaagaaacatctggatccataaggcttataaatagcagagctgggatatgtgtggggctgtctgagttcaaagctagggctcagacacactgtatcacaggaattttttgcatgtattgatctgataatgtttctaaaagatgacataatcataaacatttgttttgctcttttttacagattgtgatttttttgtaaaagaagctgtacgaatcatcataaataattccaatagtctgcacttctcccaaggtgtgcactgctcataaacttgccagtgtgtgattcatgagaaaggagatttattttccttaaacatccaataatttaaaatgattttcaataataataatcaaatgaaaaagcttcattctcttcagtgtcttctagatgccctacttaaagagaacattttcttatgtctcatttcaatattttgttaactatgaggatgtgctggtttgttgaatcaaacaaaaggaaatgttgtggaatatttttccaagtagttttggttcactattcacaggacattggcattatctactaaggctgaaaatgtgcatattccatgactcaggattttatctcctagatatatattcaacagaaatgcatgagtatgtgcaccaacaggcatgacaaaaatatttatagtagtggtgttcacaatagtcccaaactggaaacccaagtgtccatctccatcggaacagaaaactatactttggtctgcttctacagtggcacatcaacccacctttgagctttagatctaagaagtgtgttcatgcaacagccatagagatggtgctattgaaaggcaatctgcccatcctgtgtattgacaagcatcaggattccaggaggattcttcctgattcaaagactgtcaaataggaaaaaagaaaacagtaaatgaacaaaaacatcaacatggagtccaagtaatgaatttatagaggaaaatgtatgctactctgaaaacaaagcttatgttagagaatatcttactgtaagaaacaaggaaaattgcagaaacatttgctgagtgtttttaataggagtcaaaaagaaagggtcttttcagaaactgaagtaggaaataataacagacaaggtcaaaaaatagatgcaggctgaaaagaaaaggaagtgggctaagatgggaaaaatataaaaagatttaaaatccagcaacaaaatttacacattcatttggatgcagtgaaaagggcagaaataccacagcagagaataaaattgataatgttggcaacacatttattaagtgatccaacatgggatgggaaggaatgggcaaagagattaaaatgacagaagttagctgtagatgacctatcccacagcaatcggagttcttgaagaagaaaccagaacaaataaaatagaaacaataatcagagtttaataattaattttctgagtttttttttaaaaaaactaattatacaaacttgaaagggttcaccttgccctagcaaaactaggattgggacacctttttttccccctgaggatcactgacaaaaaacactgcaccagtaaggaagcaactaaattttgttttgttctttgaaaaaggctaacctgagctaggtaaaggttatatcattcacttttgaaataaaccatcgagaacacaaaatgacaagtgagttaggttgggctgatgggatagaaggtgggaggggaatgctatacagctgggaacagcagactttctctgaagggccagatggtaactacattagggtttgcgggtctgatggtcgccatcataactgcatactcaactctgccgttgtagggtaagagcagcactcgatgacacagaaatgaatgcacatgactgtgttccagtaaaattttattttaattaaaatcaattcatgtttgaaaaaggatttaaagtagcttctaataaaggacatgtgtaatgaaacttaaaatatgatattttctttaaaaatctttatccttatgtagacttctaaaactatgttttgcatttagacagtcaaggaaaatacaagttgttatacaattctcattgactaattgaagtttactaggagaggaaaactttttcttgataccggcaatcttttacttataatggcttgagttaaaatgctccaacttttctaatttttgcttttgaaaataaaacacctatagtgacaataaaaacacacatttaaagccaagtggtcatagtgactggagccatgtagtgaattggggctagactagtacgatcaatagcgatacaaaatcacaatgaactgtctgaggcagaaaactttttgtatggatgcgtaatcagatatagtgaatcattgtaaagagaggcagtgctttagcttgaggcaaggtaaaatccaaaaggaaagtgtgcagtgtgggtaaaggatctctttaggatgcgaaactgttagcacaaaattgttgggaattctaagttcctgaagtgcagaactcccagacaaattatgttagagcctgattgttagttcaggaggagcttccactgctaactcccatcctcctactcagttctaggccactggtacccacttgagggtagagttgtatttacaaatacttggagtgattttatgcaacaaactgcacagaggattatagactcagttaataggggagtggagaatgccagcaagcccctgagttagagtgaatggccttcaactgtgcttaccaattgtggaacaaaagccagctagaaccctagcaatatagtagggttatgggatctttggagtgttgcttttctggctggatacctccgtggacagtggggcctttgcctgagttcttgtcctgtgtccaggaagaatgaggtatgcagacaagtggagggtgagcaagatgaagagaagctttattgagtgttacaacagctcagaggagacccacagtgggtggcttctctttgtaggcaggtcatctggtcgagtgttcagctctcagcaaaaaggaggcaatggagtgggtggctcctctctgcaggcaggtcatcaggatgagtattcagctctcagcagagaaggtagcgcctctctgcaactggtcattcagacatctcctctgctctggctgagtccatggttttttgatcttcagagaggggaagtgcatgctgattggtccatgggtagccatgggcaggcccaggaaaaagggatataagctccccctccaggcagcaggactggcagcccggcgcccaggcttcaggccttcttggcatgaaggtgggacttcactgaggccctgcccccttctgcccaggagctgtctgcctcccctgtcattcatggcacccaggctcttcctgcaaaggggtgcctgcaggccagtgctgagctgccctcagcaccccctcagcttccctcctgtgctcttcagtgcccaaagacaggagggggccaaggcagcagggggctggcatgtcagcactgccctgaacgtgcgcccaccctgctggcctgtgacagtgccctggctcggccccaaccttgctccacaatcagaacatgcaccaggagtggggagaagccaggcagcaggagcaggcacttgcaagcctgttagggtagggggacattccagggcccccaagagttcagggatgcctgagtctgcagccacagtttgggcagctgcagctgtgcccagcagcaggctcctgcctgctcccagtcccccaagagcaaagggaggctcacatctgcagccacggttgggtggctgaagccctgctgggagggcaaggctcctgcctgctctgtggagtgggaggccagggtctacagccatggtttgggtggctgcagtggcaccgggggagctcccaccccaactcagaaggggcggggctcctgcttgtccctagctcccaccagctccatggagggtgcagccttggctgcacctccctgctgcagccagtgtgatggcagtggcagaccgtctgatgtggccactgccatcagtagcatggaagttaagagagcaggctctggacccagactgtccggattgaaatcacagtccaagttcagtgtgtcagacaggttatttaatccctgggttatttaagccttagcctcctcatgtgtaaaatggtataaccataggttgtacctcatgaggttgatgtcgggatgtaatgaatcaatttatataaaaagcttagcaggcaacacacggtaaatacccaataagcaccagttagctaattttactatcacaaagggataaaggacaaaagagaaataggtggagcatgtttcctgcttataaggaaaacgaccacacctaccactgtataggcagtggcgcagtggatatcagtctctaacccatcagatgagtttctcggtctcatttggggaacaataagagacagagagaatatggatgtgctatcatctgcccctcccctaacccctccagcaagaaagggataggaatgagtacctcatgttctgtagaaacttgaggtgttgagaataagggctccctccctaccagatattagtgcagtagaaggaagccataagtattgcgcagaagaacttcccagaaaacttagctgcaatcttgaaggaggcaccttttatgataggtggcacatgaggaaactggaagtgaggactacagtggttcttggctgtggctgcatgcgaaaaccacctgagtactttaaaaaaaaagtgcttcttgggtttcacctcgggccaattaagatagaatctttagaaggggagcccaagcaaacggattttttttttaaagtttcccaagtgatttaatgtacattccaaattgagaatagatgacgtgtttcccaaggaaattgtccctctccaagcatttaccattcagacttactacagaagatatgtcttcagtccaggttctaattatattttctttgtaaagcataaagaatttcaaagaaaaaaaatgtgtgagaaaacattgatactggacatagtcataacacttggtacttcctcaataacacacttgatagtaatttcctgcgtaatcgtctctctcactggcgtgtgagggcagggcagcagctgtacctagtgagttcatttgttttcatttgcagtgcttagccagtccagtctctggcacctatcaatcccttagtaggtatttattgaatgaaattctacatacttaatgtttgtaaaagtaaacatgtgtgtggttttagagatcatttattatgtcttggcatattacggtatgaaatgagtttcaaggacataattctaatttataacattcattccttataaacgtttaactttttgtgattcaacttgtgaatgttattatcaaggaaccaagtaagtcataaaggaagggagaggccttctgtatgacatcctaaaaggaatttatcccatttatccttgtacaaaagacattcgacagcttaagaaacctccaacagaagtttcagagaagaagcaaaaatgttcttttcactgtttcttttatttttaataaaaattaaagatattttattaaaacatatctataaaatcagctttcaattatgtcagaatgaagaggtcagcaatactcctccactaaaaaaaaaaaccatacaactggacaaaattgacaaaagcatccagggaactagaaatctactagagatgggcagcaagttgaaaagctcctagagattcaaggagaaacagcagaaggctaattctttcccccacctcccatcaagctcaatcagcaagaatcgtagttttccagtttggagttggccaaaaacccagtggctcttctgccagaggagaaatacttataaagttttaaatttcaatatttagggtcgagaagtggcatgaaattttgtgactttgcatatactaaaagtagcaaactcagaaatgaatagggaaaggccacagctttgttagcccaaggatgcagtcccagttggggtgagcagcaaaccaaccagagtgctaatggggagatcctggaagggttgagacaagttttccacatacccctggctgactgagaatacgaaaaaactaacccagaaaaaggaaaaaaaaggagaaacataagactaaaatcaagttgggacaaatagaaaataaatcacaaaatgatacacctcaactcaactttaacatgcattaaatattagtgtattaaacactccaaataaaaggcacaggtgtcaaaatggttttttgttttgttttttttttcttaaaattgttttgaagaaaagcaaaaccaagcatatgatttacaagagacacttttaaatataaaaacagtgataatgaaagtaaataggtggaaaatgatacaacaggaaaatatttagcataagaaaactagactggttctattactacagctggcaaaaaaaaaatttcaaagcaggcagtattaccaaagataaagtaggatatctcataaaaataataaatgaaaaccaaatagtcttatccatttatgcccctaataactgagcttcaaaattcacaaagcaaaactaacaaaaaaagaagtaaacaaatctccaaagttgaagacttaacaccttcttttcaatagcatagaacaattagacaagaaatcagtaaagtttagaagattttaacaaaactacatacctttgcttaacactaatcagaacactatacccaaccacagcagaatacatattcttttcaagtgtacatggaacatttatcaagataagccatattttgagccacaaaacatctttatatgtttcaaacaatggaaatcttataaaatatgttatctgaccacagaaacaactaacttagaaatcaggaacagatacatatttttagaaaatccccaaacatttggaagttaaacagtgtatctctaaataacctttggatcaaagaagaaataacatgtgaacgattgagaaaatacaacttcaaaatttgtaggatgtagcaaaagcagtgcttacagagaaatggtagctatatgcactcatgttagaaaagaggcttaaaaccagttatctaagttcccacttaaggaagatgcagaagaaaggcaaagtaaaaccaaagtaagtagtaggagagatgttttaagatacacaagagcagaaattaatgaaacagaaagcttaaaatgatagagaaaattgacaagaacaaaattttattctttgaagagactggtcaaaaaggagaaatcacaaattatcaacatcacgaacaagaggggtatcactatagtggaagagggaatgtcactatagatcttacaggcattaaaaggataataaaggaatttttgaaaactttatgacaataaatatgatagcttagatgaaatggaaaaagtccttgaagcagaatttaccaaaaaatatacaatgataaatagaaaatctatataaccttgtatctattaagtaaattgaatttgttatcaaaaacattcccataaagaaacatccaggcccagatggtttcagtggtgaattccatcaaacatttaaggaagagataatgccaatcttatacaaactctttcagaaaatatagaggaagcagtttgcatcacattttaagagaccagtataatcatatcatctgacagagataagaaaataaagttacaggtctatatcatgattacaattgcagcattggtggtatagtggtgagcatagctgcctttcaatgattatgaatgcaaaagtcgttaatgaaatatgaccaaaacaaatcagaattccaaaaaagagagagacagagtattattctggacaaagcacatttattccaaagatgcagggttagtacagcattagaaatatcaatgtaattcaacatgttaatagaaaaaagataaaaagcatatgatcttaactgaaaaattaacacaattctacactcattcacgtttagaaattctcaaaaaactaggataaaaaggaacttcctcaacttgacaaaagcatctataaaggtgacagctagcatcatagctaatggtgaaatattgaatgtcccccacaaggatatctacccccaccacaatgctatttaatactgtattaatcgttccaactaatgcaataaggaaagaaaaaaagcataaagatcagaaaagaagaaaacagtctttctttgcagaaaacataattatttacattgaacatcctcagtaatactaaggaataactactagaactatttaataaagtcacagttatatctcatcaatataaatatatatacatacaaatatattttctatatactagcagcaaacaattagaacagcggtgtttttttttaaattgacttagtatccaaaaaacgtaaaacacttaagaataaacttaacaaaagacatggaaggcctctgcactaaaaactacaaaacactgctgagaaaaataaatgatctaaattgagagttatgccatgttcacatgttggaacactcaatgttgttttgtagtcagttctcctcaaatcgatctggcaattcaatgcaatcacaatcaatatactaacaggcattttaataacttttcaaagttgattctaaaatttatacggtaaagcaaagaatacaggaatagccaaaatggctgggcacagtggctcacacctgtaatcctagcactttgtaggggtggtgtgggggctgaggcaggaggatcacttgaggccaggagtttgataccaatctgggcgacaaagtgacaccccatctctacaaaaacattttttttgaaattatctgggcctcgtaatgcacacctagctactcaggaggctgaggcaggaggatcacttgagcccaggagtttgaggctgcagtgagtcatgatcacaccactgcactccagactgaataaccgagtgaaaaaatgtcagaaagaaggaaagaaagaaagagagagggagagagagaaagaaagaaagaagggaaagaaaaggaaagaaggaaagaaagaaaagaaagaaggaaggaagggccaaaataatcttgataaagggcaaagttgaaaggctcatgctacctacttcaagacttgctataaagcctcagtgatcaagacagtgtgatattggcataaggatagataaatagacatatattgcagaatagggaatccagacatcatctcatacatgtatggttaacatacgttttttttactaaagttgcagagctaaataatggggaaaagagagcctttacaacaaatagtgctggaacaacagaataaatgaaagaaggaaaaatagatcttgacatctacaacacaccaaacacaaaaattaatttgagatgggtttcagaattaagttaaaaacttaacaaatatctagaaaaaaaaaaaacagaatgtctttatgacttatctacaggactccaaagacactggtcatttaaaaatgacttacagatgcctgcagctcattctggggaaaggtcattcattgttatgaccaatgtggatacaaagcctaacacaaaaaggtcttgaacttttggattaggttgttcttgtattgatcactgttctcaaaaggaaagcctcaacacaagctgtctacctatatcatccccttgtacaaagaagggaactgaaacataaagaagaaacaagtcgtccactagcattggtgacatcagcaaaattgtagaataggcagctccaaactcccgtccctctacagaaatactgaaaaacaagaagcaactgtcagagccaactttgctagaactctggaaaagagtcagaagtttacagcaattaagaaagtgctgaaccaagaaaaagcaacttaaaaatgataggacatttgccagttttttaaattggggggaaaatgataggaaaactttgtggcatttttacttgtccttgccacatcccctctttgtctcagcagcagtcttaaagacagcatcccgtgttcccagtatgggaccctgaaccctggttctggagggagcagagcaggcttcaattgcaaattactggagtttgtttgtctgttctaacctattcgggagctaactgaagaacttatatgaggtatgcatctcgttttgcctaactgagaacccgtgaagagggagaagtgacaatcattgctcagaaacattgtaaggtgaatacaaaacctgcagccacctgggggcaaaagattaaggttcagacatacaatagaatgtctgaggtctgggagcaaaagccaggaagagagttcctttgggaaattagggcaattcaaaactgccagtgtgtattcgggagtttagaaagcaacatgcatgccaggacaggacgcatgttcagaaaagacctgagaagaccctaaccactggctgatctctgggctcagtacaagtagaaagtaaaggctcatgggaatatatatatatatatgtgtatatatatatgtgtgtgtatatatgtgtgtgtgtatatatatatatattttttttttttttttttttttttttgagacagagtctcgctctgtcacccaggctagagtacagtgatgtgatctcagctcactacaacctctgcctcttgggttcaaatgattctcctgcctcagcttcctgagtagctgggattacaggtgcctgccaccacacctggctaatttttgtatttttagtagagacaggattttgccatgctggccaggctggtctcaaactcctgacctcaggtgatccgcctcccttggcctcccaaaatgctgggattacaggtgtgagccaccatgcccggcctcatggggaattttaaatggcctaccaaagtgttaatagtgccccaagacagagccaatccacaaagactagaagaggagggggttttacttgttttgttttacttagctcctggcaatcaaggacagctctatcaaaaacactggctgaacacaagctaagccttcagcaatcaagacaagcaaaccgtaaggaactggaagaatctgacttccagagttaaaacactgtaatatttgaatgttcaatttttaaaaatcacaaggcatacaaagaaacaggaaaggataatgcattcaaaggaaaaaaaataaactgacaaaactgtccatgagaaagctcaaacattgaaattattaggcaaagactttaaaaacaactgtcttaaatgtattcaaaaaactaaaagaaatcatggaaacgaagaaaggaaaccaggaaaataatatatgaacaaaatgagaatatcaatacagagatagaaattataatgaggaatcaaatagaaattatgaaggtgagaagtatgataactgaaatgagaaatttcactagaggagttcaacagcaggtttgatcaggcagaagaatgatttaacaaacttgaagataggacaattgaaattatccattctgagaagcagaatgaaagagtgaagaaaagtgaacaaagactaagatacctgtggaacaccatcaagtggaccaacatatgcattatgagagtctcagaaggacaagggagagagagagacagaaattatatgtgaatggccaaaagtgtcccaaatgtgataaaagacatgagtctacatatccaggaagctcaacaaagcccaagcaaaataaacacgaagagatacaccaagatacagtataggcagattgtcagaagacaaagagaatcttgaaaacagtgagagagaggcaactcatcctgtacaagggagccttaataagattaacagttgatttcgcatcagaaaccatggaggcctgaaaacaggaggcctgatgccacttcacacctactaggatggatataattttttttaatggaaaataacaaggagaggatgttggagaggacatgaagaaattgggacccttgtacattggtggtgggagtgtaaaacgatgccactgctgtggtaaagcttggtagttcctcaaaaagttaaatgtggaactaccacatgacccaatgtcttagtccatgcaggatactacaacaaaaataccataaactggatagtttataaacaacaaaaatttatttatcatagttatagagaccgagaagtccaaggtcaaggtgccagcagattcagtgactggtgaagggatctatgatcccttcctggatcatagatgacagtcttctcactataacttcaggtggaagaacgggcatcaatcatgagggctccaccttcatgacccaatctcctcccaaatgccccacctccaaaaccatcaccttgggggttaggatttcaacatatgaattttgagtggactcaaacacctagcagttccactactaggtatatatccaaaagaaatgaagcagaagctcaaacaaatatttatataccaatgtttatggcagcataattcatagtagcctaaagataaatggataaattaaagatgctatatgcatacaatggattattattcagccataaataggaatgatgttctgacccatgttacaacatgcatgaacattatgctcactgaaataagccagacacataaggacaaatattgtatgattccaattacataaaatacctagaatatgcaaattcatggagatagaaagtagattagaggttaccagggactcaaggaagataacaatggggagttgcttaatggatggagtttctatttgggatgatgaaggggttctggatatgaatagtggtgatggttgcaaaacatgataattaatgctactgaattgtacacttaaaatgatttaaatggttaattttatattatatgtattttttaccagaataaaaaatgttggctgggtgtggtggttcatgcctgtaatcccagcactttgagaggccaaggtgggaagatcgcttgaattcaggagttcaagaccagcctgggcaacctagggaaacccgtctctaccagaaaaaaatagctgggcatggtgacatgtgcctgtaggcccagctactcagaaggctgaggcaggagaatcgcttcagcctggaaggttgaggctgcagtgagccatgattgcccccactgcactccagcctgggcaacagtacaagatcctatctcaaaaaaaaaaaaaaaaagtaaagactgataaattgtaccttataaaaataaaataaatacataaaatgtgactagcaattttaagacacttaaatatttgaattaatttattgaatacctgctctgggaattagtgttgtgtttccatttacagagacaaaacaggtctaattgattgactaaacaatagatgtaaatgtggtcagtgtttggatgtctattcatagaataggaacaatttttctgagaaatgatttgactctcagctgtttcctgtatgacctctcaatttacattttattcaagagtttctaatataatattgtggagcaaagaaacttgacagcaacagctgttgagagaaggtaactgtcatattaatatttctgggaagaggtattgcggtgttaccagattccagatttgcaccttttcccctcaatccctttatccctctcaaacattatagtgatttatgaaaatatatgtataattccaaataagttttagataattccatatataccaaatacccaattatctctttgctgtcaaagggtaatttatcctcatcatgacacttgccatcattacaagtttaaagcctaaaaatgaaaagaggtttcacacatttaagagctaactcatttaataataaatcaaaagtaagtatgagtttcatttagtagtagcatgagctagctgcagggaaggtcctctcaaggtggtcctttttcttctcttcaataaaggcagaactctattaaagcatattagtaaaaaccatatttaaaagaattactacactgaactgagcagccaccaaatgcaattggtaccaggtgatataagggcttctcctctcagggggcttataagcaactaaggcaggaagtcacagataccatattctgcagtgtaatttacaaatgaggtgaaaacaaagtgttccaaaattctaagagagacattggaattctgaccacaagtgtaatttatggagcctcagagtaattataggatctggaacagctggtgctcaaatttagtggtcctccagttgctggaatctgcgatttctgggaagttaaactttgtgtcactgcttctacttgtgataaaatgaaaccgctttcaaagagaagattcctattcctagcctttttgggtaacttctactacctccacttaaggatgaaaagggagaagtttcctccaagactgcctcatggggatcagagtgtcacctccatgctcctgccctaagtgcccctgagcacaccccagagggaggctaagagatttttgagaaagaccatgtgactggctgataaacacctattttcctcagattccacctgaatttatatcatcagtgcatcactcttttattttgttctctctgttcctctttttaaatattaatattctctggagaggggtaaaacattaaatgaattcacactgaggaaactggccaggtacaatggcttatgcctgtaatttcagcaatttgggaggccaaggcagacagattgcttgagccccagagtttgagaccagcttgggcaacataatgagacctcgtctctacaaaagaaaaacaaaaaaaaaaattagccaagcatggtggcacacacctgtagtctcaggtatttgggatgctgaggtgggaggattgctttagcccaggaggttgaggctgcagtgagccatgaccatgccactgcactccagcctgggtgacacagcaaaacactgtctcaaaaaaaaaaaaaaaaagaaactcttcaggctgatcagatctgcttttctctgatgagtttcttaggagctctacatttctggttgctgcaataggcaaagtatagaatggaggtcaaggcctcaaatttctctgacttcctagctgggcttgagagtgactctggccctcaactgagggcattagtaagctgtccttaagaacgagagtgtattttctggctgtattcttaactcatttcactatagagccatgtctgatattaacagtgcagtgctagactagagaggcctggcactcctacagccttctcctgtcttctagctgggacttcacaccacagacccaaaggaaaagagacccaaagatccctgcagaaacctgagaatatttcctttacctcagtggtttcataatctgttcttagtttcctgtttctgctgtaaataattcactatatttttaagagagagaaggtcaggcccttgtgagccagaagggatttgagagatgatgaaagctacgtatgttacccataacctaaggacttctggcaaggtggcctacctgagctggagtcatgccttttttccctggacttggagatacctgtcagtgcagaaaggcctacttttgatcttggaaataagtttcctggggtgagttcttaaccctttccagctttcccaccctctttggctttagccatggccttctgatctgtgtttctcaggggacctgcaggccccagatatagccccatgctgtcctcctaccccagagcacactgttcaggctacttccactggtactgaaatccagtatttcacttactctttttctttccaatatcctcatgacattcaatatttcacttactctaggtcctccctgcctaaggcccaagtcaactttctgtccagtgggatttgtaatccaatacctcctagccctagcagaatcccatgtggataatcagaaatgtgactggaaaaaggacagagctctatggctgtgggtcccagtccccactgctggcagtaagtccccagcagtgagctgtgtaagcaccttacattctgcgcttggttgaaaacagcaaggcaagcatccacttgagaaatgtcaacccctaggaaatcccagcctcaagtctttctcatcccttgggaagtgcaaattggatagagaagaaaccaattaaaaacaaaacaaacaaatcatacttagatattctggcttttctcaccagggctggattaaagcatgtacttcaaaataataacaacttaagtcaataaataaatgtaaggaagtccaaatgttcacctgaagacaactgtggtcattttttggcaatcccaggttctcttttctacctgtttgctcaatcgtggtctccctctccctctcttgttggggcccatgcccctgctttactgttgccagaggcttgtacttgtttgccttttaggtaggagcagttacttccactcccctcacctgccataaagcatctttataaacaaagcaagtagaagaaacacatcctggtatccaccacattcggcttttgttgattctgttcacttgggagcacctgctgctagggaataagaaggttgaggctgaagagtgaggactcttcagctcccctctggcaggacccgggagaggaaagagccctcagctggtccatcctccccactcctggtcagccttctgttctgagatcaaagtggtggggtcacattctcgagaactgtgctcagccccctcatctcacaccctttccctctccctgtgtgcctgcccccctcttacataaccatgctggtgattggcaccgtcataaatcaatactttgctcactttcacatcaagtaacactatccagggaggtggtttcaacaaaggaggaagtataaggagatctaggttcaaattaatgttgcccctagtggtaaaggacagagaccctcagactgatgaaatgcgctcagaattacttagacaaagcggatatttgccactctcttccccttttcctgtgtttttgtagtgaagagacctgaaagaaaaaagtagggagaacataatgagaacaaatacggtaatctcttcatttgctagttcaagtgctggacttgggacttaggaggggcaatggagccgcttagtgcctacatctgacttggactgaaatataggtgagagacaagattgtctcatatccggggaaatcataacctatgactaggacgggaagaggaagcactgcctttacttcagtgggaatctcggcctcagcctgcaagccaagtgttcacagtgagaaaagcaagagaataagctaatactcctgtcctgaaaaaggcagcggctccttggtaaagctactccttgatcgatcctttgcaccggattgttcaaagtggaccccaggggagaagtcggagcaaagaacttaccaccaagcaggtatggtttttctttctttctcttttgctgggggctgaccgcccttcagctccagccaaaagatgtgtgtgaacacaaatataccttctgtttgaggtcagcatcatagtgggtcgtgaatcatgttggccttgctgctgtctcctcatttctagggtggaaaaaaaaaagcatgaaaacaatcacttaatgttgagccccattactgatgctctctggtcctgcactagcctcctagaaaaatcaccacaggagaagccttaactactgcatgagttaccacaagtcacacatacaaccagctccctgttacagggctggagtccctggacccaggaaataccacctccaaggactgtgggagctggggactatgggaactgggatcaactcagtcctgattccttttggcctgctgggttagtgctggcagccccctgaggccaaggacagcagcatgacagtcaccaggactcaccacttcaaggaggggtccctcagagcacctgccatacccctgcacagtgctgcggctgagttggcttcaaaccagtgagttttctacctctactattgaaagggcaccttgtcccacagaaccgagtcttgcctgcatgtggtcagtgccaccaagtccttcttctctccacattacagcccagctcggctgaagctatggccagaggcactgctttaaggccactccatatctaggacaggtcaacagacacctctgaggccactgagtcttgactcaatgaatcagctatagcaggcactattcctctcccacatggcctctaatgatatggccagagttgaaaggatgctaagggaggcctcagaggcttatttaatcagttggttaatgggaaaaagtattttgtggtacacaaatacgctttaaaaatattttagttatgtcataaaagtctaaacctggggttgacaaactatggctcacaggctaactctggcccaccagctgtttttataaatgaagctttattggaacacagccatgcccattcgttatgtattgtatatggctgtttttgttcctacaacatcctttcaactctggccatatcattagaggccatgtgggagaggaatagtgcctgctatagctgattcattgagtcagcaaaattgaccaattgcgaaagagacagtatggcccacaaagcctaaaatattaactatctggcctttaacagaaaaagtttgccaactcctgatctaaaagctgtcaacttgttccaaaattattatggaataaacccaagacaaccacaaaactgactagactaggttttttaggtaataactttttaaattataaagtaatacatgatttcatgctccttgaaaatgagaaagcagtatagataaacctaaattcacctttggccattctgtcaatcctaatctccagtttccccaaaagtacttagtgtgatatatttactgccagaccattgtgtctgtgtgtgtgttcatctatgcatagatggactattaaacctatctgttgccatgttgttctaattctgtttttccactcaatagcaagacttggagactttccatatctgtatagagctctacttcatttattttaactgctacgtcatatttcacagtgtacacttcttttatttagccgttttcttttcgatagatatttaagcttttccaatttttcagtcttaccaatgaacctcactgtgtttgtctgcttctagacatgtgcacgtattgcactagaggaactactaagacgttgaattgccacatcacaggatatatgtggttcaatttttggctgccaaacagccctccacagtacccgaactgactgtactcccaccagcagagaaggatagttactgttcttccacactccaaacaatgcttgctgtttattcagtattttattattttttccattgaattagtgcaaatgacaacccattatttcaatattttaatttccctgattattaatgaagttgagcattctttttataggacccctcttggccattgtatttctcttcttaaattacctattcatatccttagcttattttatgtcggattttttttcttctttgtaggagttttttatttattctcaatgcaaattatttgatatgtgtgtaatattctctctaagctttgtttaaatcatactttttagccaacagaaatttttactattattgttgttgttattttgatgtagttgaatctgttagtttccctctttctggattttactctttgaggctgatttttaaaagatttctcaacttccaaaattatgaagctactttggtgcaccttcctgtaatacttttatttaaaaagttagtctttattcacctggcacttattgcaatacattatttcaatactatttattgaaaagtccatctttttcctatttgtttgaaatatcacctctatcatgtactaaattcccacttacacatgtccatttctgtgtccttttgtatttatttcctattcctgagccaatttccactataatgtttaccttttctacttgattttttcccccaataaatagaaaatctattttgtgttttgatattttgcctagttaccttatggaattctcttaatagttataaaagcttatcagttgattcctttggaatttctagttagacaaacatatcatctatatatagtaagagttttgctccttcctttccaatctttacaaaccttaattttttgtgtcttattggtttttctttgccattcagcataatgctgagtagtagccatgaaagtagatagtctcagaagtgatgcatacagttgtgtgggttctatactgcacaattctaggagatactctttacaaacacttagatgtcctaggaattcttgtcatgttcctgatttccatttttattttgtactatgaactcatttggaaacttctctttgggacttgttgagattgaaattgttttcctctagaggatttatttttgcttttgccaggaacctgaggacagaactaactgggaccaccataagcttggggtctactggccacacaaatagtgagaatcctgacccaaacttacttgattgcaggcctgttgttaagaatttcaaaggagacttttctttttgctctacccagagccaaggctgagaaggcctgggatagacctgtctccctccatggtttctactgaggatgtcacccttaggggatcttgagtttatagtctatgatctggttaggctccaggctttgtctcctattctaccattaaaatccaggccccaggcctacaggagtccagaaaactccaggatgatcatgacttccctttctcatgcctctggcttagcataatcttataaattttggcctcttgagacttcctttactttcctaccagctcaatcctgcatgaaaaatgacattcttaaaaatttagtatttctaggtgctgcataccaggaggattttctgtaaccaacttctccatcatagtgccagcaataaaatctttattttttattttaatgagattgattctaatgcttctccaataagatacctagtaaaagtgtttagtaactattccatatcaagttagtgaagctctcttctattcctcttggttaaccaagaattttaaatcatgaatgaatattgagttttattaaatgctattaagcattgattaatttccttatcatatctccatagttaattatatagctcatcccaagggtgatagaagcagagatgatccaatagccactaggacccttggaatgcagacccatgatttttccattaaaaagaacaataaattcagggaacgtggacaacattaattcaaattcttagtgtggttgccacgttctgtttgttgagccatcagactcttgccctcacacttcagatattggtgtcctgggcacaacctggggaggacaggaggaatgtgtagggaacctctcttgcatacaggggctttttaggtggcacaatttgaagggggctgggaaaagttccctgcaacacctcctgaacctctttgaaacatcgatataacaaactgaatatccaactggaaattgacataaagagacatatccaaatccgtcatgtaatgtttgaaataattttcctggatctgtgtaagttccaaagagtcaaactataaaaccacaggcaacactggcactacacatgcattgataagacataggcagttaactcagaggccactgtgtcctgttaaatattggaagagggtactgtgtgtacttatgacctgggctggtgccagctctcaaccctgatctgtgtctagtaaccttctgacctcttggatctgatgaccaagtcccaggaagcataaaggccaattttcatttatggccccctgaagagagcagctgacttctctttcttgaattcataaaccgtgactttggctatctgagtttcctctggaggcctgccccatgccagggccaatgaggaggcttttgttaataatacttgatttgtttcataaagaatttaaaacatatagcctcattttgcccccatgaattctgtgaaaaaacaacttgcatcatgtatctatttacatgacaggaagaatcagaataagggaaaagaaaagatgttctggccaggcatggtggatcatgcctgtaatcccagcaccttgggaggccgaggcaggtggatcacttgaggtcaggagtttaagaccagcctggccaaaatggcgaaaacccgtctctactaaaaatacaaaaataatccaggtgtggtggcacacacctgtaattccagctacttgggaggctgaggcacgagaatcatttgaacccagaaggtggaggttgcagtgagcagagatcataccatggcacttcaacctaggggacagagtgagactgcctccaaaaaaaaaaaaaaagttccgtcattaattgacttcatgaactggaacacaccccagagccccagtttcctcatttgcaaaagggataataagaactgccctgcccccgactcccttattcaacttgggataagccctgccctgccttcctcacaggcaccttgacatgaagttgtaattttgaaatcattttgtaaacagcaaaacttgtgcaaatgtgagttaaattcaccaaacgtctcccttcactgaacaacgtcaatggttttataggcatcacttgcctgcatcttagaaattcagtattcttatattacattccccttacttgcttttttctctttatcctctggccagttctgctattaatatgtgtgtgtgtgtgtgtgtgtgtgtgtgtgtgtgtgtgtgtgtgtgtgtggtgtgtatgtgtatcttggagatagtaggatgattatatatatatttaattatgcgtgtgtgtatatatatgtgtgtatacacacataattaaatatatgtaatcgtgtgtatgtatatgtatgtatacacacacacataattaaatataatcctgctatctccaagagtttctatcccaaagattatgatttttgtttttttatccatttacccccttttacttagactctgttgcttcaaattcaagttgcccactcttctcttcccataatctcagtgacctggttccaaagcttgtgctttgactcatttgaagactaaatgtatctgtatgtcctccccacatccttttcctgggaaggaactatctcaccctcaaagtacattgactttttaaaaaattattattattattactttaagagaccgggtcttgctgtgtcacctaggctggagagcagtggtatgatcatggctcactgcagtctcgaactcctgggctcaagtgatcctcccgcctcagccccccagatagctgggactacaggtgtgtgccaccatgcccagacacttttaaaatttatttttggtagagacaaagtctcatgttgttgcccaggttcatctgaaattcctggcctcaagtgatcctcctgcctcagcccccctaagcattgggattacaggtgtgagccaccatccctggccatcattatacaaatttatttatttattttcatttgattgagacaaggtgtcattctcttgcccaggctgcagtgcagtgggacaatcatggctcactgtagccttgacctcctgggctcaagtgttcttcctgcctcagcctcccaagtagctgggactacaggcacatgtcaccacacttggctaattttttatttttttgtagagatggcatctcactgtattgcccagacttgtctcgaactcctggcctcaaatgatcctcctgtttcagcttccctaagtgctgggattacaggtgtgaggcactgtgcccggcctgtatattgactttaaacaacaatttataatgtgagtcatttcacatatctctttgattatttattttatttcctagcaccataaagttgtttttattgacaagatcatcttctccatgccagtctgtttgtgtactgccaattttctgtctggttagttggatttccctgctactactgcaagtgtggactgcagacccatagcatcagctcacctgggagcttgtgagatgctgaagctcagacccaccacagacctactgaatgggaatttgcattttcataagctcctgggtgatctgtatgtacttgaaagctggagcatcactctcttagattgtaagcacaggctccaggttaccttaaacgggggcacttctgaagcaggcatgggagagaaggaaggcaaaaatctcaattgccagggccctgacctcctagagattaaaatgtagttcagaactcaggttgggatcaaatgcactttaattgacatggttatctttttcttcctgattgtagtgcttttaactactgtattagtccatgttcacattgctgataaagacatacctgagactgggtaaattacaaagaaaaaaaggttcaatggactcacagttccatgtggctggggaggcctaacaaacatggtggaaggcaaacggcaagtcttacatggtggcaggcaagagagagaatgagaaccaagcgaaaggggtttccccttataaaaccatcagatctcatgagacttattcactgccatgagaacagtattgggggaaccgcccccatgattcaattaccttccaccaggtccctcccacatatgtagcattatgcaagctacaattccagatgagattttggtggggacacagccaaaccatatcaactattgatgttactttcctttgtttcctttctttctgctgcttctcctcctcacaacttctgtttcctcggggcccttcctgcttcacagcttccctgtcctgccttctctctgagtgcactgtggctgccatgcacagggcaggactgaggcaccccaaccagtctactattttggcttccttttcaatttaaattcaatttaaatattatttaaatatttgatcaacatttatttggtgatgttctttttttaatttgtaaaatatacagaaggagcaggattgaaaaattaattagttctggtaaaattcaaataacaaattttaccatcttaagcatttctaagtgtatagctcaataatgtgaagtatgttttcatcgttgtgcagccaatctccagaggtttttcatcttttaagatggaaactctacccattaaacaactcccattcccctcaccccacagcccctggcaaccaccattctactttctgcttccatgagcttgactactatacctcatatttgtctttctgtgactggcttatttcacttagcataatgtcctcaaggttcatccgtattgtagcatgtgttagaatttccttttttttaaggctgactcatattctattgtagtatgtcccatgttttgtttatccattcatcagttgatgaaatttgggttgcttctacattttgtctattgcgaatagtgctgctgtgaacatcagtgtacaaatatctcttcaagaccccgatttcagttctttttggatatacatccagaaatggttgctgaattatatgataattctatttcaattttctgagaaattgccatattgttatctataatggctacaccatttttacattcctaccacctgagtccaaggttcccatttgtctacagccttgccaacacttgttattttctgtttatgtgatagcggccatcctgaatataaagtgatgtttcattatggtttccctttgcatttgccttatgattaacgatgttgagtactttttcatgtgcttgttggcaagtgatgttcttttaaatgtgtactatgttctttatggtcaaaataaataatttattctgtgtaattttccaaaccacacaacttcttggaaggcatgtttaagtgttcacataataaaacagtacatttcttccttgcaaacagccctacaccacatatttttccatttctggctctgtctgccaacttcaatgggctgtcctcagggttgggttggctggagtggccctgtgtgacaggcatgtgagtgtccctgagcaccgtacagatactagtctgcattgtcaaggagtgttttaagtctccacctcagggtgatgactgctttggtaggaaaggaggcaatctaaaattcacctgatttctgattcattccaataatgttttggtgtctttgaatatggcagccccctgggcagcagtccagccagcagaccttataacttagctctgtctgtatgtctgacatccagactcactagaagaggatctaaatgggccagggaattacttgtccctgggacagagcaattacaccatccctcataggccccagaaggcctatggacctttgcttgggcaccaggagcttctctgagagcaggtttggggtgggcttggcctccagagtggcctcctcctgcaatgtcaggctagattaacatctatgagagtctcctgtacaaggagaggtgggaggctgtgaacactcctatgtaacaccatttgtccccttgtgtgattgcttcaccaatgttgacagctcatgtgacacacctgtcttcttctgatggaggaaggaagtaataccattttctatcaaaagcattctttgatcatccctgtcctaaaaaaaagttacttgatgggtctcttgtcaaaatcagtgatatggtttggatgttttatcccttccaaatctcatgttgaaatatgacctctaggccgggctcagtggctcacaactgtaatcccagcactttgggaggctgaggcgggcggatcacttgaggtcaggagtttgagaccagcctggccaacatggtgaaaccccatctctactaaaaatacaaaaattagatgtggagttcagagtggaaacaggtgtgagagggttcaacagaagaaaacatagctgccaagtgtttgagtccatcggcaagtttggactggccttagctgttgcagaaggcatggtgaactctgccttatataacatggatgctgggcacagaactgtcatctttgaccgattctgtggagtacaggacattgtggtagggtaagggactcactttctcataccatgggtacagaaaccaattatctttgaccaccgttctcaaccacataatgtgccagtcatcactggtagcaaagatttacagaatgtcaatatcattccgtgcatcctctttgggcctgtcactagccagcttcctcgcatcttcaccaggatcggagaagactatgatgagcgtgtgctgccatccatcactactgagatcctcaagtcagtggtggctcgctttgatgctggagaactaatcacccagagagaactggtctccaggcaggtgagcgacgaccttatggagcgagcagccacctttgggctcatcctggatgatgtgtctttgacacatctgaccttcaggaaggagttcacagaagcagctggaagccaaacaggtggctcagcaggatgcagagagggccagaactcactggccactgcaggggacggcctgatggagctgtgcaagctggaagctgcagaggacatcacgtaccagctctctcgctcttggaacatcaccaatctgccggcagggcagtccgtgctcctccagctgccccagtgagggcccaccctgcctgcacctccatgggccaactaggccacagccccagtgattcttaacactgccttccttctgcctccactccagaaatcactgtgaaatttcatgattggcttaaagtgaaggaaatacagataaaatcacttcagatctcaaaaaagaaaaaaaaaatttagctggacgtggtggcatgtacctgtaatcccagctactcgggaagctgaggtaggagaatcacttgaacccaggaggcagaggatatagtgagctgagatcgcgccactgccctccagagtgggtgacagaggaagactccgtctcaaaaacaaaaaacaaacaaaaaaaaagaaacgtggcctccaatgttggaggtaggcctagtgggaggtgtttggtcatgggggtggatccctcatgactggtttggtaccctcggtaatgagtgattctcactcttagttcatagaagagctggttgtttaaagagcccggcacctcctctctctcttgctccctcttgctgtgtgacatgccggctcgcacttcaccttccaccatgcttggaagcttcctgagacctcaccagaagcagatgctggtgccaagcttgtacagccttcagaagcacgagccaaacaaacctcttttcttcataaattacccagcctcagattcctttgtagcaatacaaaatggactaacacaatcagatctcactgtaactctggaaacttgctgcccacccattctcttctagccaaagtccactttttcccctccagagttaccacaaggaaaatgaacagcctcaatccttaccactcaggcaagattaaagagttacagtgcagcagagaggcaggacaggaccaccgtgggccaagcgatcccaactctgcccaatcagtggaggctgccttctggaggctgtaggggaggatcagtttcctcacctcttccagcttctagatgccgtggcaatccttggctcacagccccttcttccatcttcaaagccagcaacttagcatctgaccctttttccacattacgtctctttctctgatcaaacccaggaaagcttttctaattttaagattcatgtgattagactaggcctgcctggataattcagcacactccccatctccaggttctgtaccctcatcacatctgcagagacccttttgccatataaggaaacatattcacatgttctggggataagggtgcagacatctttgagggcctttattctatctaccataaggacacgatcaaaaacattatagaggcatgccaggcaattaattaatgaaagtgttatgacatttttctgaattctgtgatgttgttacttgtcctttttaatgtctgtcatttgttgtgatttcttttctcattctttcttacaaatattctcttcggtacataattttgtatttgtaattgcgtgttttttaaaattattttttagacagggtctcactctgtcacccaggctggaatgcagtggcacaatcctagctcaccacagccttgaattcctgggctcaggcaatcctcccacctcagcctcccaagtagctaggactacaggcatgcaccaacatgcctggctgagtttttttgtttgtttgtttttttggggtgtttttttttgagatagagtctcactctgttgcccagactggagttgtgtgaacatggctcactgcagcctcgacctcctgggctcacgtaatcttttcatctcagcctcctgagtagctgggaccacaggtacgtgccaccacacttggctaatttttaaatttttttgtagagacaggatctcaccatgtcacccaggcatgtctcgaactcctgggctcaagtgatcctcccactttggcctcccaaagtgctgagattataggtgtgagccactcacccagcctttttttttttttttttaagagatagggtcttgctatattgtccaggctggtctcatactcctcacaattgatccttccacctcagcctcccaaagtgctgacattagaggcatgagcccccacacctggcctatattcttttttcttaaataggactgcccaggccaagcgccatggttcatgcctgtaatcccagcattttggttggccaaggcagatggatcacctgaggtcaggagttcaagattagcctggccaacatggtgaaaaacctgtctctactgaaaatacaaaattaatctggtgtagtggcccatgccttgcggtcccagctacttgggaggctgagccaggagaattgcttgaacccaggaggcacaggttgcagtgtgccaagatcgtgcctttgcactccagcctgagtgacaagattgaaactctgtctcaaaataagtaaattaaattaaataatgtaaaataaaataaaataggactgcccaaattgtgtaagcctcagaacccacgtaagctgactaaagggcacctctacttgcccattgactaacctgaacaccagatgaaattgctcttccaaacaccactagctggggagttggctcttggctggggttggtcagtgcacaggccagtaagggagctgggcaagtgcagaagtggagactagctgtgtcccagacagcgactctccggctgtgaccctggagagtcctttagcagggcaaagtgcaacataggcagaccttaagggatgactcagtaacagataagctttgtgtgcctgcagggggatgggaagagggtggggcaggagagggacataaaagggctctgaggcattgtactgtgaattccttcagtctcctgctctgctcagccagtcagccctgcctcccttgtttaggaccacacagcactgctgggtgtctgcctttccttgtgactcttctctagcctctgcatggccagcagccctcttcttttctcctattctcttaagaaacatgcccatcacctgcagtttctctgggctccccgttaatctgccttcctcatctcctaatgctgcctcctccctcccattgccggtgcctggaaatagtcaaggctgggttctgttcttttgcttgaatttctttcacttggcttcttgactctttctaaactacaatccccccattctcactgccttagttttccctctctctgtgtttctcaaactatatcccaccacgccctgacaagggcttctctcctgtagatcatcccttttctagtattttgctagaaatatatagtgggattttctcctttgccctacatcatcactaaacttcccaacctaataggcagtgtcttgcaccttctactgatcatttcattctttcttgcactaaagatgaccacttcccatgtctgtacccaattcctgtttggcccaaatgtatctgcagcactcacccgtgttctcacactgagtctctaaatatttgactccaaaggtcactagtggatcacctccctgcctctcactttcccccaaggcacaaagtcttctcccagcacttctctttagtcctcctcttcctcatgtttcttctgtagggggaggaccatgttcaactttgtgatttttttctagtttgtagttgtgatctaccctgtaccactgagtcatctcaaatcacttaaacactcacaccaagtgtaccgcacttcacggcttaatcccctgttgatcagaaaaccccaggtccctggaattgaagcagggtctcattcagcctgacatgacctgaaatttctccctgactcctttcccagccccaagacaggggacttgcaagagtcccattgttgagcctccttggaacccactgtcttccattggtcatgttccacccagcaggttctatctagttctaatcctcaatgctgcttcgcatcccttccttgctccattgtccagccctgagctcactcaagccttgtactgctctccccttttcccttccctcccaaccctattcctctcctctctacatactcctgggagccttgctccttctgtagcagaaacttcacacacattttctttcaaattctcctccattgctatctccagttgcaccgctcttcttcatttctttccctccacattcaaacttgtcttctctggagggcatgctctcctgggggctccccctggcccagcctcagcatggcatctgcctttctggttccttcccaccttctctctcctcacttcttgccctgccagatctgtctatggcaacagcccctgcagcagtgcactctcctcttcctcttcatgcccaaagccatgtcagcctctctcagcagcttccattttattgtagagacactaagcatagagaagttagtgagtaaagtgagttagttcaacatcagtggcaagggctaggacatggcctcctgactatgacaacaagacaatgcccactatatctccagccgccaggagcaaaaaacaaagtcctctgacctccaggaggctgccggctagctgggtcctgtttggtcacaatcagtcattcccatgtttatgtgtgtgtcattcatggaagacctcccttctccctttaataggggatttggggcctcttagcaaatgaagtaactgcacaaagatatgtgtgtgtgtgtgtgtgtgtgtgtgtgtgtgtgtgtccccttctcattcttatgaagtcctaatgctcctccattacccccaaacaaacacaggggatcttatactgaaaatcagcattcacagaaaggaaatggcctcatgaggaagcagcaggaacaatctgtttatgggagagctcagtgggccaggcaggaggtgtcatggcccttcctctgcgtctaccatacctccttcttcaagctgtttaggtggtgctctggggtgtcagcctccaggcattcagctatcggactcttactctaaagaggaaagggaaaactgaggaaatacagacaattatagaggagaaaatgaaaataattccaaccccaaattcatcactatttcaattctatatatatacatatctacacacacagatacatacatacatatctctaaaagatagcatatacaggacattattattattgtagttttaaaccttcaatattgttttatatgcacccacatatttaccctttttagttctccatattccctcctgaagttccatgctccccactggcttttgccaggataactttctttggtattacttgtaatgcaagtatctgctggcaacaaattcttcagtctttgtctgaaaatgtctttattttgcctttacaatagaaggataattaaactattggtcaaattcttggatagcaataaagatattaaccattgtcttttctgttttacaatttcaactgaaaagtcaaccattaatcttaattttatttctttgtggttaattttttttttctgggtatttgtaagattagttttcttgtcatcgattcccagcaattttacgatgtgtgggtaggtatgtgtgtttttaatcctttcattggtttcaaaaacttcttggcaagtgtgctttcccagattgcttctgtccgattcttgtgtccgtaacatatgttaggctatttcactgagtctcgtgtgtctcttacgccctgttcttttcttaatgctcttttttgtttgtttctgtgcttcggtttatatattttctgttgacctaattttgaactcactatcactgtctgttgctgattcaatctgttgttaaaacatccaatgagttgtcagtttcagatattgtactattaatttctggaatgtccagaaatgtccagttgattatttttaaaaatagcattattgagagataccttatgtatcataaagtctaatcatttaagtgaacaattgaataactgttagtatatttagagttgtgcagctatcatcaaaatctaattccaggacatttctatgctccaaaaagtactcgggaggctgaggcaggagaatggcgtgaacccggggggcggagcttgcagtgagccaagatcgcgccactgcactccagcctgggcgacaaagagagactccgtctcaaaaaaaaaaaaaaagaaaaagaaagaaagaaaaagaaacctcatgttcatttgcagccactctctattccactctcagccacaggcaaccacgaatctactttctctatggatttgcctttcctggacatttaatataagcggaactatacaaaatgcggtctttgggtatacttctttcacttagaatgttttcaaggttcatctgtgctgtagcatctatccttcattcttttaaaccgctgaatagaatttcattgtatattagtattccaggtgcattccacattttattgatccacgaaccggttgatgaatatgtgggtcgggttttgggctattatgaataatgctgctatgaacatttgtgtgcagtttttgtgtgtgggcataggttttcatttctcttgggtggatatgtagaagtggaattgctgagttatggtgaatgtgtttaacattttaggtaactgagcaattgttttcttaagtggctgcaccattttacactcctgctagcagtgcataagggctcagtttctccacattattgccgattcttacctctttttgatttgtagccattcttgtgtattgtaagatgtatttctttgtggtttcaatttgccttgctctaataatcaatattcttgagtatattttcacatgtttattggtcattcatagcttctttggtgaaatatctattttaatcttttgttcatttttaaattgggttatttgtatttatattattgagttgtaagagttcttcatatattctggatacaagtcccttatgggatatgtgatttttaaaatattttctgtctgtgtcttatctttctactttcttaatagtgtagaaagcacaaacattttcaatttcaatgaagttcaatttatcaacttttttgtgccatattttttttgattaaaaaacaaacaaacacaaacaaaaaaaaacttttaaaagacaggaatagaataagtcttccgaatgtaatatgacaatctgtcttaccaaccaccagtaatatgctttataaggaaaactaggctgggtgtggtggttcatgcctctaattccagcattttgggaggctgaggggcatggatcacctaaggtcaggaatttgagaccagcctggccaacatggtgaaaccccgtctctactaaaaatacaaaaattagctgggcgtggtggcaggcacctgtaatcccagctactcaggagactgaggcaggagaatcgcttgaacctgggaggcagaggttgtgcaccactgcactccagcctgcgtgatgagactttgtctcaaaaaacaaacaaacaaacaaacaaacacacacacacacacacacacacaaagacatataatacccgaagccttcacgcttttggtgtcatatctaagaaatctttccctaaccataagaacttattcctgttttcttctcagagttttatagttatagctcttacatttaggtctatgattttgtgatccattttgagtaaatttttgtgtatggcacgagataagagctttaattcatcttgcatgtgaatatccaattttccaagcacctttttttagcaaagctggcctttcctccattgaattgccttgcatttttaccagagatcaattaatgataatagtaagggtttatttcttgaatctcaattatgacccatcaatctctatatctgtctttatactaatgccacattatcttggttattttagctttgttgtaagttttgaaatcaaaaagtgtaagtcctccaactttgttattctcttccaacattattttggctattatgggtcttttacttttccatagatcacagttctcctttgaagcttttcttgccttcatccctttgtctatattatcttccatttatttttcattaatcatagggtgttttttggtcgtttttttcccctttttgtggagaatgcggtcttgctgtattacccaggcaggtcttgaactcctgggctcaagcccttcagagcgtataggacaagatgcctctggatgtggtcagagtggcagtaaggttcctcggtccattcttctatagctggaattgaaatggcaagaaaaggagtgagggtcttagggaatcacttcctgcctgggaacagagagctacattaaaggagtcccatggcatggagggaccctgtctggggtgaaccacctaggaaaaagtttgcaggcaatcatggaaatgaagaaagtttaataaacggtttacccactcaaagacaaaccttgtgaaggatgcagcatagcactgaattaagaacacaggttttggagtcagactgacatgggttgagattctggctccacctcctcccagctaaataatgtcaatgaatcactcacctgaagaggagaggggctgtgtgtgctcagtgcagcctgacagtgccttcagcaaactgacaattttagtcacgtagaaagactaaattcattgatttattcactcatttattaaataaatgaattatattcttcctttctgagaacgtagtccttagctttaatacttaccctgcataccggattttacaattaattatctttgcaaagccctctctgaagaagcgtttactttcactcagtacaggagatgatcctttcaaccctcttctgatgagatttcaccgattactaagcaccgtgagaagcaggtggagccctcagaagcaaacacagttgtattcagttaaaagtacacatctaattggtctccctaaatttgcatgaaagagagatgtagctggcacacctcagacacccagtcactgtcattttcctgcccagagggcaacattctgtaaaggaacagtgatggaagagtggcatgggagcaggactgcagctgctgggctggctcccccatcaccacagttcagatctatttctaacccaactccaggggttccacttccattatttcttgccgtgtaacaaatctcccctaaactcactggattaaacccaccactgtttcattttctgacatgattttctgtgtcggctgggctcagctggggagttcttctgcatcacaggaccttggccgaggctgcagtcacctggaggcataattgggctggggagtccaagagggctcactcacacatctgctgtttggtgagggcggccgggaggctggggtggctggtcctgtctcatcggtgcgatctcaggcctctccctcttcacatggcctctccgcatggtctctttgggtggtcactgagcagggtagccagactttgttgcatggtggcttagggctctccaaagacaaaagcagaagctaccaggcttcttatagcgtagacccagaattgtctcttccccacattctattaactaagcaagtcacagaccatcctagactcattatgggagggggctgcacaagggtgtgaatctttcggggcatggctcctgggggccaccttggataacagctgtaatgggttctctagcgggggcttcataagcatatgagagaaggaactatagaatgtgccagagtcggcttgcttaacacttgggcaaaacaaaatgaaagttatacaaatactgcggaatgagattctagcattaattctactatctcctcattaagaaattggggaaagtgtaaattagacatgatttaagtaaatgtcttttttctggtcctttggtgatatttcttttatcttcttggtccatgtcacctgtgggcttctcctgtgattcatgtagtcatgttgtacttgtcacttccattatggggaagagcatttatatttattgcgagaaagcagcatctcaccatcttcaattgtccaaagttcacaattgatgtgcagaatctttgccaactgtctccattgccccaggtgctgctatccctcatggctcctgaatgatgctgaaaatgtaagggaggttggtctcttctaatgtacactctgaaatactatcctgctaataacattttctctgcctgcctgtgatgctctttgattttggaacactctttgtgtctgtgaacagttagagggttatgtaaagtccctgggtttttgtcataagagtgacttccaagttatttggaatacataacagaatatatctggtgtgtagtagatgctcaacacatgtctgttgagcaatatgataaatgctatgatgattgttatgaggaataaatgagtgccatgttctgaatgtttatgtttcccccaaattcgtatgttaaaatcctcatccccagtgtgatggctttagaagatggggactttggggggtgattgggtcatgagggtagaaccctcatgattgagttagtgtcctcatgaatgagaccccagaggccgggtgtggtggctcatgcctgtaatcccagcactttgggagtctgaggcaggtgatcacttgagcccagaagttgcagacaagcctgggcaatatggggaaaccctgcctctactaaaaatgaaaaaaaaaaagtagctgggtatggtggcatgcacctgtagtcccaggaggctgagttggaggatcgcttgagtccaggagatagaggctgcaatgagctgagatcacaccactgaactccagcctgggtggcagagttttttcttttctttcttttttttttctgtctcaaaagagagagagagagcgagagagatagagaggtcccagagacccaaagagctagctggctagcccctttcactatatgaggacagagggagaaagtgccatagatgacaggaagcaggctcttaccagacattgaatctaccagtgccttaatcttggacttctcagcctccagaaccatgagagataaatttctgttgtttataagccactcagtttccgatattttgttatggcaacctgaatgcactaagacaatgagtgaccttttacaaaggacctgaataatcattattttccattttggtatctgttccatcccatattctctaatacaaaatctgtcccaaaacactaatcctgaacctaagattgctgcagctacctgctgaaaccatctttctcagtgtacttttttttttttttgagacagagtctcactgtgttgcccaggctagagtgcagtagcgtaatcttgtctccctgcaacctctgcctcccaggttcaagcgattctcctggctcagtctctcaagtagctgggattataggcacccgccaccacttccggctaactttttgtatctttagtagaggtgaggttttaccatgttggccaggctggtctctaactcctaacctcaggtgatctgcctgcctcggcctcccaaagtgctgggattacaggtatgagccaccgcacccagccccatatttggtatttctaccatacatctgtgttttctattcgtctcaccctttcagtttcttaactctctaattgccttcttttgaacttttttccttccattttttcctttctattagcttccaagttatgcattctatttttggacttttaatgataaccctagacatttcaacaagcacactttactaatcaaaatctaagatttaccatctttttttcccttcaacaatacagaaccttagttactgcatccatccatattttagttgtattttgcttttcctaactcccaagatattattattattggtttatgaagtcattgtttattccgatttttacagtaaatttttattcattttcaaatctgcttggtcaattttatggtcgtttattctttgtttatgtcttcaacctctcgtactgtttatttaaacatttctgtgtttgataactcagggcattttctcatgtctaattctagaagtttttttggtttgttttgttttgttttgttttgctgactcttgctcatcatgctgtgccagtcttttcattcatgacttctgagtatttgctcatatttctttgaaattatatgtgattatttgtgcctaggtataaagtggaaagtgagttcccccaaaaaggaggatttctggccagacgcggtggctcacgcctgtaatcccagcactttgggaggctgaggcggaggctgaggcgggcagatcacttgaggtcagcagtttgagaacagcctgaccaacatggtgaaaccccatctctactgaaaatacaaaaattagctgggcatggtcgtgggtgcctgtagtcccagctactcaagaggctgaggcaggagaatcgcttgagcccgggaggcagaggttgcagtgaacttagatggagccactgcgctccagcctgggtgacagagcaagacttggtccccccctccccccccccccaaaaaaaaaagaaaagaaaagaaaaaaaaggaggatttctgttgggtgtctgggagaattaccaacccaaatgcactttaaatcttcaatcaactttttggcttgaggtttttgtgaacacctaaagtatacattttgtctgcaagcctacataaagtcaggattatgatttgaaaaatcagggattttcccctgtgcctgttcagttcaggtttccagtcaatgtattttattcacagtgtaatggagggccagggtcagagacagattaattccttatttactcttacaggtgaaactgtcagatgtcacctgtcatgatgttggaaacagaaatttatgtgttagaattttactaaagtttcgattttggcattagaaaaagcatcgtcatctgtggtggtgtctgcccttgtcagtcagtgcctagagagaattttggggatggtagtaacaggacaatcccccatttctactgaacatcctcagtgtctgttccaagtagaattcaagttatgctctcaaggtggaagttgcctggggaggacatccttgagtacagctcaattttttttctttcttttagagatgaggtctcactttatcacccaggctagagtgctctggcatgattctagctcactgcagcctcaaaccctcaggctcaagagatcctccccgctcagcttcccaagtagctgggactataggctcacaccatcgatcttggctgtttttttttattttttgtaaagatgagatctcactttgttgcccaggctggtctcagattcctgggctcaagcgatcctcttgcctcagcctcccaaagccccgggattacaggcatcagccaccatgcttagctacagctctattaataggcacaagttcttcaatattcactgagaccccagctctgctgggaccacaggccatttttcttcccatgttgtgatcttgcccaccatgcctccactttttccccatctgcctggctacttagttgaaaactctttctgctcagcctttctagctccctgtgggagcttgggccacaccccacctgaaagactatcctccctcaatgtccccagtcccagaaatcatcttgaacaagtaatctgtccatgagctgctccccattcagacctctggccaggttgtggcctcctaacctcagtccactcagctgtggcctccatgatccgacccagacagcctgctctcttttcttctcatttcttcctccctcttacccttatctttcccatgctcctgttcacatgttctactccagggctctatttttgtgtacaaaatgtcatgattacagctctctttataacaattccaacccccattccccgctttttttccccatgagaggtcagctcccgagttcacaggcccaaatgtgagtgatgcatagaagggacagagtgtttcctctgaggcctctacacatccctgtccagtcttttcattctctgtggttttctcatttctagtccaagaggcccagaagcaaacctggaggtgagacccaaagaaagctggaaccatgctgactttgtacactgtgaggacacagagtctgttcctggaaagcccagtgtcaacgcagatgaggaagtcggaggtccccaaatctgccgtgtatgtggggacaaggccactggctatcacttcaatgtcatgacatgtgaaggatgcaagggctttttcaggtagagttacccatcagccttcacccacgtgccaccactgacccactgggtaacatctcagggcctcagcttgacctatcccccaggttcagagtgtgggctggtggcccacccaaaggccttgtaattagtctcaagggagccatttatatcccagaggaatccttcatcttcagtcttcctgttctacccaggaaaggtctccttccattaagatatcccttggtttctccatgtgctcttgaataaaatggaaaatgactcagtgaaagataaggaatttgaaaatcccaaatccaagtgttcacatccgccttctggggtggttgttacataaagaatggcataaaataaatgctcagaccatgggaagagaaacagaccgaagggaggggaagggtggggaggggagaaagccatgtgtgaggaagcactccaggtgcaccctccggagggcacagggtatgcaaggagcagctcccatctcgggagccacatgtgggaccctcatgcattcccaagacagccagcctgacagccctttgcagagttcttcgtggtggctgggcattcaaatggaaaagggcaggttccagggagaaatgaacattcgtgttgcatgagttataacaggggtgagacacatcagcagtgtcagactgggttcagctacaagtcacaggacacttgtcgccaattggtttggcaataaggaaaatgtgttacctctcctaacaggaagtctgaaggcctccaggttagtgagttcagcagctcatttctttccatttttctcttcagccatcccacctgagagctctgattgcagtctggctccccttgtgggggcacagtgctggggccccaggcaggaatcattatgttcagcagaagcgcacaaaggcccatctttgagagtaaggaaatctttcccaggagtcccctcacattggctagagccgggcccagcctatgcctgaactagtcactagcaaagagcagcaggtatgtccctgagctgggcacacgccacttgactgtgtggaagagggtggatgtctgcaccagctccagatgctgctggcacagaagaggctgcccaagcagtgttcgtgcatcctgcctcagcatgcaggaatcttctgctctcccttcctcatttgggtactattcctgggactctcagaaaaaggcaacatgttgtagtgggcaaaagctaaatccagtatcaggcagacctggattcaaatttcagcttgtcatgtacctggaggacagctggggatccatcgtctccaagcctcagtctccctcatctgtgctaggcagatgagattatgagtttcacagggttttagaactaaatttacaaaactgcaaaatacctagcctagcatctgatacatagcatacctttaaataatgtgagccccggtttcatcttttacccattctcagtggacttcgatgtagcatcagagctttcttacccaggccagttgggaaggcaaaaggcagggatggcatctgtgaagaacatgcccctgggctggtcactggtccgaggcccgaggcctccaagctcaaacctgccaggtcactgcgggcttggctcagcttcccaggcctgccctcggggacctctgcagccctacctggctgttccatgctcctgggccagccttccctcagtttccactctggaccagaatcagaggccagagccaagggagagattgtttctttccatccagctgtggagatggggaaagtaaaggtagggctgcactgaccgtgtcttttgtgggacaggcaggacttccgggctgggaggaggagatcttgtaccagagtctccaaaaggcatctgccccattgcctctctgcgcaccgcagagaggggtgtgcgggcccgtgggtcccgcctgcacgctctgctgttccaggcgctcgacctctttgccccctaggtcaacgaggggaatccactctgccatggggaagtcgctgccccgtaggtataagaacttccccatagttcaccccttcctccctggccgcccagtctggaaggggagctggagaaggcggcggggggtggggggaaggcgggggggaaggcgggggggtggggcgggcttctctggtttcttaccctcctggggtcaggtttcctcagctccctcccttaaggaggggaaatcgaggaagaggcccatctccatggaaactttctggtaacaaggctgtgaaagagaaggggacaggtgtttcaggaagaagggaaggcgctgaggatgggcctggagaggaagtgtccctgaaagtggttttggggctgcccgcgccagcgaaaagcacgtgtcccatttcctgccggaatggccagaaaaggtctcctccccggctctgccccctctagctgagtcctggacctctagggactcccacctacacccttcccataaagcctgacccagctgggacgcaaaggctagtgtccccctccccgagtcggtaggggctggggagggaggtggtatggcccggagccccaggccgagggcccgggcacccgtgcatccccccttctgctccccattctctcacaggagggccatgaaacgcaacgcccggctgaggtgccccttccggaagggcgcctgcgagatcacccggaagacccggcgacagtgccaggcctgccgcctgcgcaagtgcctggagagcggcatgaagaaggagagtgagcagtgggcgcgcgggcgggccggcgccggggtgcacggctctgagtaaggacgtgccgtgggtgtgggcatgcttgtgtggagatgcgcgccgagtgtgcgcgtgaacacacgtgcacatgtgagctggtgtccgtgtgcaacaggcagccacctgggggagcgcttgcagtcggccctctgggagatggagggagtcggtaatctctgccctgggatgtgtgctgggcagccctggacagggcgtgccctctgtctcccctcagttgctcctgcatcattctttttgtccccttcataattgttgtaatggtttgaaaccacatttgcgggtaggagtgtgaatctgggggagggaagcaggagccacatgggtgataggacccggggccttctaggtgctagccccatcagctgccccagacctggatctttataggggaactgtttgcagacaggtgacatgaggtgttctcattctacctatttaactttgatatatttgtgctcctaggtcactatgagattaaggctcatgcggaaaaggctaggtgtttctggtgcatatttgtctccatggaacacaaagggacccaaagctgcttctttcaaggacaagttctctaggctgctggcaggcatttttgatctctccccaccaaggacctcatagctttgttctacacacatgagtgggctccagaaatccacagaagaccctaaggctctgggctatataagaagtctctggagttgctatttcttgctaagctgtagcccagctctctagggtcttggagacccagacacctctgaagagtcttggtatataattcaccagaaaatgataattgtagatgccatttactgaacatctcttatgtaccaggaactatattaggcaccctacatgcaaggtctcatttaacagcggtgcgaggtaaacacggtttctccggatcacaaaggagaaacctggagacaggagaggttaaggaggttgcttggggtcacaggtagtaagtggcaaagctttcatgcaaacccagcgcctttggattctgaagcccgtgctcttgccagggccccacagtgtcctcacaaactccactgcagagggcaaaacaccagcctcacctcatctctgtcctcacccaagtgtttctccagaagagcccacaggcctcttgagtccagacaggggagaattgcttgtcaccattactttctcttttgcctaacggcttctgctgccttgagagggttacacagtggctctccagggggctggaggctcaccaggggcacgtgtgcctgagccagcctcactgtccctgcagtgatcatgtccgacgaggccgtggaggagaggcgggccttgatcaagcggaagaaaagtgaacggacagggactcagccactgggagtgcaggggctgacagaggagcagcggatgatgatcagggagctgatggacgctcagatgaaaacctttgacactaccttctcccatttcaagaatttccgggtaggaggaactgcacagtgacccgaggtgtcactgccatcttcattctcacatagaaactgaggttccccaaggataagaaacttatacaaggtcacagctaatcagtggtggagggtagatttggagagctggtcctgcatctgtgctagctcctcaaagccttagtctcattcccaaaggttctgaaagtgtggtccctgggtcagcagcatcagcatgcagattttcaggtcacctcagatctcctgaatctgaagctccagggaggggcaggaccccccggtgattctgttgcaggttcaggtttgaaaaatcactgctctctcctttaaggcaggtaggaactgggtctaagcaataagtggagggaaagctaggcagttccccagtgttgctggcattcggggctttatgaggacaggatcaggacctgttgggggtgtgacttttgtgaactggtgtttcttgatcccagcacattaactatgtctgtgctctaagtgccctccttcccctttgcactgatagatatctcaagtggcccttcacagcccaaataactggattagcccagtgacctcagatctgctcttcccatccatagcaccctaaaccttctgagtctcctgagcccaacatctggaatgcttgggatgacacaccatggttgcagtcccccttaccctccattttaaccaagcagggatgtgtgtgaccattaattcatagatccccaaagcaccttcatctgatagagaacaccagagagaagaaacaaatgctgtgtgtgtatatgtgtgaggacacacgcatgcatgtgggtgtgaatgcctgcatttgtgcatcctctcgagctgcaactgtggctgtgcatgtttggctggggcctgagttgggacctgtctatgaaagcacatgctgtctctcctctgtccacctcctggcatgtgtcctagctgccaggggtgcttagcagtggctgcgagttgccagagtctctgcaggccccatcgagggaagaagctgccaagtggagccaggtccggaaagatctgtgctctttgaaggtctctctgcagctgcggggggaggatggcagtgtctggaactacaaacccccagccgacagtggcgggaaagagatcttctccctgctgccccacatggctgacatgtcaacctacatgttcaaaggcatcatcagctttgccaaagtcatctcctacttcaggtaggacatggagactgggtggttgggtgtggaaaagaactggaagtggccaggaggttcaaagggcctggggtagatcctgaatttgggggatattggtgtcagaagaccctccttttcctgtgccctttccccgggcagccagtgctgctggggagtagagcccttgctgtatggctggttagttttgtggctgtgggcctgccagtgtctctgcctcttcacctgctcaatggaagctaaaaatgcctcccctgcagggctgttctgtgaaataagaacacatccgaagaacacccagcacagagtgggcattcagatagtcttttgtactctcccttaaaggggcaggaatcacatgttgacagttccagagcaaggaatgagaggaatagaaaagataaggctgtgaaggccatggggagggcgggtggtcctcagagcccaagggtcaggtctccccagagctagatgtggaggcaacaaccatcgggcaactggggttagtgggagacatgggaacttcctggggtggcaggaaccacagccccagaatatgtgtgcagtcgtaggattagggatggtgccaggtgtatctgtccttgggtaggccaccttgccttgccaagcctggtcaagtggggctgaaacacacctgccacaagctcctggtttcttcagcaggttgagggtaggttatactctaggagcccagaggttcttctctggccctgtaggagtcatgcgtgacttatttaatggggtgatgctgacagcaggtttggaatggggttcagatggtagcaaataagcttaaaggggcagggagagaagaatacttatacatgtggacattgggagatctttggtgaaatccagtgactgacaatttaacaccagggcttcccacttgctatttctcaaggccaccaatgtcgagcacagtgacctgaggtgtcactgccatcttcattctcagatagaaactgaagttccccaaggataagaaacttgtacaaggtcacagctaatcagtggtggaggctagatttggaagtaccaaagccagctcgatgccaggtcctaagctgggcaatggggaggcacagaagaataagatcaattacatggcatttgtagctcagtgttagggatctaaaagaaggatgggcgccagtagcacagggtctgaattcccaaggccaagaggtagtgtttcctcaaaacccagagtaagcagcctccctctcaggctgtgaagcttcctccttgtaaggaatgcctccttactggggaggtgggggcccctcccaggttgggagggagtgatccctgcaggaccggaagggtatccatgtaaccataatctcagaggcttgttaagccgcctccatggttaggcctgtgcttcagcgctaggagtggggcttcaggcatctgggctgcagggaaacagtagaaatacatgtgtgcacattaaacccaacaccgacagcaggaagcaaacatccccactactggaactcaggccaaaagggcggcactttcactctggaaaggggagactgcactctggaaagacttctgagaggggcaaagacatagcatggcctgaggggctagcaggatatactaaaggggaagtcattccaagggggaaactgaggcagaaaggaggaggccagggaccagaagccaaagcactagctgtaggtcaggatttgtataggagctgaaggagatggggccagcctgtaagggacctggatgccaagctcagtgggtggagttcccggaggttggaggggaggagaggatgctgcggggcagagctgtctgctgggttgtgaggggagagatgagaggcagccagacagcagccacagtcatcctcagggaaaggagccatcctccctcttcctctcgcccccaacttctggattatgggatggctgctggtgccggcctgtgggctgcctcccagggagctgtcctcccctccccatccttgctgccagggacttgcccatcgaggaccagatctccctgctgaagggggccgctttcgagctgtgtcaactgagattcaacacagtgttcaacgcggagactggaacctgggagtgtggccggctgtcctactgcttggaagacactgcaggtgcccgagagagcctgcctgccctggcagagggagggaaacactgcagttatgggaggaagggagctacgccaggatatgcaggttctgggatggcagggcaggaagatggaatggtggaaaacaagatattggtgagggatgattagatcttggtcagcttgctgagaagctgcccctccatcctgttaccatccacaggtggcttccagcaacttctactggagcccatgctgaaattccactacatgctgaagaagctgcagctgcatgaggaggagtatgtgctgatgcaggccatctccctcttctccccaggtgaggatctcccctaggctgcctgacatcccccccagccttatctgccctccccagggaaggtcccagtctatggccttgctcctcattcactgcgcagccaggatgggggctctcgctggtttctcctggggtcagtgggtgatgcccagccctggtcttccttcacttccctgcctgggtgactccagctctggagggtggttggcgagcaatgccctgactctgggctggactgagcttgtctttgccccatgatcttgcaccacacctccctcccctccagaccgcccaggtgtgctgcagcaccgcgtggtggaccagctgcaggagcaattcgccattactctgaagtcctacattgaatgcaatcggccccagcctgctcataggtgagcacagcagggggtgaggacccgtgagggtgatgtgagggagccgaggttcagggaaattgcccaagacttcatggccagagggtggcatctggaggtagccccagccagaccaggtccaaagctcacacttttgagcactacctaaccacttcccaggaaaaacacaagcaaacagggggacgtggcccagaaaggggcttctataccttcactggtcctcagtagctcctgtgacctactgcccagactgatgcccacagacccagagacaaacttggattttacggagcccaaggccatgaagggttaaggccaacactgagtattatagtgtgaacctataaactgaaatccttatttggcctgcacagctttctttttggcttggtgtcctgggatgctgggagtggccatgtctttatttgctcaacccttccttgtatggaggcaggaggctggaagtgccaactttcttttccatcatggggatactgaggcatatggtacatctcagacactagatccaaagctagttccaggaagggattccagcctgcagcccctaacctccacaacgactctgctcagtcctggcccctggacattaacgaaggcagtgacagccccacacccccaaactggtagctgcaatatctacattttcccacggaagtctctgtgtacaaagatgcaactcccgcagctgggtgtcgtggctcacacctataatcccagcactttgagaggtcaagacaggaggatcccttggggccaggagttcaaaaccagcctaggcaacatagccagaccccaactctagaaaaattttaaaaaattagccaggtatggtggcatgtgctctagtcctagctacccaggaggctgaggctggaggtctcttgagtccaggagtttgacactgcagtgagtccatgatcgtgccatcatgctctagcctgggtgacagaacgagatcctgtccctttaaagaaaaaaaaaaaaaaaagacacagctcccatgaatgggatgggagtggggagagtattgggcaggctgttctgcctttctcatctacagggtaaaagagaagcttacggaattcagccaagccttgtctcttggctgacctgaaatgtccagagattatgcttgtgcagcctcagagcagccctgaggcttgtgggtcagggcgggctgcacccacaatcttttctctggctggcatgcaggttcttgttcctgaagatcatggctatgctcaccgagctccgcagcatcaatgctcagcacacccagcggctgctgcgcatccaggacatacacccctttgctacgcccctcatgcaggagttgttcggcatcacaggtagctgagcggctgcccttgggtgacacctccgagaggcagccagacccagagccctctgagccgccactcccgggccaagacagatggacactgccaagagccgacaatgccctgctggcctgtctccctagggaattcctgctatgacagctggctagcattcctcaggaaggacatgggtgccccccacccccagttcagtctgtagggagtgaagccacagactcttacgtggagagtgcactgacctgtaggtcaggaccatcagagaggcaaggttgccctttccttttaaaaggccctgtggtctggggagaaatccctcagatcccactaaagtgtcaaggtgtggaagggaccaagcgaccaaggatgggccatctggggtctatgcccacatacccacgtttgttcgcttcctgagtcttttcattgctacctctaatagtcctgtctcccacttcccactcgttcccctcctcttccgagctgctttgtgggctccaggcctgtactcatcggcaggcgcatgagtatctgtgggagtcctctagagagatgagaagccaggaggcctgcaccaaatgtcagaagcttggcatgacctcattccggccacatcattctgtgtctctgcatccatttgaacacattattaagcaccgataataggtagcctgctgtggggtatacagcattgactcagatatagatcctgagctcacagagtttatagttaaaaaaacaaacagaaacacaaacgatttggatcaaaaggagaaatgataagtgacaaaagcagcacaaggaatttccctgtgtggatgctgagctgtgatggcgggcactgggtacccaagtgaaggttcccgaggacatgagtctgtaggagcaagggcacaaactgcagctgtgagtgcgtgtgtgtgatttggtgtaggtaggtctgtttgccacttgatggggcctgggtttgttcctggggctggaatgctgggtatgctctgtgacaaggctacgctgacaatcagttaaacacaccggagaagaaccatttacatgcaccttatatttctgtgtacacatctattctcaaagctaaagggtatgaaagtgcctgccttgtttatagccacttgtgagtaaaaatttttttgcattttcacaaattatactttatataaggcattccacacctaagaactagttttgggaaatgtagccctgggtttaatgtcaaatcaaggcaaaaggaattaaataatgtacttttggctagaggggtaaacttttttggcctttttctggggaaaataatgtgggggtgtggaaatagaaacatacgcaagcatacatatttttactacttattttattattatcctgtataaatctgaagactccggcgtaagaacataaaaatgaattatttaacttggcttacttataaaatgattgttctgtataaaagtttaacatatgtgcataccataattaaaatgtagtccgggcgaggtggctcaggcctgtaatcccagcactttgggaggccaaggctggcggatcacaaggtcagaagatcgagaccatcctggctaacacagtgaaaccccgtctctactaaaaatacaaaaaattagccaggtgtggtgctgggcacgtgtagtctcagctacttgggaggccgtggcgggagaatcacttgaaccaggcaggcggaggttgcagtgagctgagatcgtgccactgcactccagcctgggggaaagagcgagactctgtctcaaaaaaaaaaaaaagtaggaattaattttaaatgtctaatatttcattcaaatgaaacttcacagtaactgaattttaaagaacagataattacttagcttttgacattttacaagaagcaggccaaactttgagaacatggtaaatcatcagtaatataaatcaaagcaagtaaacatattctgtcatccctctgactttaccagatttttctgcattaaggagatatagggagcacttatttttagaaaagatactgagggaaaaaaagagcttctctttccaaactcaatgaatgcagcttttgctcccaggaattttaattatgaatccatttataattagaaatacaaatttctaatttggaaagatagatttcactccagtgtattcataaatcatatgcatctccctttccttactgaaatgattcgagtgctatttgttcaagagcctgaaactgttgtaagctgtaggacagggtaaggtgaggttaagatggaatggagggcaaatttccatctcccagtcttgatttaaaaactccagggtagttctccaaacattgaattgatatgtacatataatttatatagattataaaaactaaatgtatttcaagagtgaagaaagattcaatgttagatgccctgaagagttcacatagggtacttcctttcagtaggtctgtggatcacaagtttatgggactagaagccagattttaaccttcctactccaacatttgagtttcttctttactcccttccctgaacttttgagtaaacagaactaagcatcagtttttaggcatccttgtgaccactttttttttttttttttttttctgggtcagtgaggagaggatggagtcagtctccaaagctcagggcaaaagacctaagcaagctactgctaccatctgccccctcattagtcagggccactcaacagcctctctctacctagcccagaactttgtctaattaagtcttgacattgatgacaaatctgtgggaagggccagagtggccactcccttctggagaaagaggatgtaaggagaaacatacgtatgattatccatggcttcccagctcctgactcctaacttgtgggcctcattatgccatcttccacggcagcttgttttttcctggtaggtttccctttatgtccttcagctctcctaaatctgatggtggtgatgagtgaaatattcctacacttgagaaatgtgtgaccatcccaacacttctgtttacttcctttcacaaacttctcaatgacagggatctaaaagctaatctctcctttcctcactaccttcctagaacacgtttctaaatgacatctaccggctgggcacggtggctcatgcctgttatcccagcactttgggaggctgagacaggcggatcacttgaggtcaggagttcaagaccagcctggccaaaaaagtgaaaccctgtctctactaaaaatgcaaaaattatccgggcgtggtgtagtctcagctactaaggaggccgaggcaggagaatcacttgaacccgagaggcggaggttgcagtgagtcgaggttgcgccactgcactccagcctaggcgacagagaaagactctgtctcaaaacaaaacaaaaaaaaacgaaatgacatctaccatcactgctctcctgaaatatgatcccgaaggactgtttggtcagtactttttggaaagacttagaaactaaaaaggcaggggccgggcgcggaggctcacgcctgtaatcccagcactttgggaggctgaggtgggcggatcacgaggtcaggagatcgagaccattctggctaacacggtgaaaccccgtctctactaaaaatacaaaaaattagccgggcgtggtggcgggcgcctgtagtcccatctactcgggaggctgaggcaggagatggcgtgaacccgggaggcggagcttgcagtgagcggagatcgcgccactgcactccagcctgggcaatagagcgagactccgtctcaaaaaaaaaaaaaaaaaagaaaagaaactaaaaaggcagtctttcaggattctaaattaaaaggtcttgcaggacactaacacaatatttaactcaatcccagaacctatgcaagacagcagcaaatcccaaacaaatgcacttcagtgccagcaggaggcgcatcgcacaagtaacttctgtttctgctaatccaatcctcccctgccgcccctactggttaaatgtgtttaactgttttaccaatgttggaattagccaaccccaccaccacagtaaataaataagaggaccacactttatcgaatataaatttgtttttattgaagcagcagtcacatgaccttatatctagcctttagattaggcctgacagagtgagccagccctaaaaaaatgatgtttctttttgcactaagagacataacatgtttacatacatcatccagtattggaaatgagcagactcaaacacaacatgtgttggttacctgggaggtacagccccactgttcgtggtgtccatatattttacagagacccccaaagaccattactaataggatgaaagttaaaagaaaatacagccacaccaaatcatgaacacagtaatcaaagacagcagcttatacacatttaaaaactgtccctttcagagttgttttctttcttttctaagcagtgtctgcaaagcttcctctacatcaaatccaaaggtttccaaggtggaagctgcacctcttggggctacacaatggaataaaatcattggaaagaacaagaagtggtattgatatcttgttctgtataacaaagattaatgtttccctaattagaggaatggaaatggtgatgtgactacatattgcagcggcaaaatagtagggtgaaggaagagggttgggtactgaaataaagaccacacacttgtgaattttaatttcatttccaggctaacctactttttatttaatgcaaattacagtaccagttaactatttccaaaccaagtcacatagaacaaaatgtatttacaagggaatggggaaagggaaaaaaaacattgagcatacttttcacaaaaaagtttatatttaaaatgaaaaaaaaaaatcagtcacagaggcattcaagtagtaataatgttatacagattttgcttttcctttatatcaagacagatttgcacaagtgtttgcaatagtttgtatacaacccacagtcctttatatatatatatatatatatataataaattttgttttttaggtttgtttttaagatggaagtggtcacgctaattggtatgtgtacaggcccaagtgatccatcggcaacacatttataaatgcaaattttacaggcaagcagattttcatacaactatctgtatctgcctgtagacagatatagttaaggaacaaaaaacttaccgattaaacaccaggaagtctacgttgtgcagctaaccccttatgtgctggctgtcattttgcttttattgcagaggtgcaaaacggagcaacaaacttgaataagacgggtttttttttattttttttttttttttggtgggaagttactttcaaagcctctcaaaggtagatctcagtctgggactctactgtgcttctagttgtctcttttattttcagtggctcaggtttctaccagaaaagacagattttattgtaaagcatacctacttttccacacaggggagaaaagtgtttggctctgtgattaggtgatccctaacctgaacagtaggattcagataccatttcagttgaaaagaaagaaacccccccaatttcctggggatcgggcatgggccaaacttcctttggaagatttcccagtttaatccttttaaaagggaaaggggaaacttggttgaattgccgttgtcttcatataaagaa

SEQ ID NO: 23658 - DNA, 4590 bp, Homo Sapiens
aggagagcctcccggtgtatttgaataaaccaggttggcaaatcatactatagctgaaagaattggcaggaactgaaaatgactaggaagaggacatactgggtgcccaactcttctggtggcctcgtgaatcgtggcatcgacataggcgatgacatggtttcaggacttatttataaaacctatactctccaagatggcccctggagtcagcaagagagaaatcctgaggctccagggagggcagctgtcccaccgtgggggaagtatgatgctgccttgagaaccatgattcccttccgtcccaagccgaggtttcctgccccccagcccctggacaatgctggcctgttctcctacctcaccgtgtcatggctcaccccgctcatgatccaaagcttacggagtcgcttagatgagaacaccatccctccactgtcagtccatgatgcctcagacaaaaatgtccaaaggcttcaccgcctttgggaagaagaagtctcaaggcgagggattgaaaaagcttcagtgcttctggtgatgctgaggttccagagaacaaggttgattttcgatgcacttctgggcatctgcttctgcattgccagtgtactcgggccaatattgattataccaaagatcctggaatattcagaagagcagttggggaatgctgtccatggagtgggactctgctttgccctttttctctccgaatgcgtgaagtctctgagtttctcctccagttggatcatcaaccaacgcacagccatcaggttccgagcagctgtttcctcctttgcctttgagaagctcatccaatttaagtctgtaatacacatcacctcaggagaggccatcagcttcttcaccggtgatgtaaactacctgtttgaaggggtgtgctatggacccctagtactgatcacctgcgcatcgctggtcatctgcagcatttcttcctacttcattattggatacactgcatttattgccatcttatgctatctcctggttttcccactggcggtattcatgacaagaatggctgtgaaggctcagcatcacacatctgaggtcagcgaccagcgcatccgtgtgaccagtgaagttctcacttgcattaagctgattaaaatgtacacatgggagaaaccatttgcagaaatcattgaagacctaagaaggaaggaaaggaaactattggagaagtgcgggcttgtccagagcctgacaagtataaccttgttcatcatccccacagtggccacagcggtctgggttctcatccacacatccttaaagctgaaactcacagcgtcaatggccttcagcatgctggcctccttgaatctccttcggctgtcagtgttctttgtgcctattgcagtcaaaggtctcacgaattccaagtctgcagtgatgaggttcaagaagtttttcctccaggagagccctgttttctatgtccagacattacaagaccccagcaaagctctggtctttgaggaggccaccttgtcatggcaacagacctgtcccgggatcgtcaatggggcactggagctggagaggaacgggcatgcttctgaggggatgaccaggcctagagatgccctcgggccagaggaagaagggaacagcctgggcccagagttgcacaagatcaacctggtggtgtccaaggggatgatgttaggggtctgcggcaacacggggagtggtaagagcagcctgttgtcagccatcctggaggagatgcacttgctcgagggctcggtgggggtgcagggaagcctggcctatgtcccccagcaggcctggatcgtcagcgggaacatcagggagaacatcctcatgggaggcgcatatgacaaggcccgatacctccaggtgctccactgctgctccctgaatcgggacctggaacttctgccctttggagacatgacagagattggagagcggggcctcaacctctctggggggcagaaacagaggatcagcctggcccgcgccgtctattccgaccgtcagatctacctgctggacgaccccctgtctgctgtggacgcccacgtggggaagcacatttttgaggagtgcattaagaagacactcagggggaagacggtcgtcctggtgacccaccagctgcagtacttagaattttgtggccagatcattttgttggaaaatgggaaaatctgtgaaaatggaactcacagtgagttaatgcagaaaaaggggaaatatgcccaacttatccagaagatgcacaaggaagccacttcggacatgctgcaggacacagcaaagatagcagagaagccaaaggtagaaagtcaggctctggccacctccctggaagagtctctcaacggaaatgctgtgccggagcatcagctcacacaggaggaggagatggaagaaggctccttgagttggagggtctaccaccactacatccaggcagctggaggttacatggtctcttgcataattttcttcttcgtggtgctgatcgtcttcttaacgatcttcagcttctggtggctgagctactggttggagcagggctcggggaccaatagcagccgagagagcaatggaaccatggcagacctgggcaacattgcagacaatcctcaactgtccttctaccagctggtgtacgggctcaacgccctgctcctcatctgtgtgggggtctgctcctcagggattttcaccaaggtcacgaggaaggcatccacggccctgcacaacaagctctttaacaaggttttccgctgccccatgagtttctttgacaccatcccaataggccggcttttgaactgcttcgcaggggacttggaacagctggaccagctcttgcccatcttttcagagcagttcctggtcctgtccttaatggtgatcgccgtcctgttgattgtcagtgtgctgtctccatatatcctgttaatgggagccataatcatggttatttgcttcatttattatatgatgttcaagaaggccatcggtgtgttcaagagactggagaactatagccggtctcctttattctcccacatcctcaattctctgcaaggcctgagctccatccatgtctatggaaaaactgaagacttcatcagccagtttaagaggctgactgatgcgcagaataactacctgctgttgtttctatcttccacacgatggatggcattgaggctggagatcatgaccaaccttgtgaccttggctgttgccctgttcgtggcttttggcatttcctccaccccctactcctttaaagtcatggctgtcaacatcgtgctgcagctggcgtccagcttccaggccactgcccggattggcttggagacagaggcacagttcacggctgtagagaggatactgcagtacatgaagatgtgtgtctcggaagctcctttacacatggaaggcacaagttgtccccaggggtggccacagcatggggaaatcatatttcaggattatcacatgaaatacagagacaacacacccaccgtgcttcacggcatcaacctgaccatccgcggccacgaagtggtgggcatcgtgggaaggacgggctctgggaagtcctccttgggcatggctctcttccgcctggtggagcccatggcaggccggattctcattgacggcgtggacatttgcagcatcggcctggaggacttgcggtccaagctctcagtgatccctcaagatccagtgctgctctcaggaaccatcagattcaacctagatccctttgaccgtcacactgaccagcagatctgggatgccttggagaggacattcctgaccaaggccatctcaaagttccccaaaaagctgcatacagatgtggtggaaaacggtggaaacttctctgtgggggagaggcagctgctctgcattgccagggctgtgcttcgcaactccaagatcatccttatcgatgaagccacagcctccattgacatggagacagacaccctgatccagcgcacaatccgtgaagccttccagggctgcaccgtgctcgtcattgcccaccgtgtcaccactgtgctgaactgtgaccacatcctggttatgggcaatgggaaggtggtagaatttgatcggccggaggtactgcggaagaagcctgggtcattgttcgcagccctcatggccacagccacttcttcactgagataaggagatgtggagacttcatggaggctggcagctgagctcagaggttcacacaggtgcagcttcgaggcccacagtctgcgaccttcttgtttggagatgagaacttctcctggaagcaggggtaaatgtagggggggtggggattgctggatggaaaccctggaataggctacttgatggctctcaagaccttagaaccccagaaccatctaagacatgggattcagtgatcatgtggttctccttttaacttacatgctgaataattttataataaggtaaaagcttatagttttctgatctgtgttagaagtgttgcaaatgctgtactgactttgtaaaatataaaactaaggaaaactc

SEQ ID NO: 23659 - DNA, 3463 bp, Homo Sapiens
ctcttacaacattggctgccggcgtgactttgaccgcttcccggtgcgttaccggcagctgaacccacccggcgccacgggactttgacgcgtgctctgcgcttgccatgagactcctgggagctgcagccgtcgcggctctggggcgcggaagggcccccgcctccctaggctggcagaggaagcaggttaattggaaggcctgccgatggtcttcatcaggggtgattcctaatgaaaaaatacgaaatattggaatctcagctcacattgattctgggaaaactacattaacagaacgagtcctttactacactggcagaattgcaaagatgcatgaggtgaaaggtaaagatggagttggtgctgtcatggattccatggaactagagagacaaagaggaatcactattcagtcagcagccacttacaccatgtggaaagatgtcaatattaacattatagatactcctgggcatgtggacttcacaatagaagtggaaagggccctgagagtgttggatggtgcagtccttgttctctgtgctgttggaggggtacagtgccagaccatgactgtcaatcgtcagatgaagcgctacaacgttccgtttctaacttttattaacaaattggaccgaatgggctccaacccagccagggccctgcagcaaatgaggtctaaactaaatcataatgcagcgtttatgcagatacccatgggtttggagggtaattttaaaggtattgtagatcttattgaggaacgagccatctattttgatggagactttggtcagattgttcgatatggtgagattccagctgaattaagggcggcggccactgaccaccggcaggagctaattgaatgtgttgccaattcagatgaacagcttggtgagatgtttctggaagaaaaaatcccctcgatttctgatttaaagctagcaattcgaagagctactctgaaaagatcatttactcctgtatttttgggaagcgccttgaagaacaaaggagttcagcctcttttagatgctgttttagaatacctcccaaatccatctgaagtccagaactatgctattctcaataaagaggatgactcaaaagagaaaaccaaaatcctaatgaactccagtagagacaattcccacccatttgtaggcctggcttttaaactggaggtaggtcgatttggacaattaacttatgttcgcagttatcagggagagctaaagaagggtgacaccatctataacacaaggacaagaaagaaagtacggttgcaacggctggctcgcatgcatgccgacatgatggaggatgttgaggaagtatatgccggagacatctgtgcattgtttggcattgactgtgctagtggagacacattcacagacaaagccaacagcggcctttctatggagtcaattcatgttcctgatcctgtcatttcaatagcaatgaagccttctaacaagaacgatctggaaaaattttcaaaaggtattggcaggtttacaagagaagatcccacatttaaagtatactttgacactgagaacaaagagacagttatatctggaatgggagaattacacctggaaatctatgctcagaggctggaaagagagtatggctgtccttgtatcacaggaaagccaaaagttgcctttcgagagaccattactgcccctgtcccgtttgactttacacataaaaaacaatcaggtggtgcaggccagtatggaaaagtaataggtgtcctggagcctctggacccagaggactacactaaattggaattttcagatgaaacattcggatcaaatattccaaagcagtttgtgcctgctgtagaaaaggggtttttagatgcctgcgagaagggccctctttctggtcacaagctctctgggctccggtttgtcctgcaagatggagcacaccacatggttgattctaatgaaatctctttcatccgagcaggagaaggtgctcttaaacaagccttggcaaatgcaacattatgtattcttgaacctattatggctgtggaagttgtagctccaaatgaatttcagggacaagtaattgcaggaattaaccgacgccatggggtaatcactgggcaagatggagttgaggactattttacactgtatgcagatgtccctctaaatgatatgtttggttattccactgaacttaggtcatgcacagagggaaagggagaatacacaatggagtatagcaggtatcagccatgtttaccatccacacaagaagacgtcattaataagtatttggaagctacaggtcaacttcctgttaaaaaaggaaaagccaagaactaactttgcttactgtgagttgactgactctaattgaatctgcgtggttttgatactttgatggattccagtggaataaattcaggctgctgaaacaagaaattctgagcccaggaagcgggctcttctttcttcaaaagaagcccttcttgttcatattcaggagcttctgttatattcaaaggtaattctatgtctatctcaactctattgattggttttatagtttattgaaaatcctcaaataaaatataattattactgaaatatgtttaatatttaaggggaaaagagactaatttcagttatacttttaagcttagaatgtatgttcatttccaaattttgtatcataagagttttcaacatagagaaaagctgaaaaaatgcaaagaataaccacatactttccatctaccttcctttgttaacgggttgtttatcatataataatttgttttgtcatatttgctttcactgtctattatctgtttaagtctcataactctatttttagtttgctgaagacttgaaagtgaatcgcatatatcatgacacttcttggagtgtcattaatgggcaggcttttctgttgaagagtggattccgtatgttcttcatagagagtgtttttcagattcttcattgggatattaaaatattagccaaatttctctctgttttatatatgtctgtttatttcagtttgtggtttctgcaaatttgtaactgcctctgttttaggagtataagtattacttccttgtggtctattgtgaagtaaaaagtagacccttgcatatactattcttgtttgtgttcatcttaatgtttttgtacagctaaatcaaatgtaatttatagagttagtttcatcaacctaatgaatgctagttaaatttgaattccttggaatttatcgtatattgtattcactgagattatgaagggacaaatgttaatcttttgtttccagaaaaagttgggctttcccaagcagttctattacccggttcagaattgcttcatccaaaaatcatctgatggtatagatggatcctagtccttttcattacctgatggtagaaataaaataattgatt

SEQ ID NO: 23660 - DNA, 1352 bp, Homo Sapiens
aagaattcggcacgaggaccctgccgcctgagagagagcacagcctggtgggttctggggtctacggcctaggggccggggaagtttgcgccgccgcgaccagtgctgcgatcccgagccgggctccagccccgaggaccaggggtcgggcgggcctgcctacggaaccccgcgggccagcagcagtcgtctcgcgtcctcctgcttggaaaagtgtttaagcttctaaaatgtcatctatcaagcacctggtttatgcagttattcgtttcttacgggaacaaagtcagatggacacttacacctcggatgaacaagaaagtttggaagttgcaattcagtgcttggagacagtttttaagatcagcccagaagatacacacctagcagtttcacagcctttgacagaaatgtttaccagttccttctgtaagaatgacgttctgcccctttcaaactcagtgcctgaagatgtgggaaaagctgaccaattaaaagatgaaggcaataaccacatgaaagaagaaaattatgctgctgcagtggattgttacacacaggcaatagaattggatcccaataatgcagtttactattgcaacagggctgctgctcagagcaaattaggtcactacacagatgcgataaaggattgtgaaaaagcaatagcaattgattcaaagtacagcaaggcctatgggagaatggggctggccctcactgccttgaataaatttgaagaagcagttacaagttatcaaaaggcattagatcttgaccctgaaaatgattcctataagtcaaatctgaaaatagcagaacagaagttaagagaggtatccagtcctacaggaactggactgagctttgacatggctagcttgataaataatccagccttcattagtatggcggcaagtttaatgcagaaccctcaagttcaacagctaatgtcaggaatgatgacaaatgccattgggggacctgctgctggagttgggggcctaactgacctgtcaagcctcatccaagcgggacagcagtttgctcagcagatacagcaacaaaatcctgaacttatagagcaactgagaaatcacatccggagcagatcattcagcagcagcgctgaagagcattcctgatttaaccaggggctcaagcccaagatacaaatggtttatggctatgaatgaagtatttgttgtagatagtaccccctccctccttcaaaaaaccaaacaccatatctgatgtgtgaaaataatggaggaaaacctcttgtgtatattcttaaagaataaatctgtttagacaataggtttatcacaaaaaaaaaaaaaaaaaaaaaa

SEQ ID NO: 23661 - DNA, 2112 bp, Homo Sapiens
cccgcttctggagtgttatcgtcaccatgtccctaatggtctcggctggccggggcctgggggccgtgtggtccccaacccacgtgcaggtgacggtgctgcaggcgcggggcctgcgggccaagggccccgggggcacgagcgacgcgtacgcggtgatccaggtgggcaaggagaagtacgccacctccgtgtcggagcgcagcctgggcgcgcccgtgtggcgcgaggaggccaccttcgagctgccatcgctgctgtcctccggacccgcggccgccgccaccctgcagctcaccgtgctgcaccgcgcgctgctcggcctcgacaagttcctgggccgcgccgaggtggacctgcgggatctgcaccgcgaccagggccgcaggaagacgcagtggtataagttgaaatccaaaccaggaaagaaggacaaggagcgaggagaaattgaggttgacatccagtttatgagaaacaacatgactgccagcatgtttgacctttctatgaaagacaagtctcggaatccatttggaaagctgaaggacaagatcaaggggaagaataaggacagtgggtcagacaccgcctccgccatcatccctagcacgacaccttcggtcgacagtgatgatgagtctgtggttaaagacaagaaaaagaaatcaaagatcaagaccttactttccaagtcaaatttgcagaagacgcctctttcccagtccatgtctgtcctgccgacttcaaagccagaaaaagtgctgcttcgtcccggagactttcagtcccagtgggatgaagatgacaatgaggatgagtcctcctcggcctcggatgtcatgtctcacaagagaacagcgagtacggatcttaagcaactgaaccaggtcaactttacccttcccaagaaggaaggactttcctttcttggtggccttcggtctaagaatgatgtcctttcccgctctaatgtctgcatcaatgggaaccatgtttacctggagcagccccaacccaccggtgagatcaaggatagcagcccgtcctcctccccatcccccaagggtttcagaaagaaaacattgttctcttctacagagaacctggcggctgggtcttggaaggagcctgctgaaggaggtgggctgtctactgacagggatgtctccgaatcttccaccaaggactccttgaagtctatgaccttgccgacctaccgacctgccccactgatcagtggggacctcagggaaaaaatggcccccgcaaactcagaggccacaaaagaagctaaggagagcaagaagccagagagcaggaggtcctctttgctgtctctgatgacggggaagaaggatgtggctaagggcagtgaaggtgaaaaccttctcacggtcccagggagggagaaggaaggcatgctgatgggggttaagccgggggaggacgcatcggggcctgctgaagaccttgtgagaagatctgagaaagatactgcagctgttgtctccagacagggcagctccctgaacctctttgaagatgtgcagatcacagaaccagaagctgagccagagtccaagtctgaaccgagacctccaatttcctctccgagggctccccagaccagagctgtcaagccccgacttcatcctgtgaagccaatgaatgccacggccaccaaggttgctaactgcagcttgggaactgccaccatcatcagtgagaacttgaacaatgaggtcatgatgaagaaatacagcccctcggaccctgcatttgcatatgcgcagctgacccacgatgagctgattcagctggtcctcaaacagaaggaaacgataagcaagaaggagttccaggtccgcgagctggaagactacattgacaacctgcttgtcagggtcatggaagaaacccccaatatcctccgcatcccgactcaggttggcaaaaaagcaggaaagatgtaaatcagcagaaaaaaaacaccgagacgtttctgtgacttcactttcacctgctccaggggtcaaggacttgccttgcctgataaccagccagcaggctccgaatcaccatctccctcacatgttatccggcaagagt

SEQ ID NO: 23662 - DNA, 2450 bp, Homo Sapiens
gggtatatataacttttaaattatgtcaacttttctgtttgccaactagtatgtaagttccacaagggcaatgattttttatctgttctctagttatcctaagtaattagaatagcgcccagcccatagctggaacttatgaggaaatgaggaaacgagcttcagataatttaaataacttcccaagactaagttttatagttagttggtggagctagaatggaatccctgaagagtggctcaaaggcctttctctttaccatggcctgtgctgccttgctatactgatgccatgaagttagtccatcctgaggtctaaccccttttgatggtgtggaactcacatggggaaggcggacatttgcccacctgggccttcaactccttcacttggagctggcctctccccatcatgccagcttccctgtgtgtgaatgggtgtgtgtgtgtgtgtgaatggggtgtgtgaagtgtgtatgtgaatgggggtgtgtgtgaatggggtgtgtgtgtgtgaatgatgtgtgtgtgaatgaggtgtgtgtgaatggggtgtgtgtgtgtgaatgaggtgtgtgtgtgaatggggtgtgtgtgtgaatggggtgtgtgtgtgcggttgatgactatccgtgtgagaacacgggagttggggctgctccttctctttgcctccttgcccaggcacctgaggtcttggactcctgtcctaactctcagcccattagaggctgctgcctctggactagactcaggctctgacctcacactccatgcctaggatttcagtctggggtcccagttcccatctgccattccgggcttggtcatcagcctcttcccagaggcccaggatgggtggatttggcaggagtatggggaaggaaggaagagcttagcttccttccctgtggggaccctgtgaggcacagcagactgggctgggcctggtcctgggctccagcctccagcctccactcacaccctcctcttcctcaggatcatcttctccacgcccctggccgtcattgcctacttcctcatctggttcgtgcccgacttcccacacggccagacctattggtacctgcttttctattgcctctttgaaacaatggtcacgtgtttccatgttccctactcggctctcaccatgttcatcagcaccgagcagactgagcgggattctgccaccgcctatcggatgactgtggaagtgctgggcacagtgctgggcacggcgatccagggacaaatcgtgggccaagcagacacgccttgtttccaggacctcaatagctctacagtagcttcacaaagtgccaaccatacacatggcaccacctcacacagggaaacgcaaaaggcatacctgctggcagcgggggtcattgtctgtatctatataatctgtgctgtcatcctgatcctggggcgtgcgggagcagagagctctcggccactttaaccattcccatctggcagtggttcttgacccggtttggcaagaagacagctgtatatgttgggatctcatcagcagtgccatttctcatcttggtggccctcatggagagtaacctcatcattacatatgcggtagctgtggcagctggcatcagtgtggcagctgccttcttactaccctggtccatgctgcctgatgtcattgacgacttccatctgaagcagccccacttccatggaaccgagcccatcttcttctccttctatgtcttcttcaccaagtttgcctctggagtgtcactgggcatttctaccctcagtctggactttgcagggtaccagacccgtggctgctcgcagccggaacgtgtcaagtttacactgaacatgctcgtgaccatggctcccatagttctcatcctgctgggcctgctgctcttcaaaatgtaccccattgatgaggagaggcggcggcagaataagaaggccctgcaggcactgagggacgaggccagcagctctggctgctcagaaacagactccacagagctggctagcatcctctagggcccgccacgttgcccgaagccaccatgcagaaggccacagaagggatcaggacctgtctgccggcttgctgagcagctggactgcaggtgctaggaagggaactgaagactcaaggaggtggcccaggacacttgctgtgctcactgtggggccggctgctctgtggcctcctgcctcccctctgcctgcctgtggggccaagccctggggctgccactgtgaatatgccaaggactgatcgggcctagcccggaacactaatgtagaaacctttttttacagagcctaattaataacttaatgactgtgtacatagcaatgtgtgtgtatgtatatgtctgtgagctattaatgttattaattttcataaaagctggaaagcagctgcctgtttcaaaaaaaaaaaaaaaaaa

SEQ ID NO: 23663 - DNA, 2445 bp, Homo Sapiens
gcacaggctcccccagatgccctggccaggccaggcatgtgcccacttgcaagtctttatccttctcttaggttccctctggcatgcacttttctcctccacctgcccaatcccagacatcctcagagtctagcatctggtgacacttctgtgacactttccctgatccccagccagagggaactgctccccgctcctgagctccctgagcccctttccacacagaacacttagactgttgtattgcccctggttgtgttgggcccatgaccctcactggactgtgagctccttgaggacaggggcacccactttttcatcttggggaatcagagcccacatggtgctgcgtgcgctgttgaggcctctgtgcagcccgggcccatgtctgctgggatggggggaaaggtagggaggtaggtggggaggaggcagggggtctgatggagtagaatacaacaggcagctttcacagtggattgaagctgtgctttcagttcagcatatgctactgagcccctgccatgccagcccctgggtcagcactggagaagatgccctgtcccttcctcatggggcagcaaggaaaggggatgctttgcagatgaagacagatcctcctggggaggcgacgtgtggcacatatgcagttagacagggacagattgggcccagaagccagctgtcctgtttccagcagtcaccaggacccttgacccagggcctggtctccatgggtggggcaaagccctgctgactttattgtggggccggggggggggggggcggcgctggtttccagggcagcgaagggattcgaggcccatcaggcctgcctggctcccctgggccaccgggacctcctgggattcagggccccgccggtctggatggtttggatgggaaggacggcaagcctggcttgaggggggaccctggtcctgctggcccccctggactcatgggaccaccgggctttaaggggaaaacaggacatcctggcctcccaggacctaagggtgactgtggcaaaccaggtccccctggcagcactggccggcctggcgcagagggtgaacctggtgccatgggaccccagggaagacccggtcccccgggacacgttgggccaccagggcctccaggccagccaggaccagctgggatctctgcagtgggtctgaaaggagaccgaggagccaccggagaaaggggccttgcaggcctcccaggccagcccggcccccctggacaccctggccccccaggcgaacctggtacggatggtgcagctggcaaagagggaccccctggaaagcagggattctatggacctcctggtcccaaggtgagtgggcactggctgggcttgagaggagaagctcacgagtggatgaagcccagctgcaagttacggctttagccacagagaggagacacaggaaggccagtgggcagggggcaaaaatgcagaacttggagcaggatagtgtctgaaaatttctcacatggggtcattagctgtggttggggggaaggaaatctccagttcatttactcactgattgactgattgattcattcattgtttccatttcccgagcactcccttgctcctgctcacattccaggcccttgtcctggcctcagggtgatccaggagctgcaggacagaagggccaggcaggagagaaggggagagccggcatgcctggtggacctggcaagagtggttccatggggcctgttgggccaccgggccctgcaggagagagaggccaccctggagctccggggccttcggggagccctggcttgcctggtgtgcctggctccatgggagacatggtgaattatgatgaaatcaagaggttcatcagacaagagatcattaaaatgtttgatgagagaatggcttactacacctccaggatgcagttccccatggagatggcggcagctccgggacgaccagggcctccagggaaggatggtgctccgggcaggccaggtgctccagggtcacctgggctccctggtcagattggcagagaaggacggcagggcttgccaggagtaagaggattgcctggtaccaaaggtgaaaaaggggacattggtattggcattgcaggagaaaatggtcttcccggccccccaggtcctcaaggtcctccaggctatggcaagatgggtgcaacaggaccaatgggccagcaaggcatccctggcatccctgggcccccgggtcccatgggccagccaggcaaggctggccactgtaatccctctgactgctttggggccatgccgatggagcagcagtacccacccatgaaaaccatgaaggggccttttggctgaaattccccacctgcctttggatgaaagactccgttgggaataaatggccaaagcttataggacaaaaaaaaaaaaaaaaaa

SEQ ID NO: 23664 - DNA, 2630 bp, Homo Sapiens
ggtttttattctgtttattatatgtctctgtctctctctattgtgtgtgtgtgtgtgtgtgtgtgtgtgtgtgtgtgtgtgtggtgcagaagtgccacccccagggccctgtcaacctctcttttctcctccatggctgtctgcctgcgtatctgtctctgagaatcctcggggcggtcaggggatgtcaggaggggaaggaaccgccctccctatcttgctgctcctcttggcactcaggggcaccttccatggagccagaccgggtggaggggcttctgggatttggtgtctgctgctgccagagcaggaacccccagtctaggacttgggcattttaacagggagaaagtagtggcttcccttttctctctctcctcctttttccctttaagcccacagattcaggtcatgccaaaagctctctggttgtaacctggagacatgtggaggggaatggcgatgggattataggactctccccatctcgggccctgaccctgacccttgccaccaacccaaagacagctggtgggtttccccttggagacaatcctgcgtttgcctgggccggccctggctgccctcagctttcgctgatctgcccggcctggagcctcccatcaccccgcttcttgttgggcctcaggcactggttaccagaagggggtctgggtctgctcaggatcatgttttgtagcacctcctgttggaggggtggagggatgttcccctgagccaggctgagactagaaccccatcttccctgagccaggctgagactagaaccccatcttccccaccacgccacccctgtggctgctacaggagcacagtagtgaaggcctgagctccaggtttgaaagacccaactggagcgtggggcgggcaggcaggggttagtgaaaggacacttccagggttaggacagagcatttagccttctggaagaacccctgcctggggtgggactgtgcaggccagagaaggtggcatgggcctgaacccacctggactgacttctgcactgaagccacagatggagggtaggctggtgggtgggggtggttcgttctctagccggggcagacacccagctggctgggtccttcctcagccttgcctcctcctgtccccaaccctttcctttcctcctgcttgcggactgcttggtcccctctccttccctccttccagctgtttcctagttaccacctacccctggccgtggactgatcagaccagcattcaaaataaaagtttgttccaagttgacagtgtggtgctccctgcccagccctccaggtggaggtgctgccacgggaacgcagttcgtctgcctgccctggggcccctggcgacagctgggagcagggcagtgctgtgaggagcccagctttcccagtcaggcaggcatggcttccgtgttcaggctccctcaccagctggtgacacgggacaagcttacaaaccttctctgaacctcagttttctcatttacaagagcaaagccatccatcaccttgtgtggattcagagaatgtgaggccctggggtgtcctacacaagggaaaggcttgctcagtgagcggtctgcacaccgttagccaccctgccacctctgtgccctgggcatgctccaaaggaaagctctggctgggactgccaggagtctcacacgctcctgttgacattcccagcagccgcccctgaggtcgatgtttgttctgtttttctttttcttttttgagacggagtctcgctgtgttgccaggctggagtgcagtggtgtgatctctgctcactgcaacctccgcctgccagtttcaagtgattctctgcctcagccttctgagtagctgggactacaggtgcacgccaccacgcccagctaactttttgtattttagtagagacagggtttcgccatgtcggccagggtggtcttgatctcctgacctcatgatccacccgcctcagcctcccaaagtgctgggattacaggtatgagccaccgcaccgggcctgttctatttttctagttaagggaactgaagctcagagaggtgtcaccagcaggtgttcattcccatgccagccttgccccccggcttttcccaggcaggctcctgcgtgcccactggctccagcctggtcctctgtctcttggctgcttcactcctgctctttgtcccgactctggccctgcttacaggggccactacctgctggtgcctccataacaagcgtctggcgttgagacccctggcatggcaggggctttggggtctggtttccacaaggcttagccatggcagaacctcgttttattttaactctttgcccctacaaacaaacagcagtacttgccagaaccattcttgggattcaggagctcgggcgactgccttggcctctggccgcacccaggagggtggggttggatctgtgtagttgccaggcccacacctgccagcagggggctgactggatccatgctttactgtgtttaatgggggtaacaggggtccctacagccctcccagctaaacatttggaacaaaacaccagcccttttgtagtggatgcagaataaaattgttaatccaatcaaaaaaaaaaaaaaaaaa

SEQ ID NO: 23665 - DNA, 2371 bp, Homo Sapiens
ggtgagcgccacccggagtcccgcgcgcaactttcagggcgcactcggcggggcggctgcgcggctgccgggactcggcgcgggactgcatggaggccaaggagaagcagcatctgttggacgccaggccggcaatccggtcatacacgggatctctgtggcaggaaggggctggctggattcctctgccccgacctggcctggacttgcaggccattgagctggctgcccagagcaaccatcactgccatgctcagaagggtcctgacagtcactgtgaccccaagaaggggaaggcccagcgccagctgtatgtagcctctgccatctgcctgttgttcatgatcggagaagtcgttggtgggtacctggcacacagcttggctgtcatgactgacgcagcacacctgctcactgactttgccagcatgctcatcagcctcttctccctctggatgtcctcccggccagccaccaagaccatgaactttggctggcagagagctgagatcttgggagccctggtctctgtactgtccatctgggtcgtgacgggggtactggtgtacctggctgtggagcggctgatctctggggactatgaaattgacggggggaccatgctgatcacgtcgggctgcgctgtggctgtgaacatcataatggggttgacccttcaccagtctggccatgggcacagccacggcaccaccaaccagcaggaggagaaccccagcgtccgagctgccttcatccatgtgatcggcgactttatgcagagcatgggtgtcctagtggcagcctatattttatacttcaagccagaatacaagtatgtagaccccatctgcaccttcgtcttctccatcctggtcctggggacaaccttgaccatcctgagagatgtgatcctggtgttgatggaagggacccccaagggcgttgacttcacagctgttcgtgatctgctgctgtcggtggagggggtagaagccctgcacagcctgcatatctgggcactgacggtggcccagcctgttctgtctgtccacatcgccattgctcagaatacagacgcccaggctgtgctgaagacagccagcagccgcctccaagggaagttccacttccacaccgtgaccatccagatcgaggactactcggaggacatgaaggactgtcaggcatgccagggcccctcagactgactgctcagccaggcaccaactggggcatgaacaggacctgcaggtggctggactgagtgtcccccaggcccagccaggactttgcctaccccagctgtgttataaaccaggtccccctcctgacctctgccccactccaggaatggagctcttcccagcctcccatctgactacagccagggtggggactcagcgggtataaagctagtgtgaccctgctcttccagctcctgggccagctctggaagggctgtatttgggcctaatcctcagcaactgttctaccactcgcaggggcaaaggtggtgagccacgggacgtccaaggggaggctggccccagcgcgcccatactgcctgcctcatgccccattctcagcctggctggcctttgcctttatgaatctgagcccctccatctgcctatagcaataggcacgggggtgaggaccctcacactctcatttgagcctccctgaggcagggagccaggaggcacctgaggcctatctgtgccttagtcacttcagctatgagccaaatgttccctttcctggaggggagaggcttcttactaggtaagagacaggtttcctctttccttatttcctcagctgtgccaacacaaaaaacaactttggcacaggtggtgggcagggggtagagagatttcagcttgggttctgcactaacagcctccaagccccctggcacttctgttgccctgagagtgtcccaggggattcagagtctccagaaagatatggctgggccaactctgttgcctacctggcctgacccagtcggagcctgacatggtggagggaaagggagacaagtggggctgcactcggtccagaggccagctaggagggaaaccgcagcttcctggggcttgtgtgtgaagattcctgacttaggggtggcttttgtttacaagatgcaagaggggaaacctgtccccgactcatcgagacaacatgcccagttatcagggagtcctgtgtcacaaggtctgtctctgccattgtaagcaagtgccttgggcgagctggcctctgccccacagtttcatctgtacaccgacagggttgatgcctccctcacagggttgagaacaagagccagttggccaagtaaaaaaaaaaaaaaaaaaaaaaaaaa

SEQ ID NO: 23666 - DNA, 3401 bp, Homo Sapiens
gcttgacccatcctctacttagtcactcttatagagccctgcattttcttttgtagcatttatgacatgtgtaatgttacatttgtttgtgggattatttaaggaatgtctgtcatgtgagacaataagctttatgagtacaggcacctcttctgtcttatttcctatgccccagcacagtccctgacatctagtagaccttcaaaaagttttatggaatgaatgagtgaacaaatgatgcaaagtgttggttgcaggatatctctctcagtcttccaattcttaggagatcagaggcaagagctggtggcctttcaccgcctggctacagtgtactactccctgcacatgtatgagatggctgaggactgctacctgaagaccctgtccctctgtccaccatggctgcagagtcccaaggaggccctgtactatgccaaggtgtattatcgcctgggcagactcaccttctgccagctgaaggtaagagccagacttcccagatttcctgacagccaccacccaaccattctccttcctgactcaaagacaatgaggagcctttgtggtggagctgagaaaaccagagtgccaagatgagaagtcttgtctcatagggtgaggagtggctttacaggggacatggaagctctttccacttaaccctgctgaagatctcaaaggtgctcccatcttcgctgaggagtagaccatggttcctctttctccttgccttgccaccatgtctgtggcttctttatctgtcagatactacaggcacattgcctgtaagtctctcaagggcctatggaaatatacaagaccccaaaacaaaagaactataaggtctaaaatgaagatcaaaatgaatacttaagagtttgtccataaaatgttacagaccaactagtcaactgcaactcatttcttataaagtaatgtaaagctacattttatgagaaatgtgggtgcatattaacatgtttgagataacgaggtatggggcctttaaactaagtatacttagatcttaagaaggttttatccctgcttctcttgcttgctgaatctagaacttctttttttgcttgcttgctttttttttgggacagggtcttgctgtgtagcccaggctggagtagcatggctcaatcttggctcactacagcctctgcatctggggctcaagcaatccttctacttcagcctcctcagaagctgggaccacaggtgcacaccaccacacctggctaatttttgtatttttttgtaaagatggggtttcatcatgttgcctgtctcgaactgctggactcaagcaatctgccaatcttggcctcccaaaatggtgggattacaggtgtagtaggccattatgcccaccccagaacttcttattattttggtgacttctagagttgtgttggttgcaaatctctgttacaaccctgacccccaaactgtgtccctaggattggcttccttttactagaggtccctgtcccctgaagcacaacccttaatctcttaatatagtggcttctgagtcactcctgtgtttggcccccagggaaccctcaggcagctctgctgtccttttcttatttgccaggctttgcttctggcctgaattaattactgacttatgagggttaatggaaaccaggcagcctttttgagtctcacccaaagaagcatctgtttctcatctttaccatgtagggagggccgggggtagtgaagcaccctctagccatcttgcctctgccccatagctcccagtaagtggttcagggacaaagtgtgtgatctgatcatgtcaaccaagaactccacggattgtaaagggaaaaactcagttcaaacttccttaagcaaaaaaggcaacttactggctcaaagaatgtgaaggctgagctacaaatttaactgcagatagctctggatcctgtttctcaatcatcatcagggatttccccacctctcattgtattccttgactctgtatgtttctactttgctttgtttcttggccttttccccttctagctactggcaggttcaagtccacctctgaacctgccacttcagagggactattttccttattgagacacagtggaaagtcccagggagtggcagatgtaggccaagtttgggtcatgtacacatccctgaagcactgtgcccagggcaatgatgtttcatgattggctgagcctcagtaagggaccacctctgtgcctggagtgcagggcactgtgattagcaatgtcccaaggaccacagtggagggagagaggggctccctaaggactcaggagatggggattggatgttgggcaaacaaacaaacaaacaaacaaacaaaaaaaactagagtggccagcacagcctcctagcctgtcctggaagtgtttgctaatgctgtctcttctttgcccccataccacggggttaggatgcccatgatgccactgagtacttccttctggccctggcagcagcggtcctgctgggtgatgaggagcttcaggacaccattaggagcaggctggacaacatctgccagagccccctgtggcacagcaggcctccgggtgctcctcagagagggcgcggtggctgagtggtggtggcctggccctctgaggaaagctgtcctgtctctggacattgtgcatggccagactctgaccccactgccctaggctcttaaatactcattgggagggtccgagtccttacctgcctagccccctcatttcacaagaagaagaatgaagtccaggaggagaagggctcattgcaggccacagaaagatttgatggtgcagcgatgagaattcctggttccaggctttgcatctggagcctttaccggttgactgttgccttccacacaaacagcctctgaaaagcactttctccatacataattctggagaagatgagggatcttgccctccaggagccttccttcctcccccaatgaggaaatcagtcactgcactggtgcaaaggcaagcagattggaatttgtgctcttcaccgattttctcagggaaagaccccttccccttgccagcagaggaacctgtagttttttccatttctttcttcagaaccaaagtatgtatcactcctcatgctcacagggattgacaggagagaattcaccaggatcttagctcaaaagacacagcctcagaatggccagatggattgcacgaaacctgacttggattcaccatcttcctcctgccataaggctgtgctcccacataacctcccagaagctccagggaagctttccaagagcaaaggcttggaaattgaatgttaagaaaattatgacataaattacatgtaaatagtgaaaaaaaaaaaaaaaaaaaaaa

SEQ ID NO: 23667 - DNA, 2769 bp, Homo Sapiens
gcgcgggcggcggagggaggccggagcgggcagcgcggcggcgccatgtccgtgaacatggacgagctcaagcaccaggtcatgatcaaccagttcgtgctgacggcgggctgcgcggccgaccaggcgaagcaactgctgcaggcggcccactggcagttcgaggtgcgcggcgccggagccgggcgagggccggggccacgggcggagtgtgtcccgcgtggccgccgggcgggggcggacggcgtggacgcgtgccggctgtgcgccccctccgggccgcagacccgacccgctttcccgacggcggtgcccggcgtccggatcccaagggctcgcggcgggcggaggtgggaaccgggccaccggtcggggatacgccgcccccgcggccgcgagtcccccgggatcgagacggggaccccccccaccccttttgtccggtaacggccgaggccgggcggccccgcggtgcagacggacagtcgggcgggcggccggaaggaggacgccccaggcctcggcagagctgggccggagggcggagccgctccgggcgagtggtccgagggtccgcgtgcctggtgggcggtcggcggcgtgcgcacacgtccatgtgcatttgtgtttacgcacgcaccgcgccacggcgtcggccgggcaccggggaggtggcggacctgcgggcacgttggcgcgcgtgtgaacgcgcagccccctggtgcgtttggtgtgtgatcaacgcgtacacatgtggcgggtgtgcagatgccgcccgtgcccggcacggtgtgatgtgtgtacacggcctggagtgtaggggtggcgtgtcggagccccacactacaccacagggatgagcgtgtatccccttcagaggtgtgcctggggactccgtgtgcgcgactaggtgctctcctggggctggcaggggcatctgtccctttaccggtgcaatggggagggtgcacacggttcaccagctttcgggctagctgggtaggaggtgatgctgccccggtctggcacccactcccccgggcctctcctaacccataggacagtagtgctcctggcttgtgctgcccagaggctacctggctttccctaattcaccgaccccaggattaaccccatggtggttggtatcaggggatgaggccagagccctttgagctgtgcccctcacaggggtagggtcatggcctcagccatcccggtaccatctgtgcccagccggggactgggaacctggtttctccatgaggagccatcccagggcctgcaggagggactagaagccagaggactctgaggctccgcttcctggggactgcagggggatcagaatgtcccaagcttgggacagtctgggaaggcagtggccatcccatccagatgagtacatccctctctccttgcctacttccctcctaccagccgtcgcggaggccactgatcctgtgtggtgttcaccccaggacgtgggaggctgctctgtccctctggccttagtttccacatctgtatggtggggttggggggcatgagtcagcttctgttggccagcttactgccccctgtgccccaaggcagccccacccggaggaagctccctgcttccctcctggtctccacagccctcatcagccctgtttgtgtcaggggctggatgtggcaaaacttgcaaaaccgcattcatggcagtcacacatctgcacgcagggttccctccctgcctggggctgggcaggtaggtgtccggtgggaagcgggccctgcctgcaggactcagcccagccctcaaaacctggcacccaggccacatccctcagcggcacagttaattgaaaatgcagctttgaggagtgcaatgtctggggaaagactgttcccagaggggcaggagcatctggggcctctggtggctcccagggtccccatgggaggagccctgtgccctccactcccaagtctcagttgtgccatctgtaaagtgggggccgccagggaggctggaggaaggtgacgggacttcaggccttggaatggggctgagtgaggggttcacatggccaccccatccctctccacgctccacccgctggctgcatccaccaggcggtgtttctgggtcacatttgctgcaattcaggtgctaatgggggcaggaggctgcagggggaggggccggtgtctagtggggcagatgtttctcaatggagaatgctcacagcggcctgcagagggggtctggtgtggcctggggctcctggggttgggatttacacagtgagcctgggctttggggcacagctgctgctgacagagggtcttggggtctgggaaggtgcttaaagcccggcccccatgcctgagctcccacacccctgtttagggacacccagatagggtgtctcctgcaggaaattccccacataattcatttatttaaaaaatattttttgccgggcacggtggttcatgcctgtaatcccagcactttgggaggccaaggtgggcggatcatgaggtcaagagatcaagaccatcctggccaacatggtgaaaccccatctctactaaaaatacaaaagttagccaggtgtggtggcacgtgcctgtagtcccagctactcgggaggctgaggcaggagaatcacttgaactagaaggcaaaggttgcagtgagcccagataacgccactgcactccagcctggtgacagagcgagactccgtctcaaaaaaaaaaaaaaaaaaaaaaaaa

SEQ ID NO: 23668 - DNA, 4661 bp, Homo Sapiens
gcggcgcggtgcggcacggcacggtgggagtgtctccggctggcttgcagggagaacaccgactgagacctcaaaccctggctccagtgtcatggaatccgtcacctttgaggatgtggccgtggagttcatccaggagtgggcattgctggacagcgcacggaggagcctgtgcaaatacaggatgcttgaccagtgcaggaccctggcctccaggggaactccaccatgcaaacccagttgtgtctcccagctggggcaaagagcagagccaaaggcaacagaacgagggattctccgtgccacaggtgttgcctgggaatctcaacttaaacccgaagagttgccttctatgcaggatcttttggaagaagcatcctccagggacatgcaaatggggccggggctgttcctgaggatgcagctggtgccctccatagaagagagggagacaccattgactcgagaggaccggccagctctccaggagccgccttggtctctgggatgcacgggactgaaggccgctatgcagattcagagggtggtgataccagtgcctactctgggccaccgcaacccatgggtggccagggattctgctgtgcctgcacgtgaccctgcctggcttcaggaggacaaagtggaggaagaagctatggctcctgggctgccaaccgcctgttcacaggaaccagtcacctttgcagatgtggctgtggtgttcaccccagaagaatgggtgtttctggactctactcagaggagcctgtatagagatgtgatgctggagaactacaggaacctggcctctgtggctgatcaactgtgcaaacccaatgcgttgtcttatttggaagaaagaggagagcagtggaccactgacaggggcgtcctctcagacacctgtgcagaacctcagtgtcaaccccaagaggcaattcctagccaagatacttttacagagatcctgtccattgatgtgaaaggggagcaacctcagcctggagaaaaactctataaatataatgaacttgagaaaccttttaacagcattgaaccacttttccagtaccagagaattcatgctggagaggcatcctgtgaatgtcaagagattagaaattccttcttccagagtgcccacctaattgtgcccgagaaaatccgtagtggggataaatcctatgcatgtaacaaatgtgaaaaatccttcagatacagctctgaccttatcaggcatgagaagactcatactgcagagaagtgctttgactgtcaagaatgtgggcaagccttcaaatattcctcgaatctccggcgacacatgagaacccataccggagagaagccatttgaatgtagtcagtgtgggaaaaccttcacgaggaactttaacctgattttgcaccagagaaaccacacaggagagaagccctacgagtgtaaagattgtgggaaagccttcaatcagccatcatccctcaggagccacgtgagaactcacactggagagaagccctttgaatgcagccagtgtgggaaagccttcagggaacactcttcactgaagacacatctgcgaacccataccagagagaaaccatatgaatgcaaccagtgtggcaagcccttccggacgagcactcatctgaacgtgcacaagaggatacacacaggggagaaactgtatgagtgcgcgacttgcggtcaggtcttgagtcgtctttcaaccctgaagagtcacatgcgaactcacactggagagaagccctatgtgtgccaggaatgtgggcgagccttcagtgagccctcatccctcaggaaacatgcaaggactcacagtggcaagaagccctatgcatgccaggaatgcgggcgagcctttggtcagtcttcacatcttattgtacatgtgagaacacacagtgccgggagaccctatcaatgtaatcagtgtgagaaagccttcaggcacagctcctcactcactgtacacaaaagaacccatgtgggaagagagaccattaggaatggcagcctgcctttatccatgtctcatccatactgtgggccccttgctaattaacttccattttgtaaaaatataaacacatggggctatgactttccctcgtaatactcctttagctgcatcctgtgtttcaatgtataatattttcattttggtttaattgtaagtattgtcttaacctccattatcgtttattctttgacccatctattatttggaattagatttttcaaaactaatatgtggatatattttcatagaggtataatgacttatagtgaaatgcatacatctgaagtgtacagttggatgagtttgacagatgcatacatgcatgtaaccaccaccccattccagatatagaatgtttctatctctctggaaggttcctgcatgttatatggctatttcttagttgcctttttgttgttggtttctaatttaattacatggtgagaagagtatgtggcctctttgttactgagtcataggtatttgctgagatttgctattaggtctggtgtggcttattcttctagctgccaacccaaattaccccttcctccttagaaaagaacctgggttttctgttcagattggcagtgtgcactattaaaaagcttccatctcccggctgggcacggtggctcatgcctctaatcccagcactttgggaggctgaggctgggggatcacctgaggtcaggagttcgagatcagcctggccaacatggtgaaatcccctctctactaaaaatataaaaattagccaagtttggtggcatgcacctgtaatcccagctacttgggaggctgaggcaggagaattctttgaacccaggaggcagaggttgcagtgagccgagattgcgccactgcactccagcctgggcaacagagtgaaactctgtctcaaaaataataataataaaaaaaagcttccatctcccagcccttcttgcaagcaagggcaggccatttcctccggtcctggctagtatgaatatgagaagtcactggatgtgactctggggaagatattgtgttcagggatggtttcatgtagccacatctctccacttcttgccttttggacaagtagacatgatttctagacctagaggagccctcctgtgaccataagggtaaaagccgcaagctaagaagagggtggccggaagtcataaccatcttgcttctgtaatctaaaaaatatttaggatagatttaatagaattggcatatttatgtgattgcagcagccctggactatttatttctggatgtcccatacatgaaaaatatgcacttcttactggtacagttttcttttgtttgtttttgtttttggtgggaggtttatttcacctgaatataattcctaactgatgcacttagtatatgtcagtttttataaatgcttcatggatggttgaaatcaatgtattgtattctacaaatgtctgctagatcaagcaaatgtgtttaaaaaccatctacacatttataaatgttgatctgtgatctagcatttattgagagaggtatgttaaactctcccaccatgattatgtattgctgaaaaatctttgtcattctgtcagtttttaaatttatgtatatacatacatatatatgttttgaagcaatgaaattaaatatagatactgacattttttacatttccaacaaattgttacttttattcttataaagtgatcatccttttccctattactgaacattcaaccattcattgtaatgatagtaaatacttatttagagtttactattaatagatagtagccactgcctgaagctttgcatcttttaatttagtcctcacactgacactttgaggtatgtactgttatccccaattcccagatgaggaagctgaggcccagcaagttaaggtgggctatcaaagtcatctgggtggcatgtgacaggcctgactctctctacagtggcagacccaggggactagtctccatttttacttgttcttttttttttttttttttttttttttggttttaaagttctcttaggtataacttacataaacgttaataaatcttagggtacaccttggtgaattttgtatatgtctatacccaccacggtctccatcaaaatattttatcgtcccagaaatttcccttgggccccacctcatcctcaaaggttatcactattctgatgtctatcaccatagatttgtttttcctgttcatgtaaatggaaccataaacagccctcttgtgtctgttttcttcacttaatatagtgtcattgagatttatctatgttgtattatcagtagtttatgctttttaattgctgtgtaatagtccatagtctgaatataccacaatttaaaaattctattctgtttacaaacatttgagttctgtcctccaggttcatccatgttatcacaaatgacagaatttccttcctcatcaaggctgaatagtattccattgtgtagatataccacattttctttatccattcatccaccgatggacagttaggttgattccatatcttggctattgtgaataatcctgcaggttttattgttatgaataaagctgctgtgaatgttcttgttaag

SEQ ID NO: 23669 - DNA, 2134 bp, Homo Sapiens
aaattcccttactgagcttgctgagctccggggcccgcggagctcgcgccaggctcctgggaaaggacggggagtgttaccggggagcagctgctccattgtgcctcgaggccccgatcgggctaggccgacggcctccctcccttcacctttcctctcctggcggggttcggcggcgggcgagtgactgcggccacgcctgaaaggcgactctcctgattcaagatgaccaacgaagaacctcttcccaagaaggttcgattgagtgaaacagacttcaaagttatggcaagagatgagttaattctaagatggaaacaatatgaagcatatgtacaagctttggagggcaagtacacagatcttaactctaatgatgtaactggcctaagagagtctgaagaaaaactaaagcaacaacagcaggagtctgcacgcagggaaaacatccttgtaatgcgactagcaaccaaggaacaagagatgcaagagtgtactactcaaatccagtacctcaagcaagtccagcagccgagcgttgcccaactgagatcaacaatggtagacccagcgatcaacttgtttttcctaaaaatgaaaggtgaactggaacagactaaagacaaactggaacaagcccaaaatgaactgagtgcctggaagtttacgcctgatagccaaacagggaaaaagttaatggcgaagtgtcgaatgcttatccaggagaatcaagagcttggaaggcagctgtcccagggacgtattgcacaacttgaagcagagttggctttacagaagaaatacagtgaggagcttaaaagcagtcaggatgaactgaatgacttcatcatccagcttgatgaagaagtagagggtatgcagagtaccattctagttctgcagcagcagctgaaggagacacgccagcagttggctcagtaccagcagcagcagtctcaggcctctgccccaagtaccagcaggactacagcttctgaacctgtagaacagtcagaggccacaagtaaagactgcagtcgtctgacaaacggaccaagtaatggtagctcctcccgccagaggacgtctgggtctggatttcacagggagggcaacacaaccgaagatgactttccttcttctccagggaatggtaataagtcctccaacagctcagaggagagaactggcagaggaggtagtggttacgtaaatcaactcagtgcggggtatgaaagtgtagactctcccacgggcagtgaaaactctctcacacaccaatcaaatgacacagactccagtcatgaccctcaagaggagaaagcagtgagtgggaaaggtaatcgaactgtgggttcccgccacgttcagaatggcttggactcaagtgtaaatgtacagggttcagttttgtaatattttttcagcaaatttttatacagtgtcatttaatttgggagaggatactgtccagaaaattaatgcatacttttgtcacaatttgcctttttgtgggtgtacgttttggtttttttttgttgttttttttctttgtttttcttttcttttctttttttttttttgcttcaatacttctgccgctttggaaattgtaacagttaattactttgaatgttgctaaaaggacattttgtgtagggtcaagttatttttatatgagttaatgtgaaattgtaaatggaaatttttccttaaaatacaacacaatgatgtctgtataaatctgtctgtttagaatctgtgctgtgtaagggcattcgtactcatgctgttactgtacttatgcaccattcagacttgttagagtagatgtgggtttatgactgccaagtttgcccagtacagtagttttttatcactaaaagttggactcattgatggagtcctgtagtagtttcagtgttagatacagttttttccaccatacatctgtgcactttctctttaggtgactgtttaagaaatttgtgtgcatagttgctcagtttttatgaactgttgtatcctgttaatgcatattgctctgtgactccagtatatcttacctgtactgaccaaacctaaataaagatttttattgtaactccttaaaaaaaaaaaaaaaaaaaaaaaa

SEQ ID NO: 23670 - DNA, 46579 bp, Homo Sapiens
  misc_feature (1363)..(1363): n is a, c, g, or t
gctctatctgaaggctgagggctggacacctcaatgctggcacctgatttccccaagtgccttgggcttctctgacagtagtgatggtgttgtttagagatgcagaaaccacttcatccattgctctgagagagtcacgttctattcttcaggaagcatgcttacaacaccaacctaatttttaaaaaatctttcagaggccccttttttaagatgcaaaaataggccgggcgcggtggctcacgcctgtaatcccagcactttgggaggccgaggcgggcggatcacgaggtcaggagatcgagaccatcccggctaaaacggtgaaaccccgtctctactaaaaatacaaaaaattagccgggcgtagtggcgggcgcctgtagtcccagctacttgggaggctgaggcaggagaatggcgtgaacccgggaggcggagcttgcagtgagccgagattgcgccactgcactccagcctgggcgacagagcgagactccgtctccaaaaaaaaaaaaaaaaaaaaaaaaaaaaaaaaaaagatgcaaaaataatggagccacctatgcaaatagtggtcagctaccttttgggaattcctatacactttccttgtttgttttttgtgacttttccagaaagaactttgaggaaataaagaaataaaaaatgagaagtaaatggtattttgtgagtgactttctcaacacattctctaagaccaatgcagatatcccgaggtacctcacagatgggataggaaatcagtgctccagagatccagaatccttcttttctaggctggttgagtagagctctttgtccatgttgttgcagaaccatttttgtagccatccccagtggtgttgtcacctagaagaaacttgggggagctttttacccacatagcaccctcaatctccccagcaaatacagcttaaagaagttctagggccaggtgcagtgactcatgcctgtaatcctagcactttgggaggctgaggtgagagtatcgcttgagtccaggagttcaagatcagcctgggcaatatagtgagaccctatctctacaaaaattttaaaaattagccaggcatggtggtatgtgcctatagttcctgctaatctggaggctgggatgggaggattgctcgagctcaggtggtcaagggtacagtgagccatgatcacactgctgcactccagcctgggtgacagagcgaaaccccatctctttaaataagaaagaaaagaaagaaagagagagaaaggagggaaggaaggaagaaagttctcaagacaacccttttcaacagagtgctaccctaagtgcatgtgttatgggctaaattgtgtcttcccncaaattcatatgttgaatctgtaacctccaatacctcagaatgtgactgtatatagagataggggcctttaagaaattaattaagggttaaataggatcttaaggggtgggtcctaatctaatatggctggtatctttataagacaagggaaggacaccagggatgcaggcacacagaggaaagaccataggaacacataataaaaaggtagtcatcttcaagccaaggagaaggggcttcaggagaaaccatacctgctgacatcttatcttggacttctagcctccagacctgtgaaaatgaaatatctattgtgtaagccacccagtctgtggtgttttgttatggcagcccttgcaaacaaatgcaacctcccgcaaggaattgatggtgtgccattgctgcccctgcattcgtaacaggaatacaagtgggcagctcctgctcacagctcctgacaaacgtggaaaccagacacatgccccaccttcccttgggtagcatgtctcttcccaaagaatcttagatgagtcaggtgcagtgactacagcaaggaagaagacactatctctaggaaggaatggggttccaggttttgagcaaatctcacttctttctccaaaacagacattctttttatgcaggtgaaattacactaaagttaatatcagtcttcattaggagaaaattgaattaggataattaagtcttgaagaagaaaattaagccaaaaagaataatatggcagatacttgtggaaaggaatcttttttactattgattttgatatttgctcttaagttttgtatctagaacaaataacttgtggactattagtctggttgttttccataggagccttctgtgattttttgcagccctagttcctgacctgagctacctccatgtttacttctctaactcactgagtttgacgaacctgttgtttcccattacttagaggtactttattcatctgaagggcctaggaaagggaggcaagtttaacttcaatccaattgcatctaatttacaaattctgaactggaaactgactgaagaaaatgttgcactttcatttatgtccctgtgtgcctaaataaaacagcatccctcaatccatgctaacacatatattttctaggtgaactggacaaagttatactacttgttttatctaaatctgatttttttagaaaagggaaagtgttgcgatcgtgaactccacgttgagatgtcaggaatagataatttactgcatagttttaggagcactggactgaaagccaggggatttccctcctagttcttctatcctctggggctcaaactagtcttttgtcaaatgcctacaagatgaagtccatggattctttctttcaacaaatatctttttgccaagcacgttcaaggctttgctctttccagctgaactattctagaatttccattattttaaagcaactcttcagagtgtttagccccgagttgcaccccatttcagtttttgcaaccccatcctccagaagctcagggactactgaagagacatgaataacgctcctcaaagtaagtacaaaatgttacaagatagatgatgaattgtcagaacgtactcaaaagccaaaacataccgcctggcccaaagcagtaaaagacgaaaggcagggacccagcggtccccgcacccaccggccactgagcatagagcagtggcaagctcgcgcggcggagtgggaggcgcagagaccgaaagcactgcagcgccagagcgcgggctgaccaggctggcgtgaccgctttcccgacgcctgccacgccccgcggcggcctctttaagtagcggagccgcgggcggggccggctggcgttcacgtgacccggcgtcattggctcgctcgcggaagtagtcctacattcgcggtcagcgcggggtctccgggcgccctgcagggcgggcaggctgtgccatcccgccggacgtcgggatggtgcagctgtacaacctgcacccgttcgggtcgcagcaggtggtgccctgcaagctggagccggaccggttctgtggcggggggcgtgacgcgcttttcgtggcggcgggctgcaaggtggaggcgttcgcggtggccggccaggagctgtgccagccgcggtgcgccttctccacgctgggccgggtgttgcgcctggcctacagcgaggctggtgagtaatctagagagccaggggccgcctggggtccagcttgaggcctcctagctagcggaccgaacgtctgggctgtagctctagctagggatgggacttcttgcttcccggaatttgccggatggtctccctgggtctggccgctgattgcttgaagtcgcattgagctatgcggttgtcgcggcaagcataggtatgagcttgcttctgtcggggcggagacgctgacatctcttcgtcttggttttctgcagaaaggcctctggctggattccactcatctcggatacttaagcaaacaacaacaaaaaactctttagtgcatcagatttcaaagacttaccaaaaaaacaagtaggaataaggagactagtactgtatcccggaacctccaagtactcccagctttaacaattattccaactcttggcagttctttcacatctgtacctccatctacttccggtcggtttttgaaagctcacattatgtgttgatttttaaatgtgtgtaagtagaactcagactgcccccctctcttctcttaaacatctgtggccgggcgcagtggctcacgcctgtaatcccaacatttgggaggctgaggcaggcggatcacgatgttaggagttcgagaccagcctggtcaatttattgaaaccccgtctgtactaaaaatacaaaaattagccggacgtggtggtgggcgcctgtagtctcagctacttgggaggctgaggcaggagaatcgcttgaaccggggaggcggagattgccccattgcactccagtttaggcgacagagtgagactccgtcccaaaacaaacaaaaacaaacagttgtaagagcagccgttactctttcacaccagaaatgtgaagcaataccaaggaaatactgtgtgggtgaatcctattttagaaaaatccaacatttaaaactagatcccttttagattacagaaggatttaccatataattcctttaatacacttaccttctattcatactttacaagatgggtgtaaagttcagtatttacgttgcaaaagctggtggctatgctattaatgaagtggagaacttgaacctggaagattggagatctctctctaatccctaccccgcagctggttcggtgtgagtttatagaaaccttggggtctgagtttatgttaaaaaaaaaaacgaaaacaaaaagttgaataaatagatcagtgatatccagaccctgggatttcgtggctcaattaaaaactgtggggttaccatacatagtatctgactgcttattttgtcaagtaaagacatatacaggcataccttgttttttttgcatttcactttgttgtactttgccgatactgcgtgtttttttctccccaattgaaagtttgtggcaactctgtgtggagcaaatctaccagttccatttttcacactgcatgtgctcactacatgtctcttgagtcacattttgatagttcttggcaatatttcaaactttatcataattattgtatctattacggtgatcagcaatctttgatgttactattgtagtagttttggggtgccatgaactgtgcccatgtgagatggtgaacttaattgatatgtgttgtgtatgttctgattactgctctgatcgtctctgcctgctcaggctgccctaggccctgagacacaacaatattgaaatcaggccaattaataaccctacaatgtcttctaaatgttcaagtgacacttggacgtctctcactttaaatcaaaagctagaaatgattaagcttagtgaggaaggcaggcgtgtcagaagctgagataggctgcacggtaggcctcttggaccaaacacttagccaagttgtgactgcaaaggaaaagttcttgaaattaagtgttactccagtgaacacaaatgattagaaagccttattgctgataggaaaaaaactttgctctaggtagaagatcaagccagccaaaatactcccttaagcccaggcttaatacagagcaaggccctctgttcaactctgtgaatgctgagagaggtgaggaagcagcagaataaaagtttaaagctagcagagttcagctcatgaggtttaagggaagaagctgtctccataatataaaagtgcaaggtgaaacagcaagtgatgatgtagaatctgcagcaagttatccagaagtccagaagatatagctaagatgagtttatggaggcagctgtgctaaacaacagattttttcagtgtagacaaaacagtcttaaattggaagaagatgccatctaggactttcttggctagagaggagaagataatgcctggcttcaaagaacaggctgactcttgttagggggtgatgcagctggtgactaaattgaggccagttctcatttaccattctgaaaatcatagggcccttttaaaaattatgctaaatctactctgcctgtgctttagaatgaaaaaagcctgggtgacagcacagctgttacaacattgtttactgaatattttaagcccactgttttgatctactgctcagaaaacaatattcttttcaaaagattactgcacattgacaatgcacctagtccctcaagacctctgatggagatgtagaaggagattgatgttgtttttatgcctgctaacacagcatccattccgcagcccatggatcaagtagtaattttgactttcaagtctcattattaaagaaatacatttggtaaggctataactgccacagataagtgattcttctgatggatctgggcaaaataaattgaaaatcatctggaaagaattcactctttctagatgccattaaaaacattcaggattcatggaaggagatcagataccaacattaacaggagtttggaagtagttgattccaactctcatggatgactttgaggggttcaagacttaggtggatgaaataacagtagatgtagtggaaatagcaagaaagctagaattggaagtggagcctgaagatgtgttggaattcctgcaatcttatgatcaaacttgaatgggtgaggagttgcttctcatggatgaacaaagaaagtggtttcttgagatggaattgtttctattgaagatgctgggaacattgttcaaaagacaacgaagatttagaatatttcataaacttagttgataaagcaatgagaaggtttgaaaagattaactccaattttgaagttctgctgtgggtaaaatgctatcaaatagcattgcatgctccagagaaatcttttgtgaaaggaagagtcaattgatggagcaaacttaattgttttatttttttattttattttattttattttatttttttgagacagagcttcactcttgttggccaggctggagtgcagtggcgtgaactcggctcaccacaacctccacctcccaggtttaagcaattcccagcctcagcctcccaagtagctggggttacaggcatgcgctaccacttgtggcgaattttgtatttttagtagagatggggtttctccatggttggtcaggctggtctcaaactcccgacctcaggtgatccacccgccttggcctcacaaagtgctggcattacaggtgtgagccactgtgcccggcccattgttgtcttattttaaggatttgccacagccaccccagcctccagtgaccaccaccctgatcagtcagcagccatcagcatcggggcaagacccttcaccagtgaaaagatatgtctcgttaaaggcttggatgatcgttagcattttttttagcaataaaatatttttagttaaggtatgtacattgctttgtttttttgtttgtttgttttttaggtataatgcaatttcacacctaatagactataatctagtacaaacataacttttttatgcactgggaaaccaaaaaatttatgtgactctttttattgcattatttgctttattgcggtggtctggaagcaatcctccaatatctctgggatatgcctgtgtttttttttaaaaaaaatgaaaagccttactatttactgtcattatttataaaagaaaaaacacttagcatcaaacattggatatctttagctttgtgaacaacttactctgctgtcattggttttttgtttttgtttttgcctaatgacaacattagcaggggcctgcactgggccacggacctgtttgaaaaacctctcattaactctttaagttccctttcagcaggaatattccaattttggtattataaaatctgtctttaatggtcatacctgttaaaatattggtagttttctctacgtcactccttttaaggcataagagttctcactttcaagagttctactgagtaacaaactcaccactttcaacttttatatgtgtgtgtgtgtgagagagagaaagaaagacagggacagacaggcatacacacagacagataatatgtttacatgatttacttcattcttccaagtggatgtttattttagaatttggagtggcaggtattatgtaaacttctagctttcttacctgtcggatccttggatggccactacctatgcatacgaatcacttggggagtttttaaaaatctctatgcctgggccaaaccctcagagatacagtagtagtttccctggagtgaggacagcattggggtgagtcagatatttaatcagggttgagaaccgctgatctagagcagtactggctgcaggaggccatgagtagcattgtaacctcattaacgaggccttgaacaataaagatgtttttataatccagttggctgccttacagcaggttcaagagtcatgtgggatggaattagcatcacgggtcatgtagctcaagggtaagtttcagtccacagcttgaacttcaacccctgggtacagctcctattaatgcacccacaaatgaacataaatagagctgactctggctatgatggtatccagataacttgttttccacttcacagcttttcccttttggccccttccttccattcacaataactgggacatgaggattccggctcaatgcccagtgtcctcctctgtagcaagtctcctcctcaaaaatggaaagaatcttacatcagccatctatgtttactaaaaatgcttttcaggtctctactcaagcagaaaacattttcaggttaaaaaaaatctcaaattagctgaaagtttttaaaataaaatttgggggtattagggagaaagcaggtagaaattttgaaggatggggacctctgacatcgtcatcagtaagggaaaataaatttaggctttgtgtgtgatacggtttggctgtgtcctcagctaaaatctcatcttgaattgtagtccccataacccccacgtgtcaagggcgggaccaggtggaggtaattggatcatggggacagtttcccccatgctgtttctcatgatagtgaattctcatgagatctgatggtttttaagtgtctggcatttcccctacccacacttattttctgtcctgccgccctgtgaagaggtgccttccaccatgattataagttttctgaggtccccccagccatgcagaactgcgagtcaattaaacctgttttctttattacccagtctcaggtatttgcttgtagcagtaatgtgaaaatggactaatacagtgtgtaaagcaaagaagaggggagacctgagaactcctcactcctgaaagagaaagacctggtggccagggttgagtgctgtatggggacctttggtggtagacacttgtttatggggtgtctaggggtggtggggcatggaggatgcagaccacaaggctgtaattgcctggccattagcacaagtgtactaaaccagccccagcccatctacccctcccacaagccctactttctctcagttttcctggagtcataaaacatatttagatgccttataaattatttctgccttgtgattcaattttgtcataggagtacagcctttgatctggtattactgttagccatgtttgtgatcttgctacataaaagggaaagtttacttatttttaaaaatcagtaactctaagctcaagagtaaaaatgagaatgatttttcaatgtacttaataaagacagaagctgagcctgggctacatagtgaaaccctgtttctacatatgtgtgtgtgtatatatatacacacacacattataatatatgtatatacatatatatatacacacacacacacaaattagccaagtgtggtggctcacacctgtagttccacctacttgagaggctgaggtggaaggatcacttgagtccgggaggtggaggttgcagtgagccaagacaacttgggcaacggagcaagacacttaaatttaaaaaaggtaaaatgaggcactgcacacataaagcttaaaaaatttagttcccttctcttttaaagggttatagcctccacagactcctgtagagttgtatttcccttctatcagttggggaaacagcattactgggcaaagaacataaacttttgagctaaccagatctaggtttgagtcccagtttcctaatttgttcgttgtgttgccttggacaagttactttgcttgtctgtgcttcagattcctgatgtataaaatgaggagggagatttgtatcttaaagggctgttgtgagagttaattgaaggaactctaaagctctgatcataaggattgtcaggcaggcacatttagcaagtgctggatcatcatttaaagaccaggtcattaatctgaaagcacacaatacaacatggacactatctacaatttgcatactataaacattagttaatatatgaattttatagatgaaatgggcatgtatttataggtatatgaataaaaaggttttattgtaattaaatattcttagttttaaaatttatttactaaattatgataccaaaagtataggcaacagaagaaaaatagataaactagactttatcaaagttaatgactgttgtatatcaaaagactcatcaacagattgaaaagacaacatggaatgggagaaaatatttccgaatcatatatctcataagggattaatatctagaatatatacaataaagaactcttacaactcaacaacaaccaaaaaaacttgattaaaaaatgggctaaggacttgaatagacatttctacaaagaagaaaatacataaacggcaaaaaacataagaaaagatgctcaaaatcactgataattagggaaatgcaaatccaaaccacagtgagatagcacctcacacccattagtatgcctgttattaataaaacagaaattaacgtgttggggagaatgtggagaaattggaacccttaaacgttgctggtaggaatgtaaaataacacagcctatgtggaaaacaatatggcagtttctcaaaacattaaacatagaattaccatatgatccagcaattccacttctgggtgtatacccaaaataattgaaagcagggacttgaatggatacatgcacaccaatgtttgtagcaaaattattcacaagagccaaaaggtggaaacagtccaaggatccattgacaagtaaatgagtaaataaaatatattgtatgaacatacaatagagtattatttggccttaatgaaattctgatgcatgccacaacctggataaatcttagagaagttatgctaagtgatacaagcctgatacaaaaggaaaaatactatatggttcaacttacatgaggtacctagagtagtcaaattcatagagatagtataatggtggtctcaccctggggagagggaggaatagggaattattatttaatcagtgcagagttttttagtagatgaaaaagttagttatagagatggatggtagtgatggttgcatagcaatgagaagataccagtgccactgatctgtagacttaaaaatggtgaaaatgtacattttatgttgtgtgtatcgtactacaataaaaaaaatttatttatttactgggggaattttaggaagatggaggcctcaacttcatcccaactctgtccaaactgcttccctggaaaagtgaacaaacttagggcacctgcaggatctctttaggcattctacgatctccagggaaagaacaggttcaggctccatctctgtggcataaaaagaaccatcatcaggagaaagcttgctacctgtagaagtcaggatcattttggaggagggagcctggtcagcccagtgaatgtctgcagaaaggggcagcacctgtttgcttgcctcataagtacatgggaagtcaatgtaatggcagcatttcaatttcaattcatcggaaaagggccaatttgcttaatagtgttaatataatagagtctacatttggaagaagtgacattagatcctctgacttatctccttctttacccgcaaaattctaaagattaaaaatgtatattttctaaacctccactaaaatagaagaaaatataggagcatatttatgtaatttggaggacatggatgggaactcagaaggcaaggaggaaaagatacatatagtatactctaaataaaaagggtatggtaaaacatgccatcagcaaagtcaaaatcagaaaatagactctaaaaccatttactatttatagacgacaaaaggtttatatcccttttaagtagagagctacagtgtcatgataagaaaaacaaatgaacaacttaataaaaattggacatcatgcagaagagaaactatacatggctgataaacgtaggaaaagatggccagctttataaaaaggtctaggaaatgtaaattataatagccgtgagagtccatgtttctctcattgtgtagagtcagtgctagtgaggatgtggggaaacaggtgtgtttaagcactgctgctggtaacatgaatttctattatctaattgatagtaattgggcaatattgaaatttaaaatgcccatgccctttggcccaacatatctcacttttgggaatctgtaccgttaaaataaatcccccagtaaataaatatatagatataagcctatgtattactatgaaacatagtggcaaaaaaccctggaaatatatttgaatgcttatcagtaagggaattattgaataaattatgcgtatgtatgtacatatgggatgttgaacatattgaaaaggatgttagatatccatgtatcagcctggagggagagatttattaataatttttaaaagttgcagattgttaaatatatttaatatgattacattttagtttttgttcatttttaaaaaagacagaatacctctctgtgatctctgtttatatgagagaaaggtgttgaaaggcacataccaggctgtgtgttaacattgggtcctcaagggggagatcattatgcttttcattttgcatctctttaccacgttaccattttgacttcccacaaccaatatatgtttataagttaaaacttatacaatcaacaatttagagaaaattaacttggatctgtattttctttgctatttccaactttatcctgtttctcagacttgtgacttgtgggaaggagagggtttgaaatgtaaattctgctaatctgagaattccttaatgtatacctaattttggtgtcaccctaatagtgaattctgtgtcagtagagctttgttagaactgcagatttagagctacagtaaacacttaattttacattttattccttatatgaactttctgtatgttacatgggcaattaataggttgtcttaagacactcagatgggagagattgcatttcagaacctcaaagcctaatgtcagtcaaaaatacacctaagattttgttacttagggttttattctattcagtctttaattcgaccatttgtgttagaattcattaatagtactcatgtcagcaagggaggtggttgtatttctaattacaaattctcagtataatcttcattccttctcaggagattatttggtagcaattgaagagaaaaacaaagctacatttctacgtgcttatgtgaactggagaaataaaaggactgaaaactctcgtgtgtgtatccgaatgattgggcataatgtggagggaccattcagcaaagccttcagagaccagatgtacattattgaaatgccgctttcggaggcccccttgtgcatttcctgttgccctgtgaaaggagaccttctcgttggctgcacaaataaattagtcttatttagtttgaagtaccagatcattaatgaggaattctcactattggactttgaacgttctttaattatacacatagataatatcactcctgttgaggtttctttttgtgttggatatgttgctgtcatgtcagacttagaagtcttaatcgtaaaactggagtcaggccctaaaaatggagagagagttcaccaccatccacataagaccaacaatcgaataagacggacagaagaaggtaaataatgaatttgacttgctttcttgttttaggaatatagaaaaccttcacctttggcagtctgaaggtctgtggtatatatggtgcccggccatgttatttatagatttagttattcctatttcatgggatttggttttatgatctggctgtccatagcttactctgtagcatgtgaatatatttatcagtagaagtaatggaacaaccactgctagatgaggggcttctagtcctagtcctcatagttactagttgaatgaccttgggttaataataccatctctgagtttcaacatcctcatttgtaaaatggggatgataatacctaccctgttgtactttatcagttgtggagattaaatgagcaagtgctaagtcttttcacaaccacagtgccttgtaaatgtgtgcatattataaataaatgaaattactatatgtctaattggtgagaggatgttgtaaaatctaattttcattcaagcaggactgttacattttatttttttaaggcatcagtaatgaaatttcacagcttgagtcagatgattttgtcatctgccagaagcccctggaacttcttggtgaaaaaagtgaacagtctggattatctgttacactggagtctacgggattagctgatgaaaaaagaaaatattcccactttcagcacctgctctataggtattatagtgctttttttttttttaccagcattttatgtatatatgcctgcttaaagtacatggaagttatatttttccctttctctgtctttttaaacccacagacgttttgctcctgatatttcgtcctatgtcttgtctgatgacatcaagctacattccctccagctgctacccatttaccagaccggtaagcatgacagtgcaggagtgcgacagtgcagcaaggtgaaaatgctctgtctgggctgggagtgaagacccatgtgggtaataggtttggtggtttggttcttccactggagtctccttgtggccctttaacaaagtttttttttttgtttttttttttttttttttttgagactgagtctcgctttattgccagtctggagtgcagtggtgcgatctcggctcactgcaacttctacttcctgggttcaagtgattctcctgcctcagcctcccgagtagctgggactacaggcgcccgccaccaagcccggctaaatttttttgtatttttagcaaagacggggtttcaccatgttgggcaggatggtctcgatctcctgactttgtgatctgcctgtgttggcctcccaaagtgctaggattacaggcatgagccaccacacccgacctctattttattattatttattattttttttcttgagacagagttttgctcttgttgtccaggctggagtgcaatggtatgatcttggctcactgcaacctccacctcccgggttcaagtgattctcctgcctcagactcccgagtagctgggattacaggaatgccccaccacgcccagctaattttgtatttttagtagagatggggtttctccatgttggtcaggctggtctcgaactcccgacctcattgatccgcccacctcggcctcccaaagtgctgggattacaggtgtgagccaccacacccggcccaaaatccttagcaaatacctatgagtactagaaagggaagtcatacctgctaggagaagccatggagaaggcatgacagactgaactcatttccctttttgaaatggcctctaggcccaaaaaggaaattggagacctgttagagccaaggtatgtgtgggttctagctgggtatttggccaagcttcttatgattggcttgtgaattaggtgtaaaaatgtggactgaatggaaaataatttagagcagttgttttcaaccctgccacacaatgggcttacctgaatgctttttaagatattgatactcaggctctacatgcaagatatcagttacagggcctgggcattagtattttttaaaaactccccaagagtctaatgggcaccatgattgagaatcactaataggccctgcactcagttctggcctgattaacatctttagatgttatctagagaaagatacaaatattattccgattaaatgtgtttctaaccttcatttttttttcttttagtaaatatttattgagtacctactatgttgagcattgtgctgaatactagggaactaacagtgagtgaagtgcttgctcttacggagctaattgtctagtgggggaagggagacattcgaataacggcagattcacagttgtaccctgaaatgagtgatctgtggtaaacctccctgtgacagcctataacaaaagaccctgacctcatcttgaggtcagggaaggcttcctgagaaagaggatctgaagggcgaattggactcacttgggaatagggttgggttggtgcaggggaggggaagagagccttccaggcagaagcagcagcaaaggctctgttgcagagggaggatcacatctgagaaactgagagaagcaaaactaagggggctgcagtgagacagggctggagaccagacagggccaatagccatattagagggtcagctaaagatccagtgagcttcccatagcacttggaataaaaactccaaatccattccatggcgtatatgaccttaactctaagcccatcgtgtcccactctcaccctgcttactattcttcatccatagtggcctttccctcttccttagagacgccacaggcacgcttatctaagacctattatttgctcttcttgtgcgtagggtactcctctcagccttgtgtgactggtgcatttaagtcattcagttcgcagctgaagtgtaacttcatgacggaggacttctctgacctctcaatttaaaatatcccttctccactcacactggagtttacttgtttactctccatcccaatccccatcactagaatgaaggctctgtgaaagcagttacgttgttttgaacactgttgtatccctagaatctggaacagcagcacttagtaggtacctgatgaatgctgactgaatagacgaatggatgggtcatatgtatttgagctgggccgtaatggatgatagagattttggaaagatattacataatgggaaccaacattatatgaggtgtaaaattatgtgtatttggagattcgtgagcagttctctttggccagagcacagatatatgttaaaaaagaatagggagaaaaaaactggacagttgactttcagccaaatatggagagtacagaattggacttctgctattaattggtgtccttcaagggtgtcagtcagggtacttgttaaacaactttggttatgaaaaattacagccacatgtagatagaaaatagtgcagtgaacccccacgtacccatcaaacagcttcaacagtgttgctccatgctacattattttgatgcacatcccggagttcataccattgcattcataaatatttcaacatatgtctctaaaagtattcttttacttaaacccaaaatgctatttcacattataaaaaatttgttgccgggtgcggtggttcacgcctgtaatcccagcactttgggaggctgaggtgggtggatcacaaggttgggagttcgagaccagcctggccaatatggcgaaaccccgtctctactagaaaaaaaaaaaaaaaaaaattagccaggcatggtggtgggcgcctgtagtcccagctacctgggaggccgaggcaggagaatcgtttgaacccgggaggtggaggttgcagtgagccgagatcgtgccactgcactccagcctgggtgacagagtgagactccgtctcaaaaaataaaataaaaaaaattttgttgataccaccagatatccagtaagtgttcacatttctctaattgactaaaaaacttctgtaattcatttgtttgaatcatattccaaataaagttcatacattgcaattgattgctatgtcttttaaggctcttttaatatctaggctttccttcctctcttttctttgcatcttatttaacaagaaattagactctttactgtaaaatttccaacaatctgaattttgctaagtgaatccttacgtgtcatttaacatgtttctctgtccactgtatttccatttgagttggtagatggaaatctatgctgtttagtatggtagccattagtcacatgccgctattaagcacttgaaatatgactagtctgaattgagatatggcataagtataaaatacacactaggttttgaagactaagtacaaaaatgtatataatattaatttttgtgtttattgcttcttgaaatggtaatatttttgatatgttgggttaatacaatattattaaaattttacttgtttctttttacttttaaaaatgtgattactagaaatctagtaattgcagatgtggctcacatatttctatcaacattgctggtctatactcaggcttgctcagattatttattattctttttattattttgaaacccaagtagtgttgagctctgccagtggactctttttgtgatgttaacagccattgatgatcattacttagatctgttaatttagtaggggttgtacaatgccgatattctaattatattactccttttttatttcttaccaacattcttctataaagagcaacttcccctttgcaactctttggttacccactgatacagtttgcatagcaaagtcaatatatgattatttccccctttatttactggtttcatggtgttttatttctttcatttttgcatgcaggttctcttacatctgatggaaaaaatttgtctcaggaaaaagaattgctgagtctcttttgctttttctccttacctcatgtgggctatctctacatggttgtcaaatctgttgaattgatgtcagtctaccagtatcctgaaaagtctcagcaggcagtactcacgccacaatttttgcacgtcattacaaggtactgttagagggtcacttgctggcctgtgagtcacttatttgtaaatttttgaggtacttcctaaatctgtgagaattgtgtgaactagcatagagtactataaatgcatgagttacatgtcattgtaagtctgtcttttgatgacccatacctgccttttcaatgtcaaagatttagactctggttttgtctttgtttgtttccctagactggataggggtccctgtaaggaagtataaggttcttcataaaggaagactttcatagggagttttaatgaaaagtcaatgcagccagtcagagcgtctctttaagtttctttttagatttcctaaattttttttctcactgctaccatatttttctagtataaattgagttatttataatagtttagaactgtgaaggggccagagagatgatctgattctctccttgattggcacagatagggaagttgttacagagaggttagaattggccaaagtcatgtgctaattggtggcagatgtgttgagttgccttcccctattatgctggcatgtaaactgggttcacaagcagtagcttgatttcatttccttttaatctcagcagcatatgatggttttggttctatttcctgttttttgagcttagattatgttcagggcacttccttgtgccctctgaccatgcaactgtgaataagatacaccaaccactttctaaagcaacaatagaagagaaggttagagagacacacaagagtcacagacactaggagatttgcgaaaaatgtcttaagacctcatgaaagtgccattgacattgggaggagggaagttacttctggctaagttgtatggggaagttgtggatagctgattgtgtttgaagtgaagcatgaaagctagctagaattttggtagatgaagattgaaagagatgtgcattatagattgaaggaagactataaacaaaaactgtatcaagtttttaggaacatccaaaaattaattgcacaggacagagatcaccccaccactgagtggtagtatcacaatctctagcaggtgctggagattccaaactgcatagaaccaatctggagattctgatatccactcttagtggttgcactcccttctccacctgatttctggcttaaggagaaatgctgctgatggcagtgtgtttcttaagtgaacaatgtggaggtagctactctttccagtgtccaaagtgttgtgtagtgatgttctttaaatatgaagaagctgaaaagtagacaggtggtgaaaacagtgcttgaaaagagagctcaaggatttgaaaattaaactaaggacttttttttaaagttttaaccagagaaagtaatatgatcagaacattgttttaggaaaattaatggtggctgttgtggaagatggattgaacatagataaataagctattggaatagttcaggcaaggatattaaggggcggtattcaggcatggtagtgttaatgaaaggagaagggaggatgcatgggagaggcttcagtgggaaagttaaaagacttgtctgatgggataatggggatgtaggaggcatgaaaaatcccaccaaggttttgcctgcttttatgaaacaatggaggctggtgaaatgtggggcaaaagagatgtttggtttagacatttgagtttgagatgcttatagattatcaagacataatgctaagtaggcttttggacacatagaactgtagattagggtaaagaggaaagcttagaagttttactaccgccaaaaaaaaagttgattattaaagtagtgagagtatgtagatagtgaaaagttattaaagaattaaactctggtgaaggtcttgctcagcaagcaagaggagaaagacaaagatttttaaggatgcagaagaatctaggaaactataccatctcagaaacaatggaaaaagggaaaagaaaggaatatactaatttctgtcccatcatatagatgtaaaagactatccatctttttcccatctgattgcatatacttgaagtacactgagaatttagtgagtggacccactaaatctgttgccccatctctcttatttataagttatgtacatatttggagtgtagagccctgaaagcattatattatgggtttgaatggacttgtaatgcgtgggttttgactgcctccagacaggacatttttgagcttttcttattatcagcactaaaggagactgacatcattaacttcactgtgaaaccattagacattagaatagcagttgttttatgtaaattcagattcttaataagaatctccactcctgtttttcaaatcaaatcggagtttctcttttgttgcccaggctggagtgcaatggcgcggtctcagctcactgcaacctctgcctcccgggtttaagcaattctcctgcctcaacctcccaagtcgctgggattataggcacctgccgccatgcccgactaatttttttgtatttttagtagagatggggtttcaccatgttggccaagctggtctccaactcctaacctcagatgatccacccgccacggcctcccaaagtgctgggattacagatgtgagctactgcgcccggcccatcttttttattttacccgatagataaatgtttcaaaatctcttgtcccataaggtggtcttgaaaagtttctggaagataggtatacgcctaaagaaagcaatagagatttttttaagaagcaaagaacaaaataaaatcatgtaaaatgccaactttatagaaacgtgtaagtaggaaagccccccatgaaatcctattctcccagagttaagcatatcaagactttttttttttttttttttttgagatggagtgtcgctctgtcgcccaggttggagtgcagtggcgtgatctcagctcactgcaacctccacctccctggttcaagcaattcccctgcctcagcctcctgagtagctggggttacaggtgcccatcaccatgcccggctaatttttttgtatttttagtagaggcggggtttcaccatgttggccagactggtctggaactccagacctcaggcaattcgcccacctcagcctcccaaagtgctgggattacaggcatgagccaccatgcccggccatttttttttttttgttgttgtttttacaatgcatgtactactatgccttatttattacagaaattgatcatgctctgtccactgttcagcaacttgctattttacatagcagcatatcttggacatctttcaatgccagcacatttcagtttattctttctctagtatacatttctgcttaggattccaacagtagccaatagactggattcctacaggtggaggtaagtcagggaaccctgccttttttttttttttttttttttgagacagaatctcactctgtcacccaggctggagtgcagtggcacgatcttggctcactgcaagctccgcctcccgggttcatgccattctcctgcctcagcctcccgagtagctaagactacaggcgcccaccaccacgcccagctaattttttttttttttttgtatttttagtagagacggggtttcactgtgttagccagggtggtctcgatctcctgacctcatgatccgcctgtctcggcctcccaaaatgctgggattacaggcttgagccaccacgcctggccgaaaccctgcctttttatctctaaaatctaaaggctatttgtttttgcggtcatagctattctcatctgtccttccggtcccactgcaggtgcttttttgcttccctctctctcagtttacttcccaaggttgctaactctactccagatttgtaagtggtagtgctactgtcctagttattgtcaggactccagaggtcatttcctagaacgttgcagagatagacagagatggctgaggctgaagtggaagcaccagcagatggagagaggcctgactacctcttaaattgtgctaagcctcctaactgaaaatatcagaatgcctttttttatgaggacattttttaaatttaatattactgttaggtttgctttagtctttttttttattttaaagagttcgtttttacttctcccactttctagtttttttaaaaagggagggagaaggaaggaataaaaatatcaatttctgtcccgtcacataatggaacagaaatatacatcattgtgtagcaatttctaagttaattaactgtttttaatgtcaatattcgagggttgacctagataacaaccacagatgacaaccaggcatctattgtgcacttactgtggagtccctaggtcctttttgtatgcagaagcagcctggagttgtggaaagaggtagaggagtgtgaggggtcaggagacctgggatctaattggctctactctccagagaggcggtggaccagtcatgaacctttcatgccccaatctttaaaacaagctgctggactaggtaattctgaagatgccttcagatggtctctcattttcaattcgaccattggatttgagtttgcatagtctgtgttgtccagcataatccaggatggatttcatcatgaggtggttgaggaagaacaacagttaagaaatggattttactcttggttttgatagacacccatctgtaccttgggcaggtactgggggcatcatttgtctgtaaaatgaagatactgacccagatccatggttcctaactagggatgcacatcagagtcacatatggagttttgtagaaatgtacacgtccagattcagcccctagagattgcgattcactaggggtgttatggggaccagttgtatatttttaaaaacacaccacagggattctgaggcattcctcttattgagaagaagtttaacttggcaatatttgacaaatacttgactgtcacccctgcccattgccctgtttgcctgtgaaaccctccctgctgtgggtatgttggttcttggcctcactttgctcagcagcctgtgtcttcctcctcagtaacaacctgcagtgtttcactgtgcggtgcagtgcggcggcagctcgtgaggaggacccgtacatggacaccaccctgaaggtaagaactggcttatgaagatagtgaaaccttaagatcacaagggagcacatgaatactcgtagatttgctctcagacctaagctaggcaagaacaaaagagcttaaggttgtctaatgtattgaattagaacttttggatgtaaaatagtgaggattttgtgattcatggcttagttgacagtttttaagattgctttgcaaacatttcactccgaattgatttagtgcatagtttttaaagtttggtaaagaatataaaaagtgtgaactgagagcagttcacaactactgtatgctacaattttattttttatttttttgattttaacttttaattttttcgaggcagggtcttgctctgtcacccaggctggagggcagtggcaaagtcatagatcactgcagcctcgaactcctggactcaagtgatcctgccacctcagcccctcaagtagctgggactacaggtgtgcaccaccatgccctgctgattctttttgtattattattattattattatttttttttctgcagagacaggttttgccgtgtcgcccaggctggtcttgaacttctgggcccaagcgatctgcctgcctcagcctcccaaaatggtgggattacaggcatgaaccaccatgcctggcccaattgtattttactaaatggaaatactggtggcagttttacagagctgttaacaaaacagtccagaaatcaatatacttaagagcacaaaattgaatacgatgcattaaaatgatttatttatactattatcagctatgcctgtaattctgtattttataagcctttgataaccttctatacttaatcgaagagttaatggttatggtagatcaataatctcatttttagtgagaagtaaagtgcttggtttctaaaaaaaaaaaaaaaaaaaaaaaaaaaaagcctcttgaccacagaataaatgtaggcattattatgttgagattcggtgttttctgactttgaatttctgttctcagaaatacactgatcatttacattatattgatctatgttattttacttctgaagtataagctatttgaattggatatttgttaggaatatacatgctgcaagaagctcccaaattatcatgctctgtgtttcaaaaattggtttatatctgtctggaaactggaatacctttttccagaaggataagccttcagtaatggtggttatcttaacaagccagccccgacttagtgcctaatgtgtctgagatactctttcacggtcactgtcacccaaactgtgtcatatgatagtgttttatggcaagcatggtctctgagttcctagtgaccctttttaatggcctgcctgtggttttctgttgctgaccaggcttactgcctgctgtcagcctcttgggaaaccagaaccacagatttcctgtgcctttgtttgtataagatacacacatggcctttttgagagattactttaaaatcaggattatttcctttgtaaaaatagaaaagtaacagattaaaaaaataaaacttccattctttgtcctcttctttcccctccttgcgttttcaaacctcagaaagacataggcttatataggggtgatggtgtaatttaaagtacctaatagattgaagtaggatcaatgtacctttggaaaaaaaataattccatgtattttcagagtcttataaaaggcagaatgaaggaacaaggaagagacaaaggggagggataaggagaggtgggcatctggtggaggtatgctgcccttgaggccagtggaggtaggagggggaaggcataatcacacctcacggttcctcctttcctgggactccaccagttctgaagccctaggtgccagttaaacaagcacacgtttagcccacctgctgactcaggctttggagctgtgatgtctgaaaaaagtttcacaacctcaagagtctggttgaaagtgcttgtggtctgtctccttttcctctgagattctgactcctcagcactaaccaagccaccttaactatttttacatggaggtaacaatgaagatgacctcagaatcaaaacagcatgcatggacaagaaggcagggtcctggcagcatcattttgtgagctcccagaatagagctcttccattagttttcttattcattctacttgaattaatggtcctttacaagagcaaaaggctggctcctctagtttacctgacatgtcccagcctgtccgccattccaggcactattcgtacctaacagactaacagtcaggggccatcggaacatacaagcatttctttcacacacacatccgcaaagaaaccattttatgtactctacaagcagtagaatgtcctttcatagtgtctggtttttcctaaaaaccccatttgggcgtacccccaaccatcctgctagttgtgggggtttccctgggtggcagagtaccagcttcatctcctggaggtatctgtggagccactctgtggggcacacacacaagttcctgcagctgtgggaccctctttccgtatttattcaatcaatcaataactgagtttgttggctgagtagctctatggaatacactattggttacataggtttagataacctcttctgttaagaataggaatttgggttggtcttttgtttgtttgtttgttttttggtggtggtgggtatgggatggtggcagcagaagagatttgatcaaataaactgactgatttttgaagattgaagtgcatgtacctttatttcttgcttaaatatgtgattttcctttactaggcttgcccacctgtcagtatggatgtctgtgctttaagaatacagcttttcataggcttgaaagccatctgtcactttaaaaaccacatcatacttttgactaaagcagaacctgaagccattccagagagaagacagtcacccaagaggcttctgtaagcatccccttgccccaggcattcctgccagtttctggaatgagttgtaactggtatattttgtgtttatcttttttcaaatcataacttggaatgatcaaatggcttttttatggtggtctttttccagagaaagaaaagaaggttctaacaatctctgtaatacactttataactgacctggaaacttttaggagaaaatggattataaaatagtttcagtaaaaatcaaaggtgttttagattagttaaaggccatgcttttctgtgtaattaatgagaaagactgagcctataatgctaattgaaactacaggactttttactgtctttcttctttgaccctttcagttgttacatttttatctaaaattattttctgatattatgaaagaaattaataatgtatgtcttaccttaaagcacatttatgatctatagatatgtgctcatgtatctgaaaataaagttgtattttgataacattcatctcttgtatttattaggtttctgctttcccattgtttagaatagaatgcttaattccagactagttatgcttctatttgacgttttcctacttagtggtagagaatgcaatctaatttctctaaggaaaatttaatcaagaaagaaatctcttcagggagtgaagcatatagtgtatttcatatcaaacataggttatttttaacatagatttttactttttcaaattgttagtggctgtgctttgttgcatcaacaggaatcagaggttgactttggtaactgatcactttgagtgtacacagagtggtctggggctgactgatcctaaaagctttctggggagaggaaaagcagtttgtagtcttgcacatttgacattctaatagtataattttttaaatgatgttttaaaaattctaattcatttgaaaattcatttgataaacaattataaaagattgtacactaaagaaaatgtatcacatagtgaaagcaagagataagatagtgctttaagcagacttaacagttttatgtgtcttcatcatattctcagcagccatgatgttgcttctgcttagatttgtggctcagggcatgctagactcatgaaagtcaaatgcagaaaagagcctgggtatagggacttccgcagtcaaggatcttttcctcttgatgggacttgctgttctttgaaccttactgctcatttgagaatacttgcagagtgaattggaagcagttggtttatcattacatgaaaattacagaatattaaatgcagttagcctatgtagtattgtgaactaatattccatagaaatagagtgtacagttaatcactgaggaaaatagtaaatgaaaatgattttatagttattttatatccaatatttaccatttacaactaccatttattaataatgtcattttaaaattcttgtcctttgttttgcttttagttcgagaaaagataccagtgttaaaatcaaaatacctcctgtagctgaggctgggtggaatttgtatattgtgaatacgatctcaccagtgcagctgtacaaagagatggtactcttttcaaacttctgattcttgtttgtagatatttagagtgaaattaatgatcagaaattgattctaattatcatacattcaggatgccacagccattcagcttcctggctctgtctgacagtggaatgtatatctctctctgcctcctcattgttacagcttctgacatccgaggaaccagtagaaattcccttcactagcataagactcccttattcatacccactctcctaagaagatcgattggccaatctgaacatagtctttgaccttaatttgaactctagcaaagatagctaagaaatggagcaaataaataaataaataaataaatctaggattatgtatccctgtcccactcttcttatttagaaatgttagcacattgtcccagggcaccacagctactgcagcattgtcctggggggagggacccagagggagcatccttactgatctaagagtgacagcttcctactcatccctggcaattattttaactctttattttgaaacaatttcaaacttacagaaaagttgcaagaataagtatattcttcccaaccctttgggaggctgaggcaggtgagttgcttgaggccaggagttcgagactagcctgggtaacatagtgagatcccatctgtacaaaaaattaaaaaattagccagttgtggtggcacatacctgtagtcctagctactttggaagctaagatgggaagatcacttgagcccaggagttcaaggccacaatgagctatggtcgtaccactgcactccagcttgggtgacacagcaagaccctgactcttttgactcttttttaaaaaagaagaatattctatatattcccattccccacacagatttctccacagtcaacattttaccctatttgcttctctctctcttttatgcactctgtgctttctgtgcacacagatatacatacactgttttctgattcttcttcgggaggtaaactgcatacatcagtcttttgcccctaagtacttcagcgtatattttctaagaataaggatactctcttgcataccagaatacagtagtatgctttaataaatttaacattgacacagtgctttatctggtttatggttcatagtctaattttgtcaactgacccaatggcttgatagcatttccccttctccagttcaagacccagtctaggatcaggtagtgtgtttaactatgatgtctctttagcctcctttgaagctggaatatttctatagcctttcattatgttttatgacatgagcatttttgaaaaatataattttcccctctactttttttttgagagtattccttatttagggtttgcttttttttttttaatggttagattcagattatgcattttcagccagaatattgcataggtgatttttgtgttaagggtatcacatctggaggcacatgctgttcatctacccctctttggtgatgttaatttttggtcatcaggtcaaggtgttgcctgatttgtccctgccaataatttaatgccaattattatattagctgtgccctgtcttttcagtcttgcttaattgaaagtcttcgtttaggtgatttgaccgctagagtctgaatatattgattgagtcagattagctagtgataatttttatgagccctctatgagttatggaaatagatgtagtagagcctaaacttaccaatcaaaactaaaataagggaagaatactcagtctaaatttgagaaagaattaaatcacaattttttgaagtttatttcaaatattaacatgttcactagtcttactgagatcaaattgttgctaagtttacagtattattagtattacagtattatttggacctctgtaatgattagagctgtttaacaaggtattatttataatcatgtatgtattaaactggctcatagatggtgggaaaaaagccctacagctaagcccttgtcagaatggtgaataaccattttgtttgcttttagggtttaatatgtccaaatgttaactttactaacaaaatatataaatgtttttaagaactcaggaacttttgagagtctctcttcagcaacattagtgtttgtcttttttgtttaggtagactatagcaatacctataagactgtcaaaacccagagctgcattcaccttctcagtgaggctcatctgttagtgcgagctgccctgatggatgccagtcagctggaacctggagagaaggcagagcttttggaagcatttaaggaaagctgtgggcaccttggggactgttacagcaggtgggtgacacctcttggaaccttgttacagaagtcatcttgaactttgggtacacttgttagcttttccatctctggtagttacctgataaatgggaaggtggttcatttattcccttcttccacaagcatttgttgagcacatactctgttaggcactgtgctaggcttaaacatacaaaaatgaatgtgacccatttcctgctctcaaggagtcacagtttagaagatgagcagtaagtctcaagtttgtgattttcccaccatttaacttaggactttgacatttttctcaagctttgaaaatccctgacattaaaaacatatattttgttagtaaagttaacacttggacatattaaaccctaaaagtaaacaaagtggttgttttccattctgacaagggcttagctgaaggacttttttcccaccatctatgagccagtttaatacatacatgattataaatactaccttgttaaacagctctaatcattagagaggtatgactagtttattgtctgctaccttaagggagagctgccagttggacagtctgtgattttgatctcagtagtcagtgcttttatgatatcagaaagggacactggtatgaataatgtttttatttttgagagtaatgtttacaaatttttttgcatatgattgttttcagacttacttgatccacatgaatggttaaaaattaataaaacagacttttcctcctataaacaccattattttagagtccgatcatgaatattagaattaacttaaattgttgtttttgtttctattatgagcaggcaaaaagaaactgcattaattagaagtttgtaagataaaacttaggagtttgtttcagttactaatggcagtagaaaagcattttggaatttctatcttctggaaagcatgatatattctgttatagaatgtgttagatatccaggtttaaaaattccaaatttgactaggcatggtggcttacacctggaatcccagcactttgggaggctgaggtaggataatcacttgaggtcaggagtttgaaatcagtctgggcaacatagtgagaccccgtctttaaaaaagtgacaaatttgaggtttttcatttccttccctttaggcttgactcccagcattctcatctcaccttgccatactataagatgtctggtttgtctatggctgaagttctggcccgcacggactggacagtagaggatggattacagaaatacgagagaggattaatcttttacattaatcattcactttatgaaaacctggatgaagaattaaatgaagtgattatagttttctgttttctatctaatatttttaacatttcattttaatggtttattttatgtagtactgtttagaagtcagattccaaatatttttcttctttgatactctttttctaaaaaagtaatgtgaccttttcttcattaatgaagatagaattatagcttggaaaagaacttatggataatcttctcatactttctcattatacagacagggacatgtggtctgttgtagtctcaacacctgcccagtgacagtagcatgtcctcagtagagctacacagaatgcgggccttgccttccatcttctcatctgcagtccttcccgcaaccctaattgtcccttactccttgtgtcctaaacttcacttataaaactctgaccttaggccagtgacctaaagacattattaaggattatttttagggctgggcacagtggctagtatctgtaattccaacactttgggaggttgaggtgggaggatcacttgaagccagaagtttgagaccagcctaggcaatatagcaagatcccatctctacagaaaattaaaaaattagctaggcttggtggcatacacctgtagttccagctactcaggaggctgaggcaggaggatcgcttgagcccaggagtttgaggctacagtgagccacaattacaccactgcattccaggctgggcaatacagaaaaaccctgtcttagagagaaaaaagaaacgataacccctcatgtattttatacatagttggatgcaaatatgccacattagaaattgtggtatcaaatgttttaaggttttgaaatgaaattttctcatacaaattacttaattgggtatattttgaactaaatagtagtttttatgatggatttttattgtcattcaatcaaatgtttattttcttcttctgaagtgttaaaattagaaacgctggccataacctggtacatattttcattgctttttcttccttataatcagcaaagatcacttcaggttatctcaggcctcccatgtattagtatcagtttttgtctttttaaaattaaaacataatactataattttatcttacttggaatgtttgtgtcttggctttttgcacatatgttttgctgattttgttgctttcttctggctgactgaccttttattccttttattccttcgtgctcaccaaaggaattagcagcaaaagtggttcagatgttttatgtggctgagccaaagcaagtgccccatattctctgtagtccttctatgaagaatattaatcctttaactgccatgagctatctaaggaagctggatacttctgggttttcatcgatcttagtgacattgaccaaggcagcagtggctctgaaaatgggagatcttgacatgcacagaaatgaaatgaaaagccattcagaggtatggagctctgcccggtgctaacagaaggctgaaataggacctggtaatcctgaagtgtttagctgtcttctggcttctttctagcttatatattcttggttgtaatggaaaacagacaatattagaaacaaagtgatccaaatgggacttcggatctggcaaatgaaaaataaataagactgataaatgacagcagtggatatacaaagacttcaacttagtgtcaagtgcgttcagagcactgagcttggtactaaagaacaggctctgctcccgaggggacgatgtgatctggcatgagggatatggtgtgtgcactggaaaagcagagtagtatgtatttaagaacagcaaaggggatattagccatgagctttaggagtctagtagttgcagaaatagcccccgcttgggaaaatcacagattaagaggattggacatttgaatggtataccaagaaacacaggctttcccttggaaaagaggtcatttagggacactaccaaaggtgttaatcatttaagcgaagaaaataggaggtagtgtaattgaacacttattatttaccaggcctattctaagctccttgcatatatcatttaattcttaatactgctatagggtaggagtattatacaaatgaggaaattaagacacagagaggttaagtaactcatcaggatcacacagcagttaagttgtagagccagaattgaatcgggcagcctgatttcagaatctgtgctcctgcactgttttcttgccagactggccaaagcccacagtatgacttgggttgctaaaaaaggaagaacgtaagtgctttatcactatacaaatgacatgctttgttatgatgaggagagcaagtcaacatcggaatgtcttctgttttgaagagtagaattctagaaaaatgaattttatcttcataattttgaaaaaacttaagatatattagtcatcacttggtatttatgggagattggtttcagaaccttttacagttaccaacatccacagaagctaaagttgcttatataaagtggcatagtatttgcatataacgtatctactttttccaatatacttcaaatcatctctatattacttataatacctaatataatgtcaactgctatgcacatagttgttaatactgcattgtttagggaataataataaaatctgtacatgttcagaacagaagcagttcccccacaccctttttttttttttttttttttttgagagcctcgttctgtggcccaggctggagtgcagtggcgcaatctcagcttactgcaacctccacctcccaggttcaagcgattctcctgcctcagcctcccaagtagctgggattacaggtgtgtaccaccatgcttggctaatttttgtatttttagtagagatggggttttaccatgtatggccaggctggtctcgaactcctgacctcaagtgatctgccctccttggccttccaaagtgctgggattacaggtgtgagctactgcactcagccatcccgaatatttttgatctgtggttggttgaatccatgggtgtggaacccacgaatacagaaaattgactgcattttcaaatcaagtagacctaaatataaagctctctacaaaaaataggacaccttgattcttagttaaatgttagtaacttctgtaagacagtcagtggtgtcctttggataagaactagcctttatagtcaaagaaaaaattgtgattaaattattaatagcttaaccatgcattgtgaatgcactagcatgtttagtatttctaaaatggacaatctaaatacaatgtaccttttgttcctaaatttctttcttatctgaagatgaagttggtatgtggcttcattctggaacctcggctgttgattcaacagagaaagggacagattgttccaaccgagcttgcacttcacttgaaggaaactcagcctggattgcttgtggcttcagttctgggcttgcagaagaacaacaaaattggaattgaagaagcagattccttttttaaggtttgtcactttgaaaatgtgatttttctggatggcctcattaaattggtggtggggagggacagaataagagaagtgagtttttcatttgtttgtttattgaaaaaacagacatacataatcagtttataagataaaagtactaattaaaagactatatctgtagaaactttatttgtacatcctagaatctgtttccttttaaaaatgtctaaatttgcttttgccatggcgctaatgctaatggtaaattattgattgcgtggcccatgtgatgctgtgatattcagcccagctgtcgctttatcagtgctatatttatctggaatatagaggctccttttactgtttttaaggtgctttgtgctaaggatgaagatacaattcctcagctcttggtagacttttgggaagctcagctagtggcatgtctcccagatgtggtacttcaggaactctttttcaaactcacatcacagtacatctggagattgtctaagaggcagcctcctgacaccacaccattgcgaacatcggaggatctggtaagataatggaataataccttaaatttaactcatgcattgcccattacaaaaacataccttatttttaataacttattataaaatctaacctagttttctattaccaggtatcttatttatgcaggagttaaaaatacacttaaaatttgtctttaactgaagtggcctacattttaaataattttgtactctaaagaatgtcctctacttattaatgtccctcacttaattgcagtggtagctcagttgccaaagcatggagaaagggacttcttccagaacatcacctcatctgtccttcctcagcagaggatcattaagtggaacataagagagaagacatctgcagacctccttggtgggagaggaactgcagaaggctgtgggagggagactgccttagtgggcccccatttcctgtctgttgcacatacaggagctgttctgtggcacttgaggcagccagtaacaactctttctacccttcttgctaccgttcttgctcctagcccatttctgtcctagctcattagccatggctaatggagggttaagtggagaagttaccagcttcttgaataagcagggcttcttggggattgtcttgagaatttatgaaagatattttgccttctaaagaaagtagtattaataaaaattatttccaatattctttttaggtataattggcttaaatgcagtattgctctttttgctagaaagtgcctctttggagtatttacattttaaaatataaggaaatatttagtgtagaagcaagcaagactgaaatattttccaggggaaaaattcttaaaaactttccttcccattcccaggaaagtatatacctaattctatgacatggcagagaattaatgattgctttgctctttgtggaatggataagcaagcttttgttgttatattttgtttatgagaaattcttttatgttttagataaatgcctgtagtcattatggcttaatttatccatgggttcacgtcgtaatatcatctgattctttagctgataaaaattatacagaagatctttcaaaattacaggtaagtaaaaatacctccttttcttatgaaattgcatattccaatatagtgtaagattaaatttgctgagaccccaggtgtcctgttaatctagaatgtagaattctgagggacaaaatccatagttaggcatactcaggagacttggagggaatgcctgcctctgcctgaaactgatgatggttggaacacctgtgctgagcggctggttttgttgtaggtggatgaacgaacttcaccaagtctcctggctgatttcctcattttcaggatgggcttgaaaacactttgtgaaatgaaagtgtggcaaatgtttagtggtgtttttattgatgtagtttgtttttgttagtgttgacttacacattttaggtctctaacccaagccaggcactgctatttctcttataggaaacaggtcaaagtagttagtttatccagctcctgaaaaggatttttcagaaatgagggggatgattagagaatgtggatcatcctttaataattctgactgcaacagtgttttggctggcagtgagaattaaagtccacatttgacttggtggatcaggctgggccacatgagcatatgattttatttaatgtagttcagtggcccaaagaacgaatataattcccacatctgttttctttggtcttcccagtgtaggtgctaacatacaaaacttaagatttcctattaagaattctgagtttcaagtcactcttgaaaaatttagcagctccgttaacccaaggccctcattgcttctgacctgagggttggggctgacccgcagcccctccttgggcagtgctcacactgtcctcccgcacagttatcatctttgtggcatcctgacccaaatgctgagtgtctgttttccttatcctagctgccctcatgcatcttcatcatttgattggcctctttaggcttttgaatttgcaatacctcatttacactatgggaactacactataagtgtagttgttacttagtgtcaaattgggaatggggcttagaggagggaagctgaagaggcgctagatcagcctcaggtggggctgtggtgttcccagtgatggcattatttatgtgcttctttataaaataactaaggtagattcttcttgtctcttgtctctagtactattgtgatacaaaggcttctgaggggctagcctcagattttgttcatttcacgaatattgcttgagcatgtgctgtagatgtatggggagcattggacaagacagatggagctttgccttcctagatcatacacactaattacatatttaaaattgtaattggaataagtgctattaaattttccctgataaagctttaaagcatatttataatcattgcttgaaaaagtataattcagtgatcttttaaaatttgttttaaaatattttaaaaggaaaatatttgctattaaaggaggaaaatctttgctattaaaggagcaaaatctttgctgttgaaggagaaacatagtctgcctaaacttttataatttttttttttagagagacagtctcactctattgcccagattggagtgcagtggcagtcatggctcactgtaacctccaactcctgggctcaagcaagcctcccacctcgggttcccaaagttctgggattacaggtgtgagtcactgcacctgaccttactttcaaacttcttgattacatggataaaactaagtaaaagttcatgggtagttgaagttatgactactttcatttcagtcataatttggtacacatgctttgctccttcctactgcccccactcccttccccattatctggattagtcaagagttaaatatagaggtaatctattttctcccatgttgggagaccttttgagtgagagattatcaaccttatttcatctctgccatctgattgtcaggaaattattcacatgaataatttattaaacttgcaggaagaaaaggtaccaaccttattctcctggtcattccttggtagatatttggaataaaataatcacactgactgtgattgggtagatcacattccatattctcctgtgagtctcagaagatgctgtagcaaaaagggtacagggacaagaaaattaggacatgaccatctcatctttatcctggagaaagggaaagtggagattattttggtggtagaatcaaaagtagtatttatagtttaattgcttgaagtaaatattggtaaagttgtaaattctgagataatactgctccctgttattcatcttgtgacaaagtggtattgataacaatgattagttctaaacaatcactttagtcttattaagtgttaaattttatttttgcatatgtatgtagcacatgcttatagaaaatttggaaactacaggaaggggtgtaaagaaaacaaagagtaggctttgttgtcccatcctgtgtgctgtttcaaattgccatgctcttccgacagtatttctgtatgtgcatttacctatgtagattttataaaactgatcatgttcagaatataattttgtattgaaatttttttactcattttatcataaactttttttattaactagcctttgaaaacatagttttgatggctgtgtaatgttccattatctgagtgtgccatatgtatttactcatcctttgttgttaaacatgtagattacttctaaattttcaatattgcgaatactcttgcggtgaacatcattggacgtaaatctttaaccacaatgttgattattctcttaggatagagtcctaaagaatgcccattggttttaatttgcagtccacacaaagcaaataaaatcatgttatttaaaaatgattgctttctattaaagagatctttaaactagaggtagtttcaagattatattatacttagatttattaaataaggaccacgtgcatgtgctctaatatggcattctttctattttatttttggcaagtgaggtttagtcttaagaaattgaattctgcatgttgtgttttagtttttgaggtgcctcatttcataacatttcacttttctgttcatagtctcttatatgtggtccttcatttgacatagcttccattattccgttcttggagccactttcagaagacactattgccggcctcagtgtccatgttctgtgtcgtacacgcttgaaagagtatgaacagtgcatagacatactgttagagagatgcccggaggcagtcattccatatgctaatcatgaactgaaagaagagaaccgggtatgctttttcagattatgtttttaggcttgatcagtgataatcagatttgataacctcatttcctttcctgcaaaatggggacaatttatgctaatccaacatcataaggctgtgtgggtccattgagcatatatgtttaatatgttacgtgttttgagtactattaaatgctgttaaaatatatggagatggtatattatcatcattaaacatcttttgtttggagatgaagtagttgattacctgaagatttgggaacagtgtatgatgggaaaatattttctctgccatacggtttttagtttagaaattagaagaattttggaccttagttcttttttttcttcattccttccttcttgccacataggagatgataacgggatatgtctgttacttcttgaaaatagccatgtacatatgtacaatatatgtattactgggttttcaagttacgaacctgacttttacgttatagttaaggcagaagactggctgctgatataacttatgttataacaaagttagctgccttagacaaaatgatgtatttttgctctgtgctttcctgcacaatcttcttattctcctttgaaatctgagaataaaatgcatcaaactaaaatttattcattttttcctaagatagactctgtggtggaaaaaactgttgcctgaactttgtcagagaataaaatgtggtggagagaagtatcaactctacctgtcatcattaaaaggtaaaatgattttttttttgcttgattataaacttaagtttcagttttaaatttggtgaagccttcttaagtattttcatatgattctcaagtgaaaccgagggcctttcagaaccatctggggagcttattttcagcattcacgtaccctccccttgacatttgatattgatttatctcctagtcacagaactgatgttcttttaacttaatcctttcaaacacttaacaaattatcacagtcatagaaaatgacagcatcagtgttttaaaatgtgagtagtcattaaggcaattacatcttttatcaatgatcagagtacttaatttacttcatgtaggaagttaagatcattactattaaacataattataagcaagtattgatgaataacaacctcaaggatttaaaagttgagtatctaaattgtaccgtattttacagcatagtagttatttgaattttcataattcataatcataaatcttggtagatatgtaatctgtttctatactgctgtgtgttaatataattagttgttttcccaatgacaaagggtatgggtatatcaattgcagagcacataaaatattagaaattgacagtgttgaaattgtgttttccagccaagacagttgatttttaaaatgtaaggccgagtcagtggccactggagattatttttctgaagatccccctttaattaaagctgtatgcttgtgattgggaagggaaagggggaactttattctctgtcctacccgtctccctgattgctttaggttttcagaagatggaagtgtcagatgtctgattactttgccccacttgcatacactttacataatttatcactgactgtttgtgttagtggagcactttccagtacagacatcccacatctttacacctcagcatcatcattatcttaatcagaagactctttcttcatccttttctgatccacatccacacactccaccccaactcacccataatcattcctccaaatgttgcatttttctctgtcttcaaaatatatttgtgtgcatacgtgtgtgtgtgtgtgtgtgtatggctaatgagactaagtgccatgtgtgatttacctttattagactgtaatacctcaagagctggcatagtgttttattcattttttcaagctacacattcctcaccagcaatatgcctctcctataggaagcattctgtaactgttcattgattagaaagggagacagctgaagaactttaggttcgtttcacagaagggtgttttcttaacagttgtacactgaaaagagccctgtactgggatctggagaattggaactgagttccaggtttgccacttactaagtgtccgagagcaacccagttttctaatgtcgtgagactaaatgagaagttcaggactgaatcaaaagttaaatgttaggcaaaattgcaagagggagaggttggagatgaagctcagggacttacatgcttaggagtttggatttcttatctctctaatacagcatttttcaaccttggtaattgtccgtgtgcgtgggggtttcccctgtgcattttaggatattaaacagtatccctggtctctactcattagatgccaatactactgcctcagttataacaaacaaaaatgtctccagatgttgccagatgtcccctgtgggacaaaattttcctggttgacaactgccacactaatgcagaaccattaaaatgggttagtggatgggttggttgttttagggaaatattcagtactgtttttgtaatgaaccaggcttattttttaaaattctggtactgtggtaaattacaaaaattaaatttaaaaatcatttaaaatcccaccatccagaaattttcaacctttgacaaatattttctagacatgctggaagattttaagggtacaggtttacatttagatatatcatttatatgtaacttgtagatttaggtagctggtgagtggagtagagcaagtaattttaaccttctcttagcctcaattttcccaaccctaaatcaggcctaatacccattagtttaccctatttgggatggggcttggattaaataaataaaaacctcaaaggattctagaaggaattaaagagaagttatacatgaaagtgctttattaatttttaaagtactctgtgaatttaagatattgaccttcttggagtgataacctgtattagcccctccttatttgggagaagaggagaattgggaagtggtgagatttttgttgactctataacaactccacactagctctccaactcagtttttttgtttctgagatgctacttacaggctccacatttaggtaagtaaactgctttgataggaaaacatcaataattcatatttttcacatacattttgcaagctagttagtagttgctgtttattaaggtctgattttatgtcagatgtgcatcattgtattttagcttaattttcacgggaactgtggaagctagcagacagtaccactacattataaatgaggaacctaggacttggaagattaagtgactttcttaaagccactcggtgagttggtggaagagtctggatctcttcccaagtctgtctggattccagaactaggaatcttttctataaaccattgctgctttattcattaactctttagcaacaaaggcagttcattcttttgtgtaaagaaaaatttaggttgctgtatattggacagatgactttggaatggatcttatatttcacttactctgcaaatagagtaagcgatgggcatgcaacgatcacacagggaatggcactgacatgtggatagaagatgtaagaccaagtggatgtttattgggaacattgttcataactgtcacccttctattccgggagagggcagcatgtatctgttaagaagctgtagaatcataaagttgcattttttttaatgtatgttacattccttaatatttaaaatgttcactggggccaggtgcggtggctcacgccggtaatcccagtgctttgggaggccaaggcaggcggatcatgaggtcaagagatcgagaccatcctggccaacatggtgaaaccctgtctctactaaaaatacaaaaattagctggacgtggtggtgcgcacctgtagtcccagctatttgggaggctgaggcaggagaatctcttggacccaggaggcagaggttgcagtgagctgagatcgcaccactgcactccagcatggtgacagagcgagactccgtctcaaaaaaaaaaaatatattgttcattagaacaccattgcagtttgggggaaaaggaagtaaatggtcgtgaaaacagatttgtgcttattaacaacatgaaatgttacgttaggaactaatacgggaaaacattggtgtttcttatcctatcaatctttataaattagcttagtatagacatagcattaaaaagaatattcaaatgattgtacttttctttagaggatagtagaaattgattgcaaaataatatagtaattcagcaatgaaataataaatccaaatttcatgtggctgatataaaataaccttcaaaggattctagtaaggaaaaataagttacaaccttattgaagcctatggatttaagagactgatttttttctttgaagttataacattttgttacctgaactggcttcttttttttttttttttttttgtcctgagatggagtcttgctctgtcacctaggctggagtgcagtggtgcaatctcaactcactgcaacttctgcctcaagggttcaagcaattctcccgcctcagcctcctgagtagctaggattacaggtgtgcgccaccatgcccggctaatttttttgtatttttagtagagacagggtttcaccatgttggccagactggtcttgaactcctgacctcgtgatctgcccacctcggcctcccaaagtgctgggattacaggcgtgagccaccacgcctggcctgaactggcttctaattggttggttaagtaagaagagattgaatgaaagacagactttcaattctaattcagatattcttttctacacagaaacattgtcaattgttgctgtggaactagaactgaaggatttcatgaatgttctcccagaagatggtactgcaacatttttcttgccatatcttctctattgcagtcgaaagaaaccattgacttaaaggtatcatttgaaaaataccataatggcatttgagactgaatttctaaaaattgaatgccaaagtacaagtagaggagttttttattttatatatacacacacacacacacacacacacacacacacacacatatatgatacaaatgctttcaggctgcttaccttaccgtgtagtggtaactattcacttcttaatttatgacctcaatcaatttaattgtctagaatgtaaaaagtctttaagacataagaattcctcaaagaagccatacattttttaaggtggggattgacttttattccaaggaacaacatcagttcactgttgttggagacatgacaatcattttcatcccaagaacactttaaggaaacattttacaagtatgcttgaaagaatgtcactaactggtccagaattttatcttcttgatttttccagatttctctatgtttttgagaaagatgttaatgttttgccatggtaaaagatttcaaacctcattttttttgttccttttcttgttacttttaagaaaactcatgctctgtttctctgaatcaaatgaagtagaagtttacaaagctaactttcttcttgtctagctattaacatgatttgtcaaatgcatgtttttttcagccaaagccttgtttccatttttgttgatgtgtactcttgctcttttagctagagtgtatgtgaaaataaagaaatacatcattgtattcacaa

SEQ ID NO: 23671 - DNA, 2686 bp, Homo Sapiens
gaacaaacatggccgctctggcgcccgtcggctcccccgcctcccgcggtcctaggctggccgcgggcctccggctgctcccaatgctgggtttgctgcagttgctggccgagcctggcctgggccgcgtccatcacctggcactcaaggatgatgtgaggcataaagttcatctgaacacctttggcttcttcaaggatgggtacatggtggtgaatgtcagtagcctctcactgaatgagcctgaagacaaggatgtgactattggatttagcctagaccgtacaaagaatgatggcttttcttcttacctggatgaagatgtgaattactgtattttaaagaaacagtctgtctctgtcacccttttaatcctagacatctccagaagtgaggtaagagtaaagtctccaccagaagctggtacccagttaccaaagatcatcttcagcagggatgagaaagtccttggtcagagccaggagcctaatgttaaccctgcttcagcaggcaaccagacccagaagacacaagatggtggaaagtctaaaagaagtacagtggattcaaaggccatgggagagaaatccttttctgttcataataatggtggggcagtgtcatttcagtttttctttaacatcagcactgatgaccaagaaggcctttacagtctttattttcataaatgccttggaaaagaattgccaagtgacaagtttacattcagccttgatattgagatcacagagaagaatcctgacagctacctctcagcaggagaaattcctctccccaaattatacatctcaatggcctttttcttctttctttctgggaccatctggattcatatccttcgaaaacgacggaatgatgtatttaaaatccactggctgatggcggcccttcctttcaccaagtctctttccttggtgttccatgcaattgactaccactacatctcctcccagggcttccctatcgaaggctgggctgttgtgtactacataactcaccttttgaaaggggcgctactcttcatcaccattgcactcattggcactggctgggctttcattaagcacatcctttctgataaagacaaaaagatcttcatgattgtcattccactccaggtcctggcaaatgtagcctacatcatcatagagtccaccgaggagggcacgactgaatatggcttgtggaaggactctctatttctggtcgacctgttgtgttgtggtgccatcctcttcccagtggtgtggtcaatcagacatttacaagaagcatcagcaacagatggaaaagctgctattaacttagcaaagctgaaacttttcagacattattacgtcttgattgtgtgttacatatacttcactaggatcattgcatttctcctcaaactcgctgttccattccagtggaagtggctctaccagctcctggatgaaacggccacactggtcttctttgttctaacggggtataaattccgtccggcttcagataacccctacctacaactttctcaggaagaagaagacttggaaatggagtccgttgtgacaacatctggggtgatggaaagtatgaagaaagtcaagaaggtgaccaacggctccgtggagccccagggcgagtgggaaggcgccgtgtgacagagccgaccctgaggatggcactgtccaaggaaactgttaacttattcatagtcctattggacagcaggagcagctcctacagtgaactattggcaccaccgacagtgacaccagggcacatggctggagcacagtgccgcggaaacctgattttgtactctcttttatggaaacgatctgtggctgtttagaggcagctggatcctctttcaggcgggaatgggagggcgggcacagggaggaggagaggaagagaaaaggaagaattcatttttaatttaggtttctttttttcttcttcatttcggagctctaaggtgtatgcagttgtgaccccatgtgtggggaagtgtagcaaggacggctggtggagggggaaggagggtgcgaggtgtctgtctgatgctttaggaaatgtctactgaggaccctgggacttaagaagaagggcggggagagtgccattgcctgtttgggagacaaaaatgaacgaaaacaggtgactttggaaagcaaagtcaaaacccagtttaggatgtagcacctgccccaggattcctgccctcggctttgccccagacccttattccagatgctgagagtgaccaggacagcagctcctgaggcccagtggtcttctttccaacaggaaaagaaggctgtgatgtcgctgtcaggatcatgccctgtggcacagcacaggtggtgggaggtggttttctgactgagatgttgcctgatggatggaaagaaatgtatttttaagttcaaaaagcattatcctgtggcgttgcctggacatccactccctgacagcccagagcagcactgtctggcttcccttcatgcttgtggctttgttgtgtttgatcagaattttgggggaaatggaaagttttcctcaaggagcagctgggggcagaataggtagtatttaagcaaatacttaagtccaagcaaatcatccccattaaaaagcttttcctgtaggctagtaggaaaaaaaaaaaaaaaaa

SEQ ID NO: 23672 - DNA, 4310 bp, Homo Sapiens
  misc_feature (2600)..(2600): n is a, c, g, or t
cctgcggctcccccggctttcggagcccgggggcggcctgtggcgcgcggagcccgcgccggactgcgcctctttggaccttgaggggaaacatgcgtttgcskwggatcrwttgaaattctgagkytrggatmcsmgsccgccygcctgmytckkccgmsscgcgggytttttcstatttttccttttgctttttttccttttctccctccgggtctcctttttgactccctccccctttatgctcgcccagccctccccctgctgctgagaagtgggggagggtctcggcctccaggttcccgccccaccggggcccgggcgagcatggggggcaagcagagcacggcggcccgctcccggggccccttcccgggggtctccaccgatgacagcgccgtgccgccgccgggaggggcgccccatttcgggcactaccggacgggcggcggggccatggggctgcgcagccgctcggtcagctcggtggcaggcatgggcatggaccccagcacggccgggggggtgccctttggcctctacacccccgcctcccggggcaccggcgactccgagagggcgcccggcggcggagggtctgcgtccgactccacctatgcccatggcaatggttaccaggagacgggcggcggtcaccatagagacgggatgctgtacctgggctcccgagcctcgctggcggatgctctacctctgcacatcgcacccaggtggttcagctcgcatagtggtttcaagtgccccatttgctccaagtctgtggcttctgacgagatggaaatgcactttataatgtgtttgagcaaacctcgcctctcctacaacgatgatgtgctgactaaagacgcgggtgagtgtgtgatctgcctggaggagctgctgcagggggacacgatagccaggctgccctgcctgtgcatctatcacaaaagctgcatagactcgtggtttgaagtgaacagatcttgtccggaacaccctgcggactgacctgcgggcttgcttgctgactcctctcaaagggacagagcgcccctgctccagggaggaggctcaccggaccctggggcagagctgagcttgggacaccagcgggaacagggcaccccttctgcactgacttccagatcatggttctcccttcctccctgaggacaccaaattggatgagagcaagtttgagagaagaatgaatcaactgctatccttcccctcacccctcagcccaggagggaaagggcattttctttttcatctttgaaaggcattgtgggtctgtctttaaagtgtttacaaaaaaaaattatataaaaaaaaagtctagtgtcgactggtgttttccctcgtgatgtttacagcttgctgtttgctgcccagccataacccactcagtgacagacgaacacagctaaggcctcgctgccagccttctgacggcgggcgagcacacggtctcttcccctgccccaactggccctctccaccaccaacttctctactttgggtttgtttggttttttccctctatttttctggctggttttttgctcttttctccccttgagaccctaatatcttgacttcattgccaaaaaacaacccattgagaactttcttcctactgatcccatctcttttcccttctttcctcctggttccggtcagttcagaggatttaacaatcacaagtgtcctgcaaaaatgcctgaacattattcttaggccctcgtggatttttttttttcagaaaacttaaacaaaaaaagacttactaagaaatatgtacagctacccctgttttcaggcactatgtttgagaacattttagccattgatgttcacacgtggcatcagcccatgcaagataggtttctgtatttatatattaaaatacaaaaaaaaacttataaaatgtttaaaaaaatgttcaaagcttgggagaaaagctttcttcattagtcaaggtgttttgatatggtattaaaatgtctaataaaagatggcactgcgtgattttattttaatgraagtgttatacaatcaagaaatgggggcaagggsctgccccccactccctcacctacctccttagcattccttcaggctgctactcggggctccaggtgtgtgaattggtcctcagatagtcaggcctgggtggagggagtggcaagtcargcgtgcctcctacaagcttcctaacctcttaagcatcatggaaccagtcagccctctgtggagtcattgtgccggacctctgaaaagatctgcaggggccaaratgttgcarccaccsgaggctgcarggwtygtgggttcttccaggtgtgggcccagcccccctccttycagcctttgctccccatcccacgttccactckccctgcctggtgkttgcgtctcagtgcttgamtcacgggcatgcttcattgaggcccaggaagaggccctggtttggggctgtgccagcttcagagcccttgaaccagaaccaactgctcaggctcacaaaagttggcaaaatgcgggctgggcaggcagctcggggcagggagcagcagtgcaggcctggcctgtgntccccgtgcccagcgggycscggagcagcattccagagcctcctgcagagccagcgaaggaaagctctagagggagacgactccaccgcctctctgctctgacccttctcaggcccgcctgatgtgctggaccatccccctgctgccacggcccctggctccgcagtcaccctccatcagatgcttccagaagcacctactctgtgcaagggcattcacaacaggccagtgggcaaacgtgagccagggccagcggagaaacactaaagaagacttcggtggttcagagcctgggtctcagcgcgggacccgtctggggttgaagaccttkggggctkttgtgagtyggtggcaggaacgtgggctytagamtgtgcattcaggctctcctacttggcagaatgatcttggggaaacgacttcatctgaacttcagatatttcacatgtgaagcggggacaaaaccatgcagctcagaggtccctgtgggggctgggggagctgccctgcaggtcttggcacatgcacagcaggctccccatagctttgtcaccacaaagggcactgttctattcacagcacctcctgcttctgcctggcaactgtgtctccctgtgctatatttaattccaccagcaaagctgkcggaggcagggcccagcctgaaaggagatctccttgcctgacccctgggacctgggaaatggaggcttcatgtgcccgccttgsskyttaaagcctgctggctttggcagtgccatgggtgagccgagcagctgtgaggtgggtggggcagggctgtagccacgccgggtgctattccaggctctaggggctggtgctcatccccacccccagcgacttccgtcctacctggcatgctgcagccctctgccggctgtggtgtcctgaatttggacccaggttgcctgctcttgttgtgggggtgggattggggctgtctgtgtttcccaggtggagctcatgtttgtgatcctctatctggacagctctccagaatcctgtgttgcccctgttctgcctttctgggatgggagagaaggtgagggagccggcgagccaggttctaccctctctgctaagggcctagcacgctttgatgaggttcctggacgtgagaccctcacaaagaccaaccattcctctaatagccatttaacggtactgcagttcatgggaaaatgtcctcattcttaggagatagatgctggattatataggtgaatgccttcaagaaatgtgtaatttaattccaaatagttccccccaaaatacacaaagcaaataaggccaaaatgttcattgttgaatctgcagtggctggtatttcagtgaacagtgtacttgttctttcaacttttctgtatgtttggaatttttcttaataaaagattgtgggaaatggtcatttgctgagcgcctcctagttgccaggcactggagggcgcatcaaagaagagtcctacccaggagggagagcgcagctgctgcaggattctcgcctggaagagtgggtggctggctggctggctggaaggggaggggcgagagggctgtctcggtgatgagcacacgcgtgctggggtggtttggggagagggctgagatttgtcaccagtgagcccttggcacggtctctgctccccaccagggcagcacgggacagaaacgtcacggaggagtagcctc

SEQ ID NO: 23673 - DNA, 6140 bp, Homo Sapiens
gcggccgcagcctgagccagggccccctccctcgtcaggaccggggcagcaagcaggccgggggcaggtccgggcacccaccatgcgaggcgagctctggctcctggtgctggtgctcagggaggctgcccgggcgctgagcccccagcccggagcaggtcacgatgagggcccaggctctggatgggctgccaaagggaccgtgcggggctggaaccggagagcccgagagagccctgggcatgtgtcagagccggacaggacccagctgagccaggacctgggtgggggcaccctggccatggacacgctgccagataacaggaccagggtggtggaggacaaccacagctattatgtgtcccgtctctatggccccagcgagccccacagccgggaactgtgggtagatgtggccgaggccaaccggagccaagtgaagatccacacaatactctccaacacccaccggcaggcttcgagagtggtcttgtcctttgatttccctttctacgggcatcctctgcggcagatcaccatagcaactggaggcttcatcttcatgggggacgtgatccatcggatgctcacagctactcagtatgtggcgcccctgatggccaacttcaaccctggctactccgacaactccacagttgtttactttgacaatgggacagtctttgtggttcagtgggaccacgtttatctccaaggctgggaagacaagggcagtttcaccttccaggcagctctgcaccatgacggccgcattgtctttgcctataaagagatccctatgtctgtcccggaaatcagctcctcccagcatcctgtcaaaaccggcctatcggatgccttcatgattctcaatccatccccggatgtgccagaatctcggcgaaggagcatctttgaataccaccgcatagagctggaccccagcaaggtcaccagcatgtcggccgtggagttcaccccattgccgacctgcctgcagcataggagctgtgacgcctgcatgtcctcagacctgaccttcaactgcagctggtgccatgtcctccagagatgctccagtggctttgaccgctatcgccaggagtggatggactatggctgtgcacaggaggcagagggcaggatgtgcgaggacttccaggatgaggaccacgactcagcctcccctgacacttccttcagcccctatgatggagacctcaccactacctcctcctccctcttcatcgacagcctcaccacagaagatgacaccaagttgaatccctatgcaggaggagacggccttcagaacaacctgtcccccaagacaaagggcactcctgtgcacctgggcaccatcgtgggcatcgtgctggcagtcctcctcgtggcggccatcatcctggctggaatttacatcaatggccaccccacatccaatgctgcgctcttcttcatcgagcgtagacctcaccactggccagccatgaagtttcgcagccaccctgaccattccacctatgcggaggtggagccctcgggccatgagaaggagggcttcatggaggctgagcagtgctgagaacaccaagtctcccctttgaagactttgaggccacagaaaagacagttaaagcaaagaagagaagtgacttttcctggcctctcccagcatgccctgggctgagatgagatggtggtttatggctccagagctgctgttcgcttcgtcagcacaccccgaatattgaagagggggccaaaaaacaaccacatggattttttataggaacaacaacctaatctcatcctgttttgatgcaagggttctcttctgtgtcttgtaaccatgaaacagcagaagaactaacataactaactccatttttgtttaaggggcctttacctattcctgcacctaggctaggataactttagagcactgacataaaacgcaaaaacaggaatcatgccgtttgcaaaactaactctgggattaaaggggaagcatgtaaacagctaactgtttttgttaaagatttataggaatgaggaggtttggctattgtcacatgacagactgttagccaaggacaaagaagttctgcaaacctcccctggacccttgctggtgtccagatgtctgcggttgtcagccccttcctttcccccgacctaaacataaaagacaaggcaaagcccgcataattttaagacggttctttaggacattagtccaccatcttcttggtttgctggctctccgaaataaagtccctttccttgctccaactccttgtctctcaacgtattggctatgacgcagcaagcagaatgaatttggactcagttacaggctgtcaatggtctgctctgtagcagtctcagagcctccccgacccactacctggagatagccagatagccagatgccctgctcctggccacctttaaagcccctgcatatgacacaggttaactaaagtcaagattggggctgctgcattccaggttccctagactcacaagctggtccttggccaggtgcagtggctcacgcctgtaatcccagcactttgggaggctgaggcaggcggatcacctgaagtcagaagtttgagaccagcctggccaacataattaaaatgtctctactaaaaatacaaaaaattagctgggtgtggtgacgcttgcctgtatcccagctactcaggaagctgagacacgagaatcacttgaacctgggaggcagaggttgcagtgagctcagatagtgccactgcactccagcctgggtgacagagcgagactccgtctcaaaaaaaaaaaaagaaagcagaacctcatggctatagagttggcattttagccccagcttctgtagctctgaaagcctaaagaaggtattctctccatctgttaaacacagtatagtggctctcagcccttggggcatgttatcatgggagggaagtcaaataagaggagagaaaagaactcaagggggaaactgcatttttaggctttgctctcttaccttgccctttctactcagaaccaataacttctgcatcaaaacatgttacagcctgcatcaagggctttaccccaacctgcagcccagccttccctgggtgagcttgctatgcgcagccacatttaccatgtggggctccctattctgatggcctgttcggtgccgggtttactcactgccctgttctgatgtcagtgcctgtacatacctccaaaggcaggacttgcctgataaatatttttcctcctctgaactggattttataggcattaaagacaagtcgggtggctagagggctccttgagacatacctagcagggaactgcaggtggattctgttgagaggcaaagcacctgagtggttgggacacaggcagctggcatgggagggactttttttgagacagggtctcactgtgtcgcccagggcaaggatgcccaaagacaccaggttggagaggcacctgccaactacttgctttccctggagcctgcatgtgcctgtggggtggggaggcgtaggggtctacggctgcctgagatgggtgtgcacagtgtgtgaagtacctacctccttgccttgctggactgtcagccagtcgcagggccggccacaagacccatgtctccatctggtcatactccatagctaccaagttaacctgctctaaactttggagaactggatctgtccaataaacgcttatttggccaagcctgatggctcgtgcctgtactcccagcactttgggaggctgaggtgggagggttgcttgagcccaggggtttgagaccagcttgggcaacaacaacaaaaatgccaggtgtggtggggtgcacctgtagtcccagctactagggaggctgagccaggaggatcacttgagcccgggaggttgaggctgcagtggggggtcataatcatgccactgtactccagcctgggtgacagagtgagaccctgtctccgaaaaaaaaaaaaaaaaaagaacggaaaaagaaatgcttacattgtcagggatcctgtagacaatcattaactctatgagatgcttggttctatttttttgggagactttgtccaagtgttttggcttaagaaatccataggcctctcttggtgacacatctctagtactttttgtcataaacaaacaggccatctgccgccaaatacatccactccccatgccactgacatcctatgggtcagccaggcttgctttgactgaggccgaggcatctggaactttctctgcctgcaggggctagcagcagaggcttcaccgcatcaccaccccttcctccactcctgacattctttcccttcagggatccaaaatggttggccgagctcccagtgggaaaacgtgtgctagagttggggagtgagatgagtggtgctgtccatggaatcaggccacagcaggaactgccccactggccatttgagacacacacaggtggtaaatgctctgctggtgggctgtgcttccctcattcagagagctctgttacagcccactgtgtcctttagaagcttgaaaggaacccaactctttgctgcactgtcctttttcttcctcaaattcagaccctccttccaccggcacccccctactccaccctcagctcttccttgcctggtttatcaagcagagctgaggccccacgtttccaactctgattgtcacttgcatcttcacaaaggataaaccacggagcaactggaaaaccatcagccaagcgttcggatgagtctggttattggtccacccccgaccagattcccttacacttaactcacttctttctttggcaatgaccctcatgacatgtataaatgggtatgactaagaagaggctgtgatctaacatttatttgctgccattttttactctggggagaagcagccccaactcatcactgggaaagaactccccctgcaaaccagctaaatttgataatttaaaccccctgcccctaaaacttctcacagagctggggagttggtggcaactttccaagtcaaggtcttgcttagaaagtccttcactacatggccaggtgcagtggctcacgcctgtagtcccaggtacttgggagcctgaggcaggaggattgcttgagctcaggagttcaaggctgcagagagctatgatcatcccactgcatttgtttaaaaataaatttttaaaatttgtgtgttttatcaggggtctcctgtacagtgtatctgtgtatgtttgtgtgtgtgtttgtatacagccttgtttaatgttttgagcaataagatatgcacacacaggtattttgttgctaaagagattggacaaggttgtagctgtgctcaggcttcagcttggtttgttaaattgagagataaacaatgacaagagctgccagccaaccacactattcaaaaagcaaagtgttcaccactaaagctaaccattcatctggttgcaggcaaggctaaggctctctctcctctagttcctggaacagactcacagattggcatgaagcactgatcaggggctgcactcagactccctggccaagcaaacctacaccagaagagtcagtgtcacagatatgatgcggccaatctctgtctccaaaaacctacctgaacttaatggtagaattcaaagatctggggactgagggcacccagccttctaaaacacaatgtattcatgtgtttagtgtaaactctctgcatggattctcagtgttaataataaaaggaagcattcttttacaactcctgctgtgtgcaaaagaaagtgcaaaggatttggagtggcattccgaagatcaccacacataccttggttctgatggctgctgaactccgacttcttcgctgagacatgactgtgggaacagcctccagctatctgctcatcagaggtgctttcctcaacctcctgcaccacctccaagagaaacagcctaaaaagaaaccccagctgtttacttatattggtctgtaaatccctggaagtaaaccccatgcatttttatctactgtctgaggacatacaataaatctgagaaagtctatgctgtcaaaaaaaaaaaaaaaaaaaa

SEQ ID NO: 23674 - DNA, 7540 bp, Homo Sapiens
gtgagttacgccactatggcggacggggcaccccggccccagctttaccgcagcgtctcgttcaagctgctggagcgctggagcggcggccccgggctgagggaggaggacacggacacccccggcttgaggcgacgcgcctcgtgccggccgaccacggctgcccggggccagccctctcggcgcgtgtccaagctggcgtctgggcccctggccgcccccgcgcagccgcgcccgctccgcagcctctcgccgtcggttcgccagctctcccggcgcttcgacgcgccgcgtctggacgacggctccgctgggacccgagacggaggcgtcttacccgcggccgcggaagaagcggccgagggcccagcgcgaggagcctggcccagcgtcaccgagatgcgcaagctcttcggcggtcctggctccaggaggcccagcgccgactctgaatccccaggaacgcccagccccgacggtgccgcgtgggagcctccggctcgggagtcgcggcagccaccgacgccaccccctcggacatgcttccccctggcgggtctgcgttcggcgcggcccctgaccgggccggagaccgaagggaggctgcgccggccgcagcagcaacaggagcgggcgcagcgtccagcggatggtttacattcttggcatatcttctcccaaccgcaggccggggcccgggcctcctgctcctcctcctccatcgccgcctcctatcctgtcagccgcagtcgtgctgccagctccagcgaggaggaagaggagggcccgccgcagctgcctggagcccagagtccggcctaccacggcggccactcctcgggcagtgacgacgaccgagacggtgagggcggccaccgctggggagggaggcccgggctcaggcctggaagctccctattggatcaggactgcaggcctgacagtgatgggttaaatctaagcagcatgaactcagcaggggtttctgggagccctgagcccccaacatctccaagagcccctagagaagaaggactccgggagtggggtagtggctctccgccctgcgtcccaggtccccaggagggacttcggcctatgtctgactctgtgggaggagctttccgtgtggccaaggtgagctttccctcgtacctggccagccccgcaggctcccgcggtagcagccgttattccagcacggagaccctcaaggacgacgacctatggtctagtaggggttctgggggctggggcgtgtaccgctcccctagctttggagctggggaagggctcctgcggtcccaggctcgaacccgtgccaaaggacctggaggcacctctagggcattgagggatggaggatttgagcctgaaaagagtcgacagcggaagtccctgtcaaatccagatatcgcctcagagaccctgacgcttctcagtttcctgcgctcagacctttcagagctgagggtccgaaaacctggtgggagctccggggaccgtggaagcaaccccctagatggcagagactcaccatccgcaggtggccctgtggggcaacttgaacccatacccatcccagccccagcatcacctggcacgcgccccacactcaaggacttgacagccactctgcggagagcaaagtcattcacctgctctgagaagcccatggcccgccgcctgccccgcaccagtgctctgaagtccagctcctccgagctcctgctcacaggccctggtgccgaggaggatccgctgcccctcatcgtccaggaccaatatgtgcaggaggcccgccaggtttttgagaagatccagcgcatgggtgcccaacaagatgatggaagcgatgccccccctggaagccctgactgggcaggggatgtgacccgagggcagcggtcccaggaggagctctcaggccctgagtccagtctgacagatgaaggcattggggcagaccctgagcctcctgttgcagcattttgcggcctgggtaccacagggatgtggcgacctctttcctcatcctcggcccagacgaaccaccatggccctgggactgaggacagtctgggcgggtgggccctggtgtcgcctgagacccctcccacaccaggtgccctccgccgacgacgcaaagtcccaccttcaggttctggtgggagcgaattgagcaatggggaggcaggggaggcctacaggtccctgagtgacccaattcctcagcgccaccgggctgccacctctgaagagcctactgggttctctgtggacagcaacctcctgggctcactgagccccaagacagggctccctgccacctcagccatggatgagggcttgaccagtggtcacagtgactggtctgtgggcagtgaagagagcaagggatatcaggaggttattcagagcatagttcaggggcctggcaccctggggcgtgtggtggacgacaggattgctggcaaagcccccaagaagaaatccctgagtgaccccagccgccgtggggagctggctgggcctggattcgagggccctggaggggagcccatccgagaagttgagcccatgctgcctccatccagcagcgagcccatccttgtagagcagcgggcagagccagaagaacctggtgccaccaggagccgggcacagtctgaaagggccctacctgaggctctgcctccccctgccactgcccaccgaaactttcaccttgaccccaagctggctgacattctgtccccgaggctaatccgccgaggctccaagaagcgcccagctcggagtagtcaccaggagcttcggagagacgagggcagtcaggaccagactggcagcctgtctcgggcccggccctcctccagacacgttcgccatgccagtgtgcccgccacatttatgcctattgtggtgcctgagccaccaacttctgttggtccccctgtggctgtgccagaacccataggcttccctacccgagcccatcccacgttgcaggcaccatcgctcgaggacgtcaccaagcagtacatgctgaacctgcactccggtgaggtccctgccccagtgccagtggacatgccctgcttgcctctggctgcaccgccctctgctgaggccaagccccctgaggcagctcggcctgcagatgagcctacccctgccagcaagtgctgcagcaagccacaggtggacatgcggaagcacgtggccatgaccctgctggacacagagcagtcgtatgtggagtcgctgcgcaccctgatgcagggctacatgcagccgctgaagcagccagagaactccgtgctctgtgacccttcactggtggacgagatcttcgaccagatccccgagctcctggagcaccacgagcaattcctggagcaggttcggcactgcatgcagacctggcatgcccagcagaaggtgggagccctgctcgtccagtcgttctccaaggatgtcctagtaaacatctattctgcctatatcgataacttcctcaatgcaaaggatgctgtgcgtgtggccaaggaggcgaggcctgcctttctcaagttcctagagcaaagcatgcgtgagaacaaggagaagcaggcgctgtctgacctcatgatcaagcctgtgcagcggatcccacgctacgagcttctggtgaaggacctcctgaagcatacacctgaggaccacccggaccatccactcctgctggaggcgcagcggaacatcaagcaggtggctgagcgcatcaacaagggtgtgcggagtgccgaggaggcggagcgccatgcccgtgtgctgcaggagatagaggctcacatcgagggcatggaggatctccaggcccctctgcggcggttcctgagacaggagatggtcattgaagtgaaggcgatcggtggcaagaaggaccggtctctcttcctgttcacggacctcatcgtctgcaccactctgaagcgaaagtcaggctccctgcggcgcagctccatgagcctgtacacggcagccagtgtcattgacacagccagcaagtacaagatgctgtggaagctgccgctggaagacgcagacatcatcaaaggggcatcccaagccaccaatcgggagaacatccagaaggccatcagccgccttgatgaggacctcaccaccctgggccaaatgagcaagctctctgagagccttggtttcccccaccagagcctggacgatgcactgcgggacctctcagctgccatgcaccgggacctgtcggagaagcaggcgctgtgctacgcgctttccttcccgccaaccaagctggagctgtgcgccactcggcccgagggcaccgactcctacatttttgagttccctcaccctgacgcccgccttggttttgaacaggccttcgatgaggccaagaggaagctggcatccagcaaaagctgtctagaccctgagttcctgaaggccatccccatcatgaaaacccgcagtggcatgcagttctcctgtgcggctcccaccctgaacagctgcccggagccctcgcctgaggtatgggtctgcaacagcgacggctacgtgggccaggtgtgcctgctgagcctgcgcgccgagccggacgtggaggcctgcatcgccgtctgttccgcccgcatcctctgcatcggggcggtgcccgggctgcagcctcgctgccaccgggagcctcctccgtcgctgaggagtcctccagagacggcaccggagcccgccgggccggagctggacgtcgaggccgctgcagacgaggaagccgcgacgctcgcggagccggggccgcagccctgccttcacatctccattgcaggctcgggcttggagatgacgccgggcctcggcgagggtgacccccgcccagagctggtgccctttgacagtgactctgacgatgagtcttcgcccagcccctcggggacgctgcagagccaggccagccggtccaccatctcctccagctttggcaatgaggagaccccgagttccaaggaggccacggcagagaccaccagctcagaggaggagcaggagccaggcttcctgccactgtctggctcctttgggcctggtggtccctgcggcaccagcccaatggatgggagagcccttcgccgctccagccacggctccttcacccggggcagccttgaggacctgctgagtgtcgaccctgaggcctaccagagctccgtgtggctgggcactgaggatggctgtgtccacgtgtaccagtcctccgacagcatccgtgaccgcaggaacagcatgaagctccagcatgcggcctctgtgacctgcatcttgtatctgaataaccaggtgtttgtgtctctggccaatggagagcttgtggtctaccaaagggaagcaggccatttctgggacccccagaacttcaaatcagtgaccttgggcacccaggggagccccatcaccaagatggtatctgtgggtgggcggctgtggtgtggctgccagaaccgagtccttgtcctgagccctgacacgctgcagctggagcacatgttttacgtgggtcaggattcaagccgctgcgtggcttgcatggtggactccagcctgggtgtgtgggtgacattgaaaggtagtgcccacgtgtgtctctaccatccagacacctttgagcagctggcagaagtagacgtcactcctcccgtgcacaggatgctggcaggctcggatgccatcatccggcagcacaaggctgcctgtctgcgaatcacagcgctgctggtgtgtgaggagctgctgtgggtgggcaccagtgctggtgtcgtcctcaccatgcccacttcgcccggtactgtcagctgcccacgggcaccactcagtcccacaggcctcggccagggacacaccggccacgtccgcttcttggctgcagtccagctgccagatggcttcaacctgctctgcccaaccccaccacctcccccagacacaggccccgagaagctgccatcactggagcaccgggactccccttggcaccgaggccccgcccctgccaggcctaaaatgctggttatcagtggaggtgatggctatgaggacttccgactcagcagtgggggcggcagcagcagtgagactgtgggtcgagacgacagcacaaaccacctcctcctgtggagggtgtgaccctgtctgccgtggcccaggactcgcccgcccacctgccttcagcctgcttgcctctccctagcccacacgcagactttgaccaggagtatccagccaggggcacacatgtgcctgcgtgggctctgccttgtcttcgcggaagcattcctgatggaacacccactggccagccaggccatggcttctcccgaccctctggctgccccggtgcttccagtcatgatcgggtgggggacatgtgggctgaccaggacctctgaccctgggagcttctaccaaagacacagctgggtctggaccccacggggctggggagggccatgtgcaatatttggagggttttctggagggcagcaggaaggctggggaattccccatgtacagtatttatgtttctttttagatgtgtaccttcccaagcacttatttatgcagtgacctggtcacctggggtgggggtgatttgaggaaatgacatgaggaaaagaaacctattcctgccctggggaccaccctgggactctaaccaagccttcctggagggacccatgcgcccctgagccccattccattcatacagacacacacgtacgcacactgcatgtccaaggccctaaacattgcccgttgacataaactttccagggccccagcctgatggggctgccctcagtcctctagatcaagatgctgactattagggggcagtgattgccatctggggacctgtcaggctttgtcatttcccagtttgttggtggtgcctttagtggttccctaatttgggaacactgatggggccttggacagggctttctctcaggtaggagaaatgggcccatgatctcctcacagtcgcccccagtccttggccctgcttccctgtgtctcatgcactggcacatatggtcaccttggagggcagacctaggagcccctctgaccactgaatccgtctccacaccccttctgccaagggaagccccttcaggaaggaccccccaaagctgaggggctgaatgtagccttttcaacagagaaggctcccacttgagagcagcctctacctgaccccctggaccacagagagccactctgaccctcagccccctcgcttcttcagctaaaactccaaaggtttggtttcagatggggtttgttttgttctgtttggttttggttttgtttggggtgggtgggtcattgcggtcttagattatgtttctcttgctaccaaacagtcatgtattaactctctttggatgatgaagtttaaagagtcaataaatagaaacaccagatgactgcaaaaaaaaaaaaaaaaaaaaaa

SEQ ID NO: 23675 - DNA, 3319 bp, Homo Sapiens
tggaggagagaagatggcggaagcggagtgagtgactagatgatttaaggaccatagtacagctatggatactgaaccaaacccgggaacatcttctgtgtcaacaacaaccagcagtaccaccaccaccaccatcaccacttcctcctctcgaatgcagcagccacagatctctgtctacagtggttcagaccgacatgctgtacaggtatttcaacaggcattgcatcggccccccagctcagctgctcagtaccttcagcaaatgtatgcagcccaacaacagcacttgatgctgcatactgcagctcttcagcagcagcatttaagcagctcccagcttcagagccttgctgctgttcaggcaagtttgtccagtggaagaccatctacatctcccacaggaagtgtcacacagcagtcaagtatgtcccaggcttccagttctaccagcggcagtattacccaacagactatgttactagggagtacttcccctaccctaacggcaagccaagctcaaatgtatctccgagctcaaatgctgattttcacacccgctaccactgtggctgctgtacagtctgacattcctgttgtctcgtcgtcatcgtcatcttcctgtcagtctgcagctactcaggttcagaatttaacattacgcagccagaagttgggtgtattatctagctcacagaatggtccaccaaaaagcactagtcaaactcagtcattgacaatttgtcataacaaaacaacagtgaccagttctaaaatcagccaacgagatccttctccagaaagtaataagaaaggagagagcccaagcctggaatcacgaagcacagctgtcacccggacatcaagtattcaccagttaatagcaccagcttcatattctccaattcagcctcattctctaataaaacatcagcagattcctcttcattcaccaccttccaaagtttcccatcatcagctgatattacaacagcagcaacagcaaattcagccaatcacacttcagaattcaactcaagacccacccccatcccagcactgtataccactccagaaccatggccttcctccagctcccagtaatgcccagtcacagcattgttcaccgattcagagtcatccctctcctttaacagtgtctcctaatcagtcacagtcagcacagcagtctgtagtggtgtctcctccaccacctcattcaccaagtcagtctcctactataattattcatccacaagcacttattcagccacaccctcttgtgtcatcagctctccagccagggccaaatttgcagcagtccactgctaatcaggtgcaagctacagcacagttgaatcttccatcccatcttccacttccagcttcccctgttgtacacattggcccagttcagcagtctgccttggtatccccaggccagcagattgtctctccatcacaccagcaatattcatccctgcagtcctctccaatcccaattgcaagtcctccacagatgtcgacatctcctccagctcagattccaccactgcccttgcagtctatgcagtctttacaagtgcagcctgaaattctgtcccagggccaggttttggtgcagaatgctttggtgtcagaagaggaacttccagctgcagaagctttggtccagttgccatttcagactcttcctcctccacagactgttgcggtaaacctacaagtgcaaccaccagcacctgttgatccaccagtggtttatcaggtagaagatgtgtgtgaagaagaaatgccagaagagtcagatgaatgtgtccggatggatagaaccccaccaccacccactttgtctccagcagctataacagtggggagaggagaagatttgacttctgaacatcctttgttagagcaagtggaattacctgctgtggcatcagtcagtgcttcagtaattaaatctccatcagatccctcacatgtttctgttccaccacctccattgttacttccagctgccaccacaaggagtaacagtacatctatgcacagtagcattcccagtatagagaacaaacctccacaggctattgttaaaccacagatcctaacccatgttattgaaggctttgtgattcaggagggattggagccatttcctgtgagtcgttcctctttgctaatagaacagcctgtgaaaaaacggcctcttttggataatcaggtgataaattcagtgtgtgttcagccagagctacagaataatacaaaacatgcggataattcatctgacacagagatggaagacatgattgctgaagagacattagaagaaatggacagtgagttgctcaagtgtgaattctgtgggaaaatgggatatgctaatgaatttttgcggtcaaaacgattctgcactatgtcatgtgccaaaaggtacaatgttagctgttctaaaaaatttgcacttagtcgttggaatcgtaagcctgataatcaaagtcttgggcatcgtggccgtcgtccaagtggccctgatggggcagcgagagaacatatccttaggcagcttccaattacttatccatctgcagaagaagacttggcttctcatgaagattctgtgccatctgctatgacaactcgtctgcgcaggcagagcgagcgggaaagagaacgtgagcttcgggatgtgagaattcggaaaatgcctgagaacagtgacttgctaccagttgcacaaacagagccatctatatggacagttgatgatgtctgggccttcatccattctttgcctggttgccaggatatcgcagatgaattcagagcacaggagattgatggacaggcccttctcttgctgaaagaagaccatctcatgagtgcaatgaatatcaagctaggcccagccctgaagatctgtgcacgcatcaactctctgaaggaatcttaacaggaacatgaagccttgataaaacagcagttttacttttctcacaaaaacttgtaaggtaaaggcctaacttggtctagaatatgacacttattgtggtggatagccaagcacattgggatctccacatcaaatactgacatttcttctacaggtataataattcatcatgcattttcataattaataaacattggtaaaattaattttacaggttacatgaaacattgaaagacttgttacagagggccatgatatttttcaaagaaatgtgttatactagataatttttttaaaggtgatgtttatcattaatataaagaatccttttaaaagtaatttaatgatttacatttctcc

SEQ ID NO: 23676 - DNA, 1900 bp, Homo Sapiens
ttcgagaagggccgcatctacacctacatcggtgaggtgctggtgtccgtgaacccctaccaggagctgcccctgtatgggcctgaggccatcgccaggtaccagggccgtgagctctatgagcggccaccccatctctatgctgtggccaacgccgcctacaaggcaatgaagcaccggtccagggacacctgcatcgtcatctcaggggagagtggggcagggaagacagaagccagtaagcacatcatgcagtacatcgctgctgtcaccaatccaagccagagggctgaggtggagagggtcaaggacgtgctgctcaagtccacctgtgtgctggaggcctttggcaatgcccgcaccaaccgcaatcacaactccagccgctttggcaagtacatggacatcaactttgacttcaagggggacccgatcggaggacacatccacagctacctactggagaagtctcgggtcctcaagcagcacgtgggtgaaagaaacttccacgccttctaccaattgctgagaggcagtgaggacaagcagctgcatgaactgcacttggagagaaaccctgctgtatacaatttcacacaccagggagcaggactcaacatgactgtgcacagtgccttggacagtgatgagcagagccaccaggcagtgaccgaggccatgagggtcatcggcttcagtcctgaagaggtggagtctgtgcatcgcatcctggctgccatattgcacctgggaaacatcgagtttgtggagacggaggagggtgggctgcagaaggagggcctggcagtggccgaggaggcactggtggaccatgtggctgagctgacggccacaccccgggacctcgtgctccgctccctgctggctcgcacagttgcctcgggaggcagggaactcatagagaagggccacactgcagctgaggccagctatgcccgggatgcctgtgccaaggcagtgtaccagcggctgtttgagtgggtggtgaacaggatcaacagtgtcatggaactccggggccgggatcctcggcgtgatggcaaggacacagtcattggcgtgctggacatctatggcttcgaggtgtttcccgtcaacagtttcgagcagttctgcatcaactactgcaatgagaagctgcagcagctattcatccagctcatcctgaagcaggaacaggaagagtacgagcgcgagggcatcacctggcagagcgttgagtatttcaacaacgccaccattgtggatctggtggagcggccccaccgtggcatcctggccgtgctggacgaggcctgcagctctgctggcaccatcactgaccgaatcttcctgcagaccctggacacgcaccaccgccatcacctacactacaccagccgccagctctgccccacagacaagaccatggagtttggccgagacttccggatcaagcactatgcaggggacgtcacgtactccgtggaaggcttcatcgacaagaacagagatttcctcttccaggacttcaagcggctgctgtacaacagcacggaccccactctacgggccatgtggccggacgggcagcaggacatcacagaggtgaccaagcgccccctgacggctggcacactcttcaagaactccatggtggccctggtggagaaccttgcctccaaggagcccttctacgtccgctgcatcaagcccaatgaggacaaggtagctgggaagctggatgagaaccactgtcgccaccaggtcgcatacctggggctgctggagaatgtgagggtccgcagggctggcttcgcttcccgccagccctactctcgattcctgctcaggtactggcacctgacacccatcactccatgggccatagtccctgtgt

SEQ ID NO: 23677 - DNA, 4502 bp, Homo Sapiens
ggagacaccggaaggagccgcggctgctgcgggaagtggccagttcaggaggcggaccccccgagggcagcgctgcggggccgttttccggccctcctgacgcgacactgcccctctccgagagctgagaaggaaaagaggagcttgcggaggtgcggctgcaggccgttgttggtcgagctggcgggtcccgcgggccaggccgtggagagctcctgaaggaagcactaaacatggaaaggaacaaccggtaccagccactgcaaaaacatgccaaattgtaaagaccatcgatgttaggaagaaactgcctcaactaatgagcaaaataaccagctaacatcgtaatgacaggatcaaattcacacataacgatattaaccttaaaggtgttacctcattttgaaagtcttgggaaacaggaaaaaattcctaacaaaatgtcagcttttcgaaatcattgtccacatttggattcagttggtgaaataacaaaagaagatttgatacaaaaatcccttggtacttgtcaggattgtaaagtccaaggaccaaatctttgggcatgtctggagaatagatgttcatatgttggctgtggtgaatcacaagtagatcacagcaccatacattctcaggagacaaagcattatctaactgtgaaccttaccactcttcgagtatggtgttatgcttgcagcaaagaagtatttttggataggaaattaggaactcagccttcattgcctcatgtaagacaacctcaccaaatacaagaaaacagtgtccaggattttaaaatacccagtaatacaacattaaaaactcctctggttgccgtatttgatgatctggatatagaagcggatgaagaagatgaacttagggccagaggtcttacaggtttgaaaaatattggaaatacttgttacatgaatgcagctttgcaggctctttctaattgcccacctttgacacagttttttcttgattgtggaggactagctcgaacagataagaaacctgccatttgtaaaagttatctcaaactaatgacagagctgtggtataaaagcaggccaggatctgttgtgcctactactctgtttcaaggaattaaaactgtaaatccaacatttcgggggtattctcagcaggatgctcaagaattccttcgatgtttaatggatttgcttcatgaagaattgaaagagcaagtcatggaagtagaagaagatccgcaaaccataaccactgaggagacaatggaagaagacaagagccagtcggatgtagattttcagtcttgtgaatcttgtagcaacagtgatagagcagaaaatgaaaatggctctagatgcttttctgaagataataatgaaacaacaatgttaattcaggatgatgaaaacaattcagaaatgtcaaaggattggcaaaaagagaagatgtgcaataagattaataaagtaaattctgaaggcgaatttgataaagatagagactctatatctgaaacagtcgacttaaacaaccaggaaactgtcaaagtgcaaatacacagcagagcttcagaatatatcactgatgtccattcgaatgacctgtctacaccacagatccttccatcaaatgaaggtgttaatccacgtttatcggcaagccctcctaaatcaggcaatttgtggccaggattggcaccaccacacaaaaaagctcagtctgcatctccaaagagaaaaaaacagcacaagaaatacagaagtgttatttcagacatatttgatggaacaatcattagttcagtgcagtgtctgacttgtgacagggtgtctgtaaccctcgagacctttcaagatctgtccttgccaattcctggcaaggaagaccttgctaagctgcattcatcaagtcatccaacttctatagtcaaagcaggatcatgtggcgaagcatatgctccacaagggtggatagcttttttcatggaatatgtgaagaggtttgttgtctcatgtgtccctagctggttttggggtccagtagtaaccttgcaagattgtcttgctgccttctttgccagagatgaactaaaaggtgacaatatgtacagttgtgaaaaatgcaaaaagttgagaaatggagtgaagttttgtaaagtacaaaactttcctgagattttgtgcatccaccttaaaagattcagacatgaactaatgttttccaccaaaatcagtacccatgtttcatttccgctagaaggcttggatcttcagccatttcttgctaaggatagtccagctcaaattgtgacatatgatcttctgtcagtcatttgccatcatggaactgcaagtagtggacactatatagcctactgccgaaacaatctaaataatctctggtatgaatttgatgatcagagtgtcactgaagtttcagaatctactgtacaaaatgcagaagcttacgttcttttctataggaagagcagcgaagaggcacaaaaagagaggagaaggatatcaaatttattgaacataatggaaccaagcctccttcagttttatatttctcgacagtggcttaataaatttaagacctttgccgaacctggccctatttcaaataatgactttctttgtattcatggaggtgttcctccaagaaaagctggttatattgaagacctggttttgatgctgcctcagaacatttgggataacctatatagcaggtatggtggaggaccagctgtcaaccatctgtacatttgtcatacttgccaaattgaggcggagaaaattgaaaaaagaagaaaaactgaattggaaatttttattcggcttaacagagcgttccaaaaagaggactctccagctactttttattgcatcagtatgcagtggtttagagaatgggaaagttttgtgaagggtaaagatggagatcctccaggtcctattgacaatactaagattgcagtcactaaatgtggtaatgtgatgcttaggcaaggagcagattctggccagatttctgaagaaacatggaattttctgcagtctatttatggtggagggcctgaagttatcctgcgacctccggttgttcatgttgatccagatatacttcaagcagaagaaaaaattgaagtagaaactcggtctttgtaatttttaggatgtagagagttctaatgaggaatcattttcatgtgccctgacatgtacacatgcgaaaacattcctaaaagcgtgtttatttgctttattttttttcatcatttatcccatttatttcttcttagtgggcattatggaagaatatattaaaatgtgtaatataccacaggttggtatatttagttttaaatacttaccataaagtctttcagtgtaatttttttttgagacagagtcttgctttgtcacccaggctggagtgctgtggtgttacctcagctcactgcagcctccacctcctgggttcaagcgattctcctgcctcagcctctcgagtagctgggattacaggcacctgccaccatgcccggctaatttttgtattttagtagagatggggtttcaccatgttggccaggctagtctcaaactcctgacctcaggtgatccacccacctcggcctcccaaagtgctgggattacaggtgtgagccacagcgcctggcccagtgtaatatttttgaaagaggagggacaattgtgaaatcagtaggttatctttaatctttacactacatgcagatccatagtatcctttgtagtgttgtaaatacttttgctttgaaaactttttcattgtcctaaatcaccctgactctgaccagtctttcagttctccaaaagcccaatttaattgtatagttttgtcatggcttcatataataaagagcctattttaagttgaaagtagtagtcagaaaattgttaatttcctaaagctcaggaaactagggtgtcactttttttgcactgcagcatatacactaactagcttattaaaatttacaaaatgtctttttgaatgtatcaaggatatatttagtttgagtggaatttgtcagcagatatcagtaacttattgccgcttatattgtacaatgttaaacttcaattcctgtaacctggttagtattaatgtcagtgactaaaaaacttagagttagttttagggcactttttattttgagagcatgaagtgtggaatgtgtcactacgattgttgataaagctgaggccacttgcaacttgattttttaaatgaaatagataaagtctttttgaataatatagtatgcactgctatttgcttgattatgtaatgtcaaaagtttaactatattccaagtacaaaaacatactggattacattgaggatgttgaatagcattcatgatggctttgttttggtttggggcagctgtcaccagctaaagcaatgttgttaaaattagctcaataaaaatgtctttaaaatgt

SEQ ID NO: 23678 - DNA, 3938 bp, Homo Sapiens
ggggccttctgaggtttgggggctgtagggccatgggcctcagggccagaggtggttgttagcctggcaagacaggtctgggcaacatgcatgcccagaggcagttcgttgtagctgcagtgagagcagaagtcagacgacatgaggtggccaagcaggctctaaaccgcctcaggaagctggcagagagggtggacgaccccgaactccaggacagcatccaggcctcattggacagcattcgagaggctgtgatcaatagccaggaatggactttgagccgctccattcctgaactgcgcctgggtgtgctgggcgatgccaggagtgggaagtcatcgctcatccaccgattcctgactggctcataccaggtgctggagaagacagagagtgagcagtacaagaaagaaatgttggtggatggacagacacatctggtgctaatccgagaggaagctggggcacctgatgccaagttctcaggctgggcagatgctgtgatcttcgtcttcagcctggaggatgagaacagtttccaggctgtgagccgtctccatgggcagctgagttcccttcgcggggagggacgaggaggcctggccttggcactggtggggacacaagacaggatcagtgcttcctcccctcgggtggtgggagatgctcgtgccagagctctgtgcgcggacatgaaacgctgcagctactatgagacttgtgcaacctatgggctcaatgtggatcgggtcttccaggaggtggcccagaaggtggtgaccttgcgcaagcagcaacagcttctggctgcctgcaagtccctgcccagctccccaagccactcagctgcatccactccggtagctggccaggctagtaacgggggccacactagcgactactcttcttccctcccgtcctcaccgaatgttggtcaccgggagctccgagccgaggcagctgcagtggctggattgagcaccccagggtccctgcaccgggcagccaagcgcaggaccagcctttttgcgaatcgtcggggtagtgactccgagaaacgaagcttggatagtcggggagagacaacagggagtgggcgagccatccccatcaaacagagcttcctactaaaacgaagtggcaattccttgaacaaagaatggaagaagaaatatgtaaccctgtccagtaatggctttctactctaccaccccagtattaacgattacatccacagtacccacggcaaggagatggacttgctgcgaacaacagtcaaagtcccgggcaagcggcccccgagggccatctctgcctttggcccctcagccagcattaacgggctcgtcaaggacatgagcactgtccagatgggtgaaggcctggaagccactactcccatgccaagccctagccccagccccagttccctgcagccaccaccagatcagacatccaaacacctgctgaagccagaccggaatttggcccgagccctcagcacggactgtaccccatctggagacctgagccccctgagtcgggaaccccctccttctcccatggtgaagaagcagaggaggaaaaaattgacaacaccatccaagactgaaggctcggctgggcaggctgaagaggaaaactttgagttcctgatcgtgtccagcacgggtcagacgtggcactttgaggcagccagttttgaggagcgggatgcctgggtccaggccatcgagagtcagatcctagccagtctgcaatgctgtgagagcagcaaggtcaagctgcgcacagacagccaaagcgaggccgtggccatccaggcgatccggaacgccaaggggaattcaatctgcgtggactgcggggcccccaaccccacgtgggccagcttgaacctgggcgccctcatctgcatcgagtgttctggcatccaccgcaacctgggcacacacctgtcccgcgttcgctcgctggacttggacgactggccacgggagctgaccctggtgctgacggctattggcaacgacacggccaaccgcgtgtgggaaagcgacacgcgaggccgtgccaagccctcgcgggactcttcgcgggaggagcgcgagtcgtggattcgcgccaagtacgagcagctactgttcctggcgccgctgagcacctcggaggagccgctgggccgccagctgtgggccgccgtgcaggcccaggacgtggctaccgttctcctgcttttggcccatgcgcgacacgggccgctcgacaccagcgtagaggacccacagctgcgctccccactccacctggcggccgagctcgcccacgtcgtcatcacgcaactgctgctgtggtacggcgcggacgtggcggcccgtgacgcccagggccgcacggcgctgttctacgcccgccaggctggaagccagctgtgcgccgacatccttctccagcacggctgcccgggtgagggcggcagcgcggccaccacgcccagcgcggccaccacgcccagcatcaccgccacgcccagcccccgccgccggagcagcgccgctagcgtgggccgcgccgacgccccggttgcgctggtatagttgcccagcgggagagacacccccatccccacgcgggccgggcacgaccacaccgggcggaccgctggacagacgcacccactcacctctccgatccgcaccccgccccacgggagcacttcctacccccacgagggcacagcccccacgccttccagaagacacaaactcacctccctctccccaacgaggcatggagaccccagctcaacacgccccctctccattgtttccacactcggattgctctgggtctacccgctcggggttcgcggaaggggaggtccccagcggtacgggctcctaggcgcttggacatgcccgcttgtgccccctaggggcggaaagaagacccggtcctgcccgagctcaacaatcccagggcgggagcccatacccaggctggctcctggggcgacgccacgccagagggagggtttagtacatgggagggctagccccgggacttggggccaatacggaaaccctaccccttccatgctcatctcactgcccagtgaagggggcaagggcagcgaggggcaggacccctgctgctcatgggggtgggggttcccaaccctttccgtgaaagggaccgtgagtagtggaaaccaggacgtcccctacacctacccatgggtggaagctaaagagtccggggggaaccaagagcctgggtccctcccactactatcttgggagggagaagggatggagcaggagcgggctaagagggctgcgggggccttgtaatttattgctttgttccccaacatggggatgggggcgggcaggggcgtggggagggcgttttggggtaggggaagcccagggtgggcagggggtgggttggggtgggggtgctctcgggttgtgtctgtgaccgtgactgcgtacctgtgactgtgcagcgcccgtggtgatctggggtagggggcacccctacagtgggacccctcccccattattctttctgtccagcccctccctcccactggagcagctccagagccattcctcacccccgtgacctctcccagccagggctgagaggattcgaggtggctgggagggtttccaggccccctgccccttccccacaaactgggtgatagggcggacttacctggcccagccctgcctccctcagccaacccagcccttgggctgtctgtgtcagtggtttccggtctttttttttttttttttttctggctaaaatagtttgcaaaggaccaggtaattggggaggggagagaggtgggggcaagggggaaatgcccccccatctccttggaggcagtggtgtgaatcttcttcaacagcaattaaagagga

SEQ ID NO: 23679 - DNA, 3782 bp, Homo Sapiens
cgcccgtcgtggtcaacgggccagccgagtctggagtggttgcgaacccttctggctgcagatctggaggtggaggcagtaccctggactctattctgctgccccttcagggtttggaggagccggagcatccctcgcgtcctgtcacttccagcgaggcacacaaaactgaccgtagggatggccaccagggtccggacagcttctatttgggtcccacctctccaagaacgaaacagttcatgggataggatcagaaagctccaaggtcaggaatccatcttgggccaagggactcctggtctgcaacctctccctggaacacccaggcagaagcagaagagtcgcagaatagagaaagtcctagagtggctgtttatttcccaagagcagccaaaaatcaccaagtcctggggacctttgtcattcatggatgtgtttgtggattttacctgggaggagtggcagctgctagacccagcacagaagtgcctgtacaggagtgtgatgttggagaactatagcaacctggtgtccctagggtaccaacacaccaaacctgatatcatcttcaagttggaacaaggagaagagctgtgtatggtgcaggcccaagttccaaatcagacctgtccaattttgaaggctggaaagtccaaagccaaggtgctggcaggtttggtgtctggtgagggcctgctctgtgcttccaagatgacgccttgttgctgcatcctctggagacacagtctggaaaattgatgatcttatggattggcatcaggaaaataaagacaagctgggaagtacggcaaaaagctttgaatgcactacatttggaaaactatgtcttcttagtacaaagtatctttcaagacaaaaacctcataaatgtggcacgcatggaaagagtttgaaatatatagatttcactagtgattatgctagaaataatcctaatgggtttcaggtacatggaaaatcattcttccattctaaacatgagcaaactgttattggaataaaatactgtgaaagtattgaatctggaaaaaccgtcaataagaaatcgcaacttatgtgccaacaaatgtatatgggcgaaaaaccctttggatgcagctgttgtgagaaagccttcagcagcaagtcataccttctagtgcatcagcaaactcatgccgaagagaaaccctatggttgtaatgaatgtgggaaagacttcagtagtaaatcatacctcattgtacatcagagaattcatacaggagagaaactacatgaatgcagtgaatgcaggaaaacattcagtttccattcacagcttgttatacatcagagaattcacacaggtgagaatccctatgagtgctgtgaatgtgggaaagtcttcagtaggaaagaccagcttgtttcacaccagaaaactcattcaggacagaaaccatatgtgtgtaatgaatgtgggaaagcttttggtttaaaatcacagctcattatacatgaaagaattcatacaggagagaaaccatatgaatgcaatgaatgtcagaaagcctttaatacaaagtcaaaccttatggtacatcagagaacccatacaggggagaaaccttatgtttgtagtgattgtggaaaagcctttacattcaagtcacagctcattgtacatcaggggattcacacaggagtaaagccctatgggtgtattcagtgtggtaaaggattcagtttgaaatcacagctcattgtacatcagagaagtcacacaggaatgaaaccttatgtatgcaatgaatgtggcaaagccttcaggagcaagtcataccttattatacatacaaggactcatacaggagaaaaactccatgaatgcaacaattgtgggaaagccttcagttttaaatcacagctcattatacatcagaggattcatacaggagagaacccctatgaatgccatgaatgtgggaaagccttcagtcggaaataccagcttatttcacaccagagaactcatgcaggagagaagccttatgaatgcaccgactgtggaaaggcttttggtttaaagtcacagcttattatacaccagagaactcatacaggggagaaaccatttgaatgtagtgagtgtcagaaagcctttaatacaaagtcaaacctgattgtacatcagagaactcatacaggagagaaaccctatagttgtaatgaatgtggaaaagcctttacgttcaaatcacagctcattgtacataaaggagtgcacactggagtaaaaccctatggatgcagtcaatgtgcaaaaacctttagtttgaagtcccagctcattgtacatcagagaagtcacacaggagtaaaaccatatggatgcagtgagtgtgggaaagccttcaggagcaagtcataccttattatacatatgagaactcatacaggagagaaaccacatgagtgcagggaatgcgggaaatcctttagtttcaattcacaactcattgtgcatcagagaattcacacaggagaaaatccctatgaatgcagtgaatgtgggaaagcctttaataggaaagaccagctcatttcacatcagcgaactcatgcaggggaaaagccttatgggtgcagtgaatgtgggaaagcttttagcagcaagtcatacctaattatacacatgagaactcattcaggtgaaaaaccatatgaatgtaatgaatgtgggaaagccttcatttggaaatcactactcattgtacatgagcgaactcatgcaggggtcaacccttataaatgcagtcaatgtgagaaatccttcagtgggaaattacgccttcttgtacaccagagaatgcacacaagagagaaaccatatgaatgcagtgagtgtggaaaagccttcattaggaattctcaactcattgtacatcaaagaactcattcaggagagaaaccctatgggtgcaatgaatgtgggaaaaccttctctcaaaaatcaattctcagtgcacatcagagaacacatacaggagagaagccttgtaagtgcactgaatgtgggaaagccttttgttggaagtcacagctcattatgcatcagagaactcatgtagatgacaaacattgataattttacgaaactctgaaaagtggattcacaagagatagaaacaatcatatataaagagaaactctgtaagtggaatcatcttgtcatcttccagaaaactcatactgaatagaactttatgaatgcacagcatatggaaaggcatccacagaaagctgttctttacatgcaaaaagatagtagacaatacacaggaaaactgaatttagtaaccactctgaaaatttttagcagcaagtcatacctttttttaaaaagttcatacaggtgaggaaccatgttaaacgttgtaaagtcattttactaacataagattcacaaagaggaaacttcatgaaccagatgaatatagaatagacttctttgaaattcatagtttacagaattttaatgagagaaattattgagctaatgaatggcagaattaacaaaattacaaacattttatgtatcggaagcatataccttggagggaccatgctatgagggaaagtgtaaatctagaaatgagaaacccctagggaaaaaatatatataggagtgaacatcttatgaatgtaccaaataaaccacagctggactgttaacctcaccttagaagcttctttctaaaaaaaaaaaaaaaaaaaaaaaaaaaaaaaaaaaaaaa

SEQ ID NO: 23680 - DNA, 3218 bp, Homo Sapiens
gacatagctgccctaaaaggaatgaggaagcgagagctctccagtgtctggctggctccgtccgtgtgacagcccatgatgttctttccggtctctgtaatattctgaatttccacctgcccgccccttcgcttataatgcagagcatgtgaagggagaccggctcggtctctctctctcccagtggactagaaggagcagagagttatgctgtttctcccattctttacagctcaccggatgtaaaagaactctggctagagaccctccaaggacagaggcacagccacacgggagtgaaatccacccctggacagtcagccgcaatactgatgaagctgagaagcagccacaatgcttcaaaaacactaaacgccaataatatggagacactaatcgaatgtcaatcagagggtgatatcaaggaacatcccctgttggcatcatgtgagagtgaagacagtatttgccagctcattgaagttaagaagagaaagaaggtgctgtcctggccctttctcatgagaaggctctcccctgcatcagatttttctggggctttggagacagacttgaaagcatcgctatttgatcagcccttgtcaattatctgcggtgacagtgacacactccccagacccatccaggacattctcactattctatgccttaaaggcccttcaacggaagggatattcaggagagcagccaacgagaaagcccgtaaggagctgaaggaggagctcaactctggggatgcggtggatctggagaggctccccgtgcacctcctcgctgtggtctttaaggacttcctcagaagtatcccccggaagctactttcaagcgacctctttgaggagtggatgggtgctctggagatgcaggacgaggaggacagaatcgaggccctgaaacaggttgcagataagctcccccggcccaacctcctgctactcaagcacttggtctatgtgctgcacctcatcagcaagaactctgaggtgaacaggatggactccagcaatctggccatctgcattggacccaacatgctcaccctggagaatgaccagagcctgtcatttgaagcccagaaggacctgaacaacaaggtgaagacactggtggaattcctcattgataactgctttgaaatatttggggagaacattccagtgcattccagtatcacttctgatgactccctggagcacactgacagttcagatgtgtcgaccctgcagaatgactcagcctacgacagcaacgaccctgatgtggaatccaacagcagcagtggcatcagctctcccagcaggcagccccaggtgcccatggccacagctgctggcttggatagcgcgggcccacaggatgcccgagaggtcagcccagagcccattgtgagcaccgtggccaggctgaaaagctccctcgcacagcccgataggagatactcagagcccagcatgccatcctcccaggagtgcctcgagagccgggtgacaaaccaaacactaacaaagagtgaaggggacttccccgtgccccgggtaggctctcgtttggaaagtgaggaggctgaagacccatttccagaggaggtcttccctgcagtgcaaggcaaaaccaagaggccggtggacctgaagatcaagaacttggccccgggttcggtgctcccgcgggcactggttctcaaagccttctccagcagctcgctggacgcgtcctctgacagctcgcccgtggcttctccttccagtcccaaaagaaatttcttcagcagacatcagtctttcaccacaaagacagagaaaggcaagcccagccgagaaattaaaaagcactccatgtctttcacctttgcccctcacaaaaaagtgctgaccaaaaacctcagcgcgggctctgggaaatcgcaagactttaccagggaccacgtcccgaggggtgtcagaaaggaaagccagcttgccggccgaatcgtgcaggaaaatgggtgtgaaacccacaaccaaacagcccgcggcttctgcctgagaccccacgccctctcggtggatgatgtgttccagggagctgactgggagaggcctggaagcccaccctcttatgaagaggccatgcagggcccggcagccagactagtggcctccgagagccagaccgtggggagcatgacggtggggagcatgagggcgaggatgctggaggcgcactgcctcctaccccctcttccacctgctcaccacgtagaggactcaagacacaggggcagcaaagagccactccctggccacggactctctcccctgcctgagcgatggaaacagagcagaactgtccatgcttctggggactctctggggcacgtgtctggcccagggagacctgagctcctcccgctgaggaccgtctccgagtccgtgcagaggaataagcgggactgtctcgtgcgacgatgtagccagccggtctttgaggctgaccaattccaatatgccaaagaatcgtatatttaggagggaggccatacgccatgccatagcttgtgctatctgtaaatatgagacttgtaaagaactgcctgtagattgtttttaaaaggtcttgaataagctccttgagaaagttgtggaaagccctcctcagtgaggatagctacaccatggccatggcgcatcagatagtctctgtgtacctggatttgtgcaatatgtaaaaatgtatcaaatgtattatagataaggtgttaggtgcaaaggatgtctaataatccctgcacacgttttgaacttgcagtgaagtacactgctgttccttgcttcctggggcacttttctcttggttagtgtttaaaaattatcttcgcttttttaatgtggcctcaaatgtcatgccaattttcacatcttccacaaactccatttagggagaaatgtttaaatctctggtataagtttactccataccagagtaaactatatattactctatataagcagtcttgcaataactaatcaccaccatagaagaaagaaacagactgcaaggaacagagttgagtgtctggagtcatcaaaggcattaaaaactccagtaaaagctggggccgtagcaaaaatcatgaaaaacacttcaacgtgtcctttcaatcatccaattaaatgtgggtagattaatgaaaatgtattacatcaatattaactcat

SEQ ID NO: 23681 - DNA, 3748 bp, Homo Sapiens
ggctgaggcggaggagccgccgcttctgacctcgctctggctccggtgcgcgcggctgagcgcgtgcgaggccccgcgcgtcgggcaggggcggcggcggccactgcgcgccgccctgaggagcgccccagcggcggcgcgactgcggctgaggagagagccggctccgggcctccgcgtcctcctgctcccccggccccccgcctcctcgggggggcggcggcggcgatgttctcggtcctctcgtacgggcggctggtggcccgcgccgtgctcggcggcctctcgcagaccgaccccagggccggcggcggcggcggcggcgactacggactggtgacggccggctgcggcttcgggaaggacttccgtaagggcctcctcaagaagggcgcgtgctacggggacgacgcgtgcttcgtggcccggcaccgttccgcggacgtgctcggggttgcagatggtgtaggaggctggagagactatggagttgatccatctcaattctcagggactttaatgcggacgtgtgaacgtttagtaaaagaaggacggttcgtacctagtaatcccattggaattctcaccacaagctactgtgagttgctgcaaaataaagtccctttgctcggtagcagcaccgcctgcattgtggtgctggacagaaccagccaccgcttacacacagcaaacctgggcgattcaggcttcctggttgtcaggggtggtgaagtcgtgcaccgatcagatgagcagcagcattacttcaacactccattccagctctcaatcgctccccctgaagccgagggagtcgtcttgagcgacagtccggatgctgctgatagcacgtctttcgatgtccagctaggagacattatcctgacggcaacagatggactctttgacaacatgcctgattatatgattcttcaggagctaaaaaagttaaagaattcaaattatgagagtatacaacagactgccagaagcattgctgagcaagctcatgagctggcctatgacccaaattatatgtcaccttttgcacagtttgcatgtgacaatggattgaatgtgagaggtggaaagccagatgacatcaccgtccttctttcaatagtggctgagtatacagactagctgaggtgtcaagtcctgcctttcctttcatcatcccaaatttcccctgccatgtgtgctgatcctgctggcaggaccacatttctttgccactgatctcaatggccagtgatgtaagtcttttgcctgtcttcttgagactcgttgagatctttgttgagaaccactactatcattcactagctcatatctgccggcagcaattgaagagatccaatatttgaagattggccttcatttctcgatgttctttccatgatggggatggaggtgttcagtgccaccgtggctgttacttttcaaagtagttgaagtattgaaaatgagtaatgttggtaaagtgaattcaaaatcctagtatgctaaagggatggtacaagtctaacacaaattgtacgtaatgatacatctactagaaacatacattattcatcaaaagaaatgttacatgtgtactccacaggcatagtctttgttatgatgattggtgtggctttatgtctttgttataaactcctatttttcaggggcttatgattctgctctaaaacattgctctgggttatacagttttgatcccaaaagcttttttgttacaaatcgggagaaaaatccattttagttctatggatggaaatatttcatgcttttaaaaagatgtttgtgttcctgtggttaaagttttggcagtttattgattagtccaaatcacaggctaaggcctgatctccaggaggggtaggggagacactttaccagtatttttttatggaaataatactcaaggttgtaaaacccctcaaagcctagaaatttaattgttatggctgaaattcctcctagttgtctgatagaatgcccctgaatgggaactctaggtcccaaggcctgaagggttgagaacagacagctgtaactttgaattttgttggctttcagtggtcatgctacctacccatactcgtactctcagaccttttattagtagccttgctttctatagagcatgcaccaaatccagtgagtccatgtggagagagcactgtgtgcgcagcggcagcagcacagacgtccatgaggaaaactcccagtgatgatctgacatttacaattaccccacatggaaatttaggggtttctgaatcaagcttaatgtttacagtttccaaatagccattttgcagtgtatagtttccttacaaaactaccccgcattcagttttcacattatctgcaagctgaaacttatttttaagttttgtgtacaagttgactgctgtaaagatatatatttttgggtcagtttttttccttcattaacttggtggtagaaaaaaatatatacttagaaatccttaaattaaagccatgttttatatataagtcaggtaacattggtgtatagatgagaatgcaattaaacctgatgagaatctacttgagaatatagaaagtctttctctaaaggagatactgactccctggtttattgcattaaaatttatgtttgaggttacctcaacttgttttaaaagattttgttttgtgaatttgtactgtatatttgagtaactgtcaggcttttatttaaaattgtttaacatgtaccatgtacatgtcattactatatttcaatgcatcatgcttgtaacaggcatttcatttataataagaatgagttattcatttgtaagccgttcagtaatttatctactattcctaaattggcataatgttagataatctattttgaatcacctttaattacatgtcagaatgccttaactaccctaacttgacaaaacagaattctttggtagacgcggtgggggcggggtggggggtctggacggagtctctatttaaggagaaatcatcatgctatgataaaacacagaagcatgagtggcaagtggcggggtatttattttgcacaaactatttgcagtctctgtgtatttaaaaagtaaagaaagttgcatccagaagggttttgttagaatgaatacatttatattaggactgacaacttcagctcttttgtttaggttttcaattatttttggtaagagtatgtagccttatgatctggatatattttgcattcattttccaacgcctacatttaattcctggtaagagcagtgctcgtcaagtttctggtttttctctgctctcatttaacccgtcaaacacaatctttgtaaagctagattggtggtgttttatacaacttatttactcagcttacctttttgagaaacgattgttagaaattgacgatgtgtttgttccagtgatactgaaagtagtgggggcaagaattgagtttcacagtggaattggctttggatctggcctatagattagtgacataaaatattttctctattttcccctgttctttttgtgttatgcacttaattttatgactgccgggggggtcagctggagtgctgcttaacaagtatctctcctactctcagtggtcagaggctgtgttggacccatagtagaattttccaggtcacagacccaagcttccatgggttgttactgtgctgtaccacttggtgggtctgattctgaacctgatgtgtgtgtt

SEQ ID NO: 23682 - DNA, 4289 bp, Homo Sapiens
ctgggcccgagggacgcgtgatcgggcgggcggccgggcgcaagggtgggagggagccgcccccgcccgcgccccctccgcccctcgccccaaacccctgggcgccgggcccgggccgcgcggcctgaagcgcccgcgatggcgagcccgccgcggcacgggccgcccgggccggcgagcggagacggccccaacctcaacaacaacaacaacaacaacaacaacaaccacagcgtgcgcaagtgcggctacctgcgcaagcagaagcatggccacaagcgcttcttcgtgctgcgcggacccggcgcgggcggcgacgaggcgacggcgggcggggggtcggcgccgcaaccgccgcggctcgagtactacgagagcgagaaaaagtggcggagcaaggcaggcgcgccgaaacgggtgatcgctctcgactgctgcctgaacatcaacaagcgcgccgacgccaagcacaagtacctgatcgccctctacaccaaggacgagtacttcgccgtggccgccgagaacgagcaggagcaggagggctggtaccgcgcgctcaccgacctggtcagcgagggccgcgcggccgccggagacgcgccccccgccgccgcgcccgccgcgtcctgcagcgcctccctgcccggcgccctgggcggctctgccggcgccgccggggccgaggacagctacgggctggtggctcccgccacggccgcctaccgtgaggtgtggcaggtgaacctgaagcccaagggtctgggccagagcaagaacctgacgggggtgtaccgtctgtgcctgtctgcgcgcaccatcggcttcgtgaagctcaactgcgagcagccgtcggtgacgctgcagctcatgaacatccgccgctgcggccactcggacagcttcttcttcatcgaggtgggccgctcggccgtcacaggccccggcgagctgtggatgcaggcggacgactcggtggtggcgcagaacatccacgagaccatcctggaggccatgaaggcgctcaaggagctcttcgagttccggccgcgcagtaagagccaatcgtcggggtcgtcggccacgcaccccatcagcgtccccggcgcgcgccgccaccaccacctggtcaacctgccccccagccagacgggcctggtgcgccgctcgcgcaccgacagcctggccgccaccccgccggcggccaagtgcagctcgtgccgggtgcgcaccgccagcgagggcgacggcggcgcggcggcgggagcggcggccgcgggcgccaggccggtgtcggtggctgggagccccctgagccccgggccggtgcgcgcgcccctgagccgctcgcacaccctgagcggcggctgcggcggccgcgggagcaaggtggcgctgctgccggcagggggcgcgctgcaacacagccgctccatgtccatgcccgtggcgcactcgccgcccgccgccaccagccccggctccctgtcgtccagcagcggccacggctcgggctcctacccgccgccgcccggcccgcacccgcctctgccgcatccgctgcaccacggccccggccagcggccctccagcggcagcgcctccgcctcgggctcccccagcgaccccggcttcatgtccctggacgagtacggctccagcccaggcgacctgcgcgccttctgcagccaccgaagcaacacgcccgagtccatcgcggagacgcccccggcccgagacggcggcggcggcggtgagttctacgggtacatgaccatggacaggcccctgagccactgtggccgctcctaccgccgggtctcgggggacgcggcccaggacctggaccgagggctgcgcaagaggacctactccctgaccacgccagcccggcagcggccggtgccccagccctcctctgcctcgctggatgaatacaccctgatgcgggccaccttctcgggcagcgcgggccgcctctgcccgtcctgccccgcgtcctctcccaaggtggcctaccacccctacccagaggactacggagacatcgagatcggctcccacaggagctccagcagcaacctgggggcagacgacggctacatgcccatgacgcccggcgcggccctcgcgggcagtgggagcggcagctgcaggagcgacgactacatgcccatgagccccgccagcgtgtccgcccccaagcagatcttgcagcccagggccgccgccgccgccgccgccgccgtgccttctgcggggcctgcggggccagcacccacctctgcggcgggcaggacattcccggcgagtgggggcggctacaaggccagctcgcccgccgagagctcccccgaggacagtgggtacatgcgcatgtggtgcggttccaagctgtccatggagcatgcagatggcaagctgctgcccaacggggactacctcaacgtgtcccccagcgacgcggtcaccacgggcaccccgcccgacttcttctccgcagccctgcaccccggcggggagccgctcaggggcgttcccggctgctgctacagctccttgccccgctcctacaaggccccctacacctgtggcggggacagcgaccagtacgtgctcatgagctcccccgtggggcgcatcctggaggaggagcgtctggagcctcaggccacgccagggcccagccaggcggccagcgccttcggggccggccccacgcagccccctcaccctgtagtgccttcgcccgtgcggcctagcggcggccgcccggagggcttcttgggccagcgcggccgggcggtgaggcccacgcgcctgtccctggaggggctgcccagcctgcccagcatgcacgagtacccactgccaccggagcccaagagccccggcgagtacatcaacatcgactttggcgagcccggggcccgcctgtcgccgcccgcgcctcccctgctggcgtcggcggcctcgtcctcctcgctcttgtccgccagcagcccggcctcgtcgctgggctcaggcaccccgggcaccagcagcgacagccggcagcggtctccgctctccgactacatgaacctcgacttcagctcccccaagtctcctaagccgggcgccccgagcggccaccccgtgggctccttggacggcctcctgtcccccgaggcctcctccccgtatccgccgttgcccccgcgtccgtccgcgtccccgtcgtcgtctctgcagccgccgccaccgccgccggccccgggggagctgtaccgcctgccccccgcctcggccgttgccaccgcccagggcccgggcgccgcctcatcgttgtcctcggacaccggggacaatggtgactacaccgagatggcttttggtgtggccgccaccccgccgcaacctatcgcggcccccccgaagccagaagctgcccgcgtggccagcccgacgtcgggcgtgaagaggctgagcctcatggagcaggtgtcgggagtcgaggccttcctgcaggccagccagcccccggacccccaccgcggcgccaaggtcatccgcgcagacccgcaggggggccgccgccgccacagttccgagaccttctcctccaccacgacggtcacccccgtgtccccgtccttcgcccacaaccccaagcgccacaactcggcctccgtggaaaatgtctctctcaggaaaagcagcgagggcggcgtgggtgtcggccctggagggggcgacgagccgcccacctccccacgacagttgcagccggcgccccctttggcaccgcagggccggccgtggaccccgggtcagcccgggggcttggtcggttgtcctgggagcggtggatcgcccatgcgcagagagacctctgccggcttccagaatggtctcaactacatcgccatcgacgtgagggaggagcccgggctgccaccccagccgcagccgccgccgccgccgcttcctcagccgggagacaagagctcctggggccggacccgaagcctcgggggtctcatcagcgctgtgggcgtcggcagcaccggcggcgggtgcggggggccgggtcccggtgccctgccccctgccaacacctacgccagcattgacttcttgtcccaccacttgaaggaggccaccatcgtgaaaggtgaggaggccctttgccttggcgtctggcgggaaggaggggcggggcgctgagggagcctcttgggtttcactgctcccactttttggggaccttgacccagaagccgacagcctggcactggctccttgtt

SEQ ID NO: 23683 - DNA, 14544 bp, Homo Sapiens
cgtactggtccatagcctgttaggaaccaggctgcataacaggaggtgagtggcaggtgagtgaaatttcatctgtagttacagccactcctcatcactcgcattaccaccagagctccactccctgtcagatcagcggcggcattagattctcataggagctcgaaccctattctaaactgttcatgtgagggatctaggttgcaagctccctatgagaatctaatgcctgatgatctgtcacggtctcccatcacccctagatgggaccatctagttgcaggaaaacaagctcagggctcccactgattctacacgatggtgaattgtggaattatttcattatatatattacaatgtaataataatagaaataaagcacacaataaatgtaatgtgcttgaatcatcccgaaaccatcccaccctggtctgtgaaaaaattgtcttccatgaaaccagtccctggtgccaaaaacgttgaggaccactgctccacagaatctatcggtcactcttcctcccctcacccccttgccctaaaagcacaccctgcaaacctgccatgaattgacactctgtttctatcccttttccccttgtgtctgtgtctggaggaagaggataaaggacaagctgccccaagtcctagcgggcagctcgaggaagtgaaacttacacgttggtctcctgtttccttaccaagcttttaccatggtaacccctggtcccgttcagccaccaccaccccacccagcacacctccaacctcagccagacaaggttgttgacacaagagagccctcaggggcacagagagagtctggacacgtgggggagtcagccgtgtatcatcggaggcggccgggcacatggcagggatgagggaaagaccaagagtcctctgttgggcccaagtcctagacagacaaaacctagacaatcacgtggctggctgcatgccctgtggctgttgggctgggcccaggaggagggaggggcgctctttcctggaggtggtccagagcaccgggtggacagccctgggggaaaacttccacgttttgatggaggttatctttgataactccacagtgacctggttcgccaaaggaaaagcaggcaacgtgagctgttttttttttctccaagctgaacactaggggtcctaggctttttgggtcacccggcatggcagacagtcaacctggcaggacatccgggagagacagacacaggcagagggcagaaaggtcaagggaggttctcaggccaaggctattggggtttgctcaattgttcctgaatgctcttacacacgtacacacacagagcagcacacacacacacacacacacatgcctcagcaagtcccagagagggaggtgtcgagggggacccgctggctgttcagacggactcccagagccagtgagtgggtggggctggaacatgagttcatctatttcctgcccacatctggtataaaaggaggcagtggcccacagaggagcacagctgtgtttggctgcagggccaagagcgctgtcaagaagacccacacgcccccctccagcagctgaattcctgcagctcagcagccgccgccagagcaggacgaaccgccaatcgcaaggcacctctgagaacttcaggtaggagaaaagcaaactccctccaacctcttacttcgggcttaaggcagagaactcgcctccccagaatctcctccctccatgatcccccgctattcctctattttcttttcctcggacctgcagccttgggtcgaccctgccctaggggtgactgcaggagagcagggaggatggtcaggcgtcaccaacaaccccatcacccagtaacaagaaccttgactctctcagtccctctgcatcaagacacttacccatttcccacctcatgcctgctaacttgaatgaaacaatcgctgggaaagcattaagagaattaaggctgggcactgtggctcatgcctgtaatcccagcactttgtgaggctgaggcaggcagataacttgagcccaggagtttgagaccagcctgggcaacatggcaaaaccctgctctcccaaaaaaatacaaaaattagctgggcgtgctggtgtgcctgtattcccagctacttgggaggctgaggtgggaggattgcttcagctggggaggcggaggctgcagggagccaagactgagccattgcacccagcctgggtgacagagcaagaccctgtctctaaaaatgaatgaaaggaaggaagaaagagagagaaagagagagaggaaagaaggaaggaagtaaagaagaaagaaagaaagaaagaggaaagaggaagaaagaaagaaaagaaagaaaagaaaagaaagcaaatttaaagcttatgcaaatcaaagatgttgtgataattgataattgagtctgggctaaattccccctgggctgcaaaggcagagagtggtaatgacttctcacctgcttttcttctaaggcttttttacgggacacagagggaagggagatggactggattccaagattcccacagggcaagatgggcgaagactccctgccactgcccggggataagtcagtctgagtgagacggagtgggatgggcttagaacctgaacatgtcatggtctcttcctgcaccttgccctagtgttcacttaccacctgcttgcaggaaacaagaagagcagggcccacagctggccagctcccctcccctcccgcctgtcttccagaacgattccttcaccagccctctttccattgctctaggatgcagatgtctccagccctcacctgcctagtcctgggcctggcccttgtctttggtgaagggtctgctgtgcaccatcccccatcctacgtggcccacctggcctcagacttcggggtgagggtgtttcagcaggtggcgcaggcctccaaggaccgcaacgtggttttctcaccctatggggtggcctcggtgttggccatgctccagctgacaacaggaggagaaacccagcagcagattcaagcagctatgggattcaagattgatggtgagccacgggacaccaggggaggtgggtggcatgcagaacagacctaccagaagccaaggaaaggctggctctggcttagccgagccaagccccatacagctgtgctgcaggggccaccccatcttcttcccactacactccaagtcactggacccttgaatctccaagggtgtctgaccagtagatttaccgcttattcaccaccgtgtgatcttaacctcgttaagtttgcccatctacaaaatgaggattatttgctgtcctaaagaattcatgagccgggcgcggtggctcaaacgcctgtaatcccagcactttgggaggccaaggcgggcggatcatgaggtcaggagatcaagaccatcctggctaacacagtgaaactccatctctactaaaaatacaaaaaaaattagccaggcgtggtggcaggcgcctgtagtcccagctactcgggaggctgaggcaggagaatggcatgaacccaggaggcagagcttgcagtgagctgagatcgtgccactgcactccagcctgggcgacagagagagactccgtctcaaaaaaaaaaattaaaagaattcatggaattacacttgtgaaatacttagcatagccatcactataggaaaaaaatctaaggccaggcacagtgcctcatgcctgtaatctcagcactttcggagtttgaggcaggaggatcacccaaggctaggagttcaaggccagcctgggcaatacggtgaaaccccgtctctaataaaaatataaaaattagtctgatgaggtggtgcacctgtaatcccagctactcaggaagctgagacacaagaatcactttaacccgggaggtggaggtggcagtgagctgagatcacaccattgcactccagcctgggtgacagagtgagacctgtcaaaaaaaagaaaagaaagagagagagagagagaagagagagaaagaaagaagaagaaagaaagaaagagagagagagaaagaaagaaagaaacaaagaaacaaagaaagaaaggaaaagaaaaaaaaaactaaggccaggcaaggtggcttatgactgtaatttcagcactttggaagattgaggcaggaggatcacttgaggccagaagttcgagacaagactgagcaacagggagacccctgcctctacaaaaaaatttacaaattagccagatgtggtgacacatacctgtagtcccaactactcaggaggctgaggtgggaggatggcttgagcccaggagctggaggctgcagtgagctatgattgtaccactgcacttcagcctgggcaacaaagggaagccctgtctgaaaaaaaaaaaaaaagaaaaagaagaagaaagaaaatatttagggttcatccaggaggcagaggttgcagtaagctgacatcgcgccattgcactccagcctgggagacaagagcaaaactccaactcaaaaaaaaaaaaaaaaaaaaaacaggaagaaaatatttagggttcataacttaagaacagagaaaaatattctagcccaaagaaagggttgggatctgagacttttgaagaaaggaaggagatacagaaaagagatttcatcctggaatgaaatctccctccagagagccctgggaaagcacggtagcccccatccatcagagtggagccccttgtgggggaagtgggctcggctgggaaccctcaattcagcataagcctcacatgtcctctcctctctgtcccggtgcagacaagggcatggcccccgccctccggcatctgtacaaggagctcatggggccatggaacaaggatgagatcagcaccacagacgcgatcttcgtccagcgggatctgaagctggtccagggcttcatgccccacttcttcaggctgttccggagcacggtcaagcaagtggacttttcagaggtggagagagccagattcatcatcaatgactgggtgaagacacacacaaaaggtgagcaggcagggaaaggaaacccatttcctgggcctcaagagaaagggaatttggaaataaatccacatatcccagttgggtgcagtagttcacacctgtaatcccagcccaacactttgggaggtctaggcgagaggaaggcttgaggcctggagtttgagaccagcctggccaacataacaagacctcatctcttcaaaaaatttaaaaaccagccgggcatggtggtgcacacctgtagtcccagctacttgggaggctgaggtgggaggatcacttgagtccagcagttcaaggctgcagtgagctatgtttgcaccaccacactccagcctgagtcacagaacaagacctcatctctaaaaaacaaacaaaaaccaaatccacatatcctaaaaaatgctccttttcagcattctcttctctatggacaaagggctggatgctttaagaaccaaatcttaggctgggcacggtggctcacgcctctaatcctagcactttgagaggccaaggcgggcagattgcctgagcacaggagttcgagaccagcctggccaacatggtgaaaccctgtctctgtcaaaaatacaaaaaattagccaggtgtgttggcgcgtgcctataatcccagctgctcgggaggatgaggttcaaagaatcacttgaacccgggaggcagaggctgcagtgagctgagatcatgccactgcactccagcctgggtgacagagcaagactttgtctccaaaaaaaggaactagacgggttcatttaaacccctgactgcagccctttgacatacatccaattgaggactggggactccgggaaacatctaaaaggcttaaaaactttgtctaacttcagccgggcatggtggctcacacctgtaatcccagcactttgggaggctgaggcaggtggatcacaaggtcaggagtttgagacgagcctgaccaacatggtgaaaccccgtctctactaaaaatacaaaaattagccaggcatggtggcaggcgcctgtaatcccagctattcgggaggctgaggcaggagaattgcttgaaccccggagacagaggttgcagcgagccgagatcgcgccactgcactccagcctggcaatagagtgagactccatctcaaaacaacaacaacaacaacaacaacaacaaaatcgtctaacttcctgatcttcctgatcattgattttcccataggtatgatcagcaacttgcttgggaaaggagccgtggaccagctgacacggctggtgctggtgaatgccctctacttcaacggccagtggaagactcccttccccgactccagcacccaccgccgcctcttccacaaatcagacggcagcactgtctctgtgcccatgatggctcagaccaacaagttcaactatagtaagtccaagagccccttccccacagcccacagcaactgcatctcattcctggggtctcccaaggaatacccaaaatgtcaccctctgagggaggaagaccacagggaatgctcccctttaagggaggagagaccctagaatatactccagctttgacaaagatttcccaagcaggagacatcaggataatgggaacagaagacaggaggtttatcccatgaaggatgaagaagctgaaatccagagattccctcagggccacatttgtccacctgactccagggtctcatcttcgtgtgttgctagtgtgattacctggggatgagaaatcctgctgggggagttgaggttaagaggatgaggactccaggtgctgtggctcacgcctgtaatcccagcactttgggaggccaaggcaggtggatcaggagtttgaggtcaggagtttgagaccagcctggccaacatggtgaaaccctgtctctactaaaaatgcaaaaattagccaggtgtggtggcaggcgcctgtaatcccagctactcgggaggctgaggcaggagaatcacttgagcccgggaggtggaggttgcagtgagccgaacgaaattgagccacttcaccccagcctgggcaaaagagtgaaattccattcaaaaaaaaaaaaaaaaaaaaaaggatgaggactgggatgaactggtggctgggtgtggggaaaatggaagtgaaggaaggccaaaagagacagagaaggcctggcgcggcgactcacgcctataatcccagcactttgggaggctgagaagggggattgcttgaggccagaagttgaataccagtctgggcagcatagcaagaccctgcctctacaaaaaaaaaattttttttaattagccaggcttggtgacatgcatctgtagtctactcaagaagctgaggtgaggccaggcacggtggctcacgcctgtattcccagcactttgggaggtcaaggcgggtggatgacctgaggtcaggagttcaagaccagcctggccaacatggtgaaaccccatctgtataaaaatacaaaaattagctgggcatgatagcaggtgcctgtaattccagctactcaggaggctgaggtgggagaatctattgaacccgggagggggaggttgcagtgagccgagatcatgccattgcactccagcctgggcgacagagtgagactccttctcaaaacaaacaaacaaacaaacaaacaaaatacagaagctgaggcgggaggaacatttgaaccggattcggaggctgcagtgagctatgattgcaccactgcgctccagtctgtgtgacagtgagaccctgtctcttacacacacacacacacacacacacacacatgcacacacacagagagagagaaattagaagatactgaattggcagaagagaagggaaatagaaattaaaatactgaataggggagcagtgaacaggggatacccaaaagccaagagcgagagagagcctggcttccagaaatagtggagaagccaggagaactaggtgaaaacccagtgctgggttgccatcagcgagagctggagccatttccaacgaaccatcttgtcgtcttcacagctgagttcaccacgcccgatggccattactacgacatcctggaactgccctaccacggggacaccctcagcatgttcattgctgccccttatgaaaaagaggtgcctctctctgccctcaccaacattctgagtgcccagctcatcagccactggaaaggcaacatgaccaggctgccccgcctcctggttctgcccaagtaagccaccccgctatctccccgacctaccaacccctctctcctggctccctaaagtcaccgcccccaggttgaatttcccagatctgtgatgcttgcaggacatgcatgtgtgggaggctgatgggaaactgtggcctgggtttgattatgagtcttgcaatcatccctccccctgtttctgctggagggcaggggacagctcttcctgaccacacccccacattgactatccccagaatacccagcaaaagcccccaaaaggagagtcagagaaatgagggaggtgggggcccaatcagtccacatctacttagggtcgccccatcagcacttccatccccaaccctttcaagtcaacatccaaacaaaagaaatcacttccaaggacggagcagctcaaagcgcagcttctagctggggttccaagaaagcagatttttcgaaatccttctgcagaaggaagcaaagagattttttgaaatctttctgcagaaggagaaggctggagctggggaactccagaattatagggaagcctcccaccacgctcatcccaaatttccggatgctataatgccaggcttggggaaagaggagaatttagttggttagctggtgcgtgctctcacttgcatcctctctcttcctcttttttttttttctcctctctctctggctcataaaaatggaggtaattagttgtgccctggtgagaagcagagagtgcacaaaggccccctgcttgagtcctcttcagggttagctctcagaaacacaatctgcagaacagatttttgttccaacatccttgcaggagaatttgcccttagcttcccccaccccagccaggctgaataaaattatgctgaaactactgtcttatttgaggaaagtaattagtcataggtgggagggggtggggagattgcagaagaatgttcatgaatattaggattttcagctctaaggggggactttgtaaacagctttagaagaagaaccaggccggctgggtgtggtggctcatgcctgtaatctcagcatttggggaggccaaggcgggcggatcacttgaggtcaggagtttgagaccagcctggccaacatggtgaaaccctgtctctattaaaaatacaaaaattagccagccgtggtagcgagcgcctatgatcccagctactccggaggctgaggccagagaatcacatgaacctgggaggtggaggctgcagtgagccgagatcacgccactgcactccagcctgggggacagagcaagaatctgtttcaaaaaaaaaaaaagaaaaataggaaggaaggaaggaaaggaaaggaaagaagagagagagaaagaaagagagagagagagagagaaagaaagaaagaaagaaagaaagaaagaaagaaagaaagaaagaaagaaagaaaaagaaaggaaagaaagaacgaacgaaccaggcctccctctccaaccttcacctccgtccctattctggccacttgattcgggggacacctggtaggggatggggaaaggtgggagctgccagccagaggggaccccggcttgagcagcctcttgctgctatctgcaggttctccctggagactgaagtcgacctcaggaagcccctagagaacctgggaatgaccgacatgttcagacagtttcaggctgacttcacgagtctttcaggtaagaagactttcctttgcattttctcaccccagtggactgcgggggcccctaagaggaaaaaggaacctctccttgagagcggcagctgatctaatcctgtatccacatctgtttcagaccaagagcctctccacgtcgcgcaggcgctgcagaaagtgaagatcgaggtgaacgagagtggcacggtggcctcctcatccacaggtgagtctggctcaggtgaggctccacgggtgtcgcctccatcgcccttcaggataactggtccccagacccggaaaggaccccgcagccctctcggcacagagcagctctgtctgtgctcagccatcacccactccccacctgtttctcagcctggaaaacgggcttgggaccatggaaccctgtttcctcgcctgatggctcctaagttccctgactgtgaaaaggcctcctaaagaaaaacccaagttgttcccacagtgggaagtaaacttaagaaacatgcttatcaggctgggcatggtggctcccacctgtaatcccagcgctttgggggaccaaggcaggtggatcacttgaggtcaggaattcgagaccagcctgggcaacatggcaaaaccctatctctactaaaaatacaaaaattaggcaggcgtggtggcatgtgcctgtagtcccagctacttgggaggctgaggcaggagaatcacttgaatccaggaggcagaggttgcagtgagccgagatcacgctgctgcactccagcctgggcaatagagcatgactctgaagaaaagaaagaaagaaagagagagagagagaaaagaaagaaagaaagaaagaaagaaagaaagaaagaaagaaagaaagaaagaaagaaagagaaagaaagagaagaaaagaaaagaaagagcttatcaataagcccttaaaggatttagataaatgtgtgtaagggaagagctgatccattgctaccaagctcctggaggaaaccaggtctcagaggatgtccctaaacttttaaggttcatattcaggaaaacaaacaacttccagctgggcttagtggctcacacctgtaatcccagcactttgggaggccgaggcaggaggatcgcttgagcccaggaatttgagaccagcctgggcaatataatgagactgtgctctacaaaaattagaaaaaaattagccaggcatggtggcatgcacctgtagccccagttacttgggagactgaggtgggaggatcacttgagcccatgagttcaaggctgcagtgagccatgaaggtgccactgcactcccgcctgggcgacagagggagaccctgtctctaagaaaaacggcgggggtgggggtggtgccagtgccagcatccctctgttctaagacattgtcccttctcttgcagctgtcatagtctcagcccgcatggcccccgaggagatcatcatggacagacccttcctctttgtggtccggcacaaccccacaggtgagcctggaacccatcacgttccacatcctcccacccattctttctctcaggaactagtcccgacagatgcagacatccctctatccctgagagggctctgggcagggaaccataaccctaccctgcttcctgtcccaagaggaggctaccttctatcacccacagacagtgccgggtccccgctctgtgactcaggcagctgcgactccagacagctcactcatctgcctagatctcagtccttccacccacatccagcctgatgagctgtcccactccttctgcttctcaacccccatggttcttccaccctcaggaacagtccttttcatgggccaagtgatggaaccctgaccctggggaaagacgccttcatctgggacaaaactggagatgcatcgggaaagaagaaactccgaagaaaagaattttagtgttaatgactctttctgaaggaagagaagacatttgccttttgttaaaagatggtaaaccagatctgtctccaagaccttggcctctccttggaggacctttaggtcaaactccctagtctccacctgagaccctgggagagaagtttgaagcacaactcccttaaggtctccaaaccagacggtgacgcctgcgggaccatctggggcacctgcttccacccgtctctctgcccactcgggtctgcagacctggttcccactgaggccctttgcaggatggaactacggggcttacaggagcttttgtgtgcctggtagaaactatttctgttccagtcacattgccatcactcttgtactgcctgccaccgcggaggaggctggtgacaggccaaaggccagtggaagaaacaccctttcatctcagagtccactgtggcactggccacccctccccagtacaggggtgctgcaggtggcagagtgaatgtcccccatcatgtggcccaactctcctggcctggccatctccctccccagaaacagtgtgcatgggttattttggagtgtaggtgacttgtttactcattgaagcagatttctgcttccttttatttttataggaatagaggaagaaatgtcagatgcgtgcccagctcttcaccccccaatctcttggtggggaggggtgtacctaaatatttatcatatccttgcccttgagtgcttgttagagagaaagagaactactaaggaaaataatattatttaaactcgctcctagtgtttctttgtggtctgtgtcaccgtatctcaggaagtccagccacttgactggcacacacccctccggacatccagcgtgacggagcccacactgccaccttgtggccgcctgagaccctcgcgccccccgcgccccccgcgcccctctttttccccttgatggaaattgaccatacaatttcatcctccttcaggggatcaaaaggacggagtggggggacagagactcagatgaggacagagtggtttccaatgtgttcaatagatttaggagcagaaatgcaaggggctgcatgacctaccaggacagaactttccccaattacagggtgactcacagccgcattggtgactcacttcaatgtgtcatttccggctgctgtgtgtgagcagtggacacgtgagggggggggtgggtgagagagacaggcagctcggattcaactaccttagataatatttctgaaaacctaccagccagagggtagggcacaaagatggatgtaatgcactttgggaggccaaggcgggaggattgcttgagcccaggagttcaagaccagcctgggcaacataccaagacccccgtctctttaaaaatatatatattttaaatatacttaaatatatatttctaatatctttaaatatatatatatattttaaagaccaatttatgggagaattgcacacagatgtgaaatgaatgtaatctaatagaagcctaatcagcccaccatgttctccactgaaaaatcctctttctttggggtttttctttctttcttttttgattttgcactggacggtgacgtcagccatgtacaggatccacaggggtggtgtcaaatgctattgaaattgtgttgaattgtatgctttttcacttttgataaataaacatgtaaaaatgtttcaaaaaaataataaaataaataaatacgaagaatatgtcaggacagtcactgccttcaccttctccatttcacaccggtggtacaagaaatcagaagcctaggccaggtgtggtggttcatgcctgtaatcccagcactttgggaagccgaggtgggtggatcacctaaggtcaggagtttgagaccagcctggacaacatggtgaaaccccgtctctactaaaaatacaaaaattagccgggcgtggtggctggcgcctgtaatcccagctactcgggaggctgaggcaggagaatcacttgaagccaggaggcagaggttgcagtgagctgagattgcaccactgaactccaggctgggtggcagagcgagactccctctcaaaaaacaacaactacaaagacaacaacaaacccagaatcaaaatcctgttggtccatagacctcatgggtggaagagaccttcctacatccaggttggcccaacatgggggagtccatgaaatggtcacctcagctctgccacaagccccaaggataagttgattctgcccctgggaatcatcctcaaaaaggaaaaaaatgttcccctgccataaactttccacttatgcagatgggcctgctcgtaagtcactgtcactgtgggttcccaactctgttcatgacacttccttccagcaccaaatgcttcccacccctctactcccactccccattcttcaaacccagctcaagttccagttcctccacctaggacttcccatggatccagccaatatcactctcaggtccggcgcagtggcccacgcctgtaatctcagcactttgggaggccggggcaggaagattgcttgaggccaggagtttcagaccagcctggacaacatagtgagactc

SEQ ID NO: 23684 - DNA, 2939 bp, Homo Sapiens
cggccgccgcgatggcgagccgggcggtggtgagagccaggcgctgcccgcagtgtccccaagtccgggccgcggccgccgcccccgcctgggccgcgctccccctctcccgctccctccctccctgctccaactcctcctccttctccatgcctctgttcctcctgctcttacttgtcctgctcctgctgctcgaggacgctggagcccagcaaggtgatggatgtggacacactgtactaggccctgagagtggaacccttacatccataaactacccacagacctatcccaacagcactgtttgtgaatgggagatccgtgtaaagatgggagagagagttcgcatcaaatttggtgactttgacattgaagattctgattcttgtcactttaattacttgagaatttataatggaattggagtcagcagaactgaaataggcaaatactgtggtctggggttgcaaatgaaccattcaattgaatcaaaaggcaatgaaatcacattgctgttcatgagtggaatccatgtttctggacgcggatttttggcctcatactctgttatagataaacaagatctaattacttgtttggacactgcatccaattttttggaacctgagttcagtaagtactgcccagctggttgtctgcttccttttgctgagatatctggaacaattcctcatggatatagagattcctcgccattgtgcatggctggtgtgcatgcaggagtagtgtcaaacacgttgggcggccaaatcagtgttgtaattagtaaaggtattccctattatgaaagttctttggctaacaacgtcacatctgtggtgggacacttatctacaagtctttttacatttaagacaagtggatgttatggaacactggggatggagtctggtgtgatcgcggatcctcaaataacagcatcatctgtgctggagtggactgaccacacagggcaagagaacagttggaaacccaaaaaagccaggctgaaaaaacctggaccgccttgggctgcttttgccactgatgaataccagtggttacaaatagatttgaataaggaaaagaaaataacaggcattataaccactggatccaccatggtggagcacaattactatgtgtctgcctacagaatcctgtacagtgatgatgggcagaaatggactgtgtacagagagcctggtgtggagcaagataagatatttcaaggaaacaaagattatcaccaggatgtgcgtaataactttttgccaccaattattgcacgttttattagagtgaatcctacccaatggcagcagaaaattgccatgaaaatggagctgctcggatgtcagtttattcctaaaggtcgtcctccaaaacttactcaacctccacctcctcggaacagcaatgacctcaaaaacactacagcccctccaaaaatagccaaaggtcgtgccccaaaatttacgcaaccactacaacctcgcagtagcaatgaatttcctgcacagacagaacaaacaactgccagtcctgatatcagaaatactaccgtaactccaaatgtaaccaaagatgtagcgctggctgcagttcttgtccctgtgctggtcatggtcctcactactctcattctcatattagtgtgtgcttggcactggagaaacagaaagaaaaaaactgaaggcacctatgacttaccttactgggaccgggcaggttggtggaaaggaatgaagcagtttcttcctgcaaaagcagtggaccatgaggaaaccccagttcgctatagcagcagcgaagttaatcacctgagtccaagagaagtcaccacagtgctgcaggctgactctgcagagtatgctcagccactggtaggaggaattgttggtacacttcatcaaagatctacctttaaaccagaagaaggaaaagaagcaggctatgcagacctagatccttacaactcaccagggcaggaagtttatcatgcctatgctgaaccactcccaattacggggcctgagtatgcaaccccaatcatcatggacatgtcagggcaccccacaacttcagttggtcagccctccacatccactttcaaggctacggggaaccaacctcccccactagtgggaacttacaatacacttctctccaggactgacagctgctcctcagcccaggcccagtatgataccccgaaagctgggaagccaggtctacctgccccagacgaattggtgtaccaggtgccacagagcacacaagaagtatcaggagcaggaagggatggggaatgtgatgtttttaaagaaatcctttgaagatgatgctgctttttacaaagcatcgttttaaagcacatggccttttttttttaattattagtggtagtaatatatagaatgtattacataactgtcactgaagtggttggggaaaatgtggtgactgaggtacaggaaactactaatcttgccatcttgctttaaggtgttatggtggcacagttactgctcgcctgttaaatttcaaatgtcctgtttgatactactgtagaacactatttttaatacagaaaaagctccctataatgcacttcagagaaattaaaaatcacagagtatttattaccaatgctgcaggtacattaatgaactcgagatggctctgtaagcctgactggcaataacgcacggtactgttcttgaaatacctaatggcttgaaattctagtctgtttgtgaaagatgggtactatcatgatttcctcttctattcctatattcttttctggattttttttaataattagtgatataagcattgtttttattgcagccatatccacttatccatcttaagatctgtagctgggattttctgacttgtaatgagcagggggattgctttttcactttgtg

SEQ ID NO: 23685 - DNA, 3030 bp, Homo Sapiens
agccatatgggggatacgccagcaacagacgccggccgccaagatctgcatccctaggccacgctaagaccctggggaagagcgcaggagcccgggagaagggctggaaggaggggactggacgtgcggagaattcccccctaaaaggcagaagcccccgcccccaccctcgagctccgctcgggcagagcgcctgcctgcctgccgctgctgcgggcgcccacctcgcccagccatgccaggcccggccaccgacgcggggaagatccctttctgcgacgccaaggaagaaatccgtgccgggctcgaaagctctgagggcggcggcggcccggagaggccaggcgcgcgcgggcagcggcagaacatcgtctggaggaatgtcgtcctgatgagcttgctccacttgggggccgtgtactccctggtgctcatccccaaagccaagccactcactctgctctgggcctacttctgcttcctcctggccgctctgggtgtgacagctggtgcccatcgcttgtggagccacaggtcctaccgggccaagctgcctctgaggatatttctggctgtcgccaactccatggctttccagaatgacatcttcgagcggtccagggaccaccgagcccaccacaagtactcagagacggatgctgacccccacaatgcccgccggggcttcttcttctcccatattgggtggctgtttgttcgcaagcatcgagatgttattgagaaggggagaaagcttgacgtcactgacctgcttgctgatcctgtggtccggatccagagaaagtactataagatctccgtggtgctcatgtgctttgtggtccccacgctggtgccctggtacatctggggagagagtctgtggaattcctacttcttggcctctattctccgctataccatctcactcaacatcagctggctggtcaacagcgccgcccacatgtatggaaaccggccctatgacaagcacatcagccctcggcagaacccactcgtcgctctgggtgccattggtgaaggcttccataattaccatcacacctttccctttgactactctgcgagtgaatttggcttaaattttaacccaaccacctggttcattgatttcatgtgctggctggggctggccactgaccgcaaacgggcaaccaagccgatgatcgaggcccggaaggccaggactggagacagcagtgcttgaacttggaacagccatcccacatgtctgccgttgcaacctcggttcatggctttggttacaatagctctcttgtacattggatcgtgggagggggcagagggtggggaaggaacgagtcaatgtggtttgggaatgtttttgtttatctcaaaataatgttgaaatacaattatcaatgaaaaaactttcgtttttttttttgtttgttttgtttttgagacagagtctcactctgtcacccaggctggagtgcagtggcgcagtctcggctcactgcagcctccacctacctggttcaagcaattctcctgcctcagcctcctgagtagctgagattacaggagcctgccaccacacccagctaatttttttgtatktttagtagagacagggtttcatcatgttggccagactggcctcgaattcctgacctcaggcaatccacccgcctcggcctcccaaagagctgggattacaggcgtgagccaccgcaccctgccgaaaaaaacttttttttttttgagacggaggctcgctctgtcccccaggctggagtgcagtggcgagatctcagctcactgcaagctccgcctcccgggttcacgccattctcctgcctcagcctcccgagtagctgggagccagcgcgcccagcctaaaaaacttttcaagtcaatattactacgatttaacattagagtgtggacatgtgatttaatcgctatagctaaaatacgtcaaatatacgttgtcatgtgcttgaacatgatgctaaccctgacaggatgaaggaaagtaatattctttcagtgtagttcaggagagcatttgttttcttttctaccaattaacccatcattgcttttaaacaaccatctgaaggagcagagaggcagggtagaagacagaagggggatctatgtggtaactaaagaatgtttctgttttgttaattattgtgtgtgtgtggttttattgtttgcttaagagaatcaaaaactgaaaaaaatgagaatacaggaaatggctcttgtttatttttttgctgtgtttacagcttgttaatgctctactgtctttgtttcaagagagatttgttcactgcccagctcgttttgtgtcctgagccctatggccagcccaccttataaatcatgcctgtttagatgtttgattttgttctgtttgctattgttatcttaaaggtgtataactctgacatgccagacatcaaattaagctcaaattaagctctcgtttaaatgtttaagcacctaatttatattctaattgatcccagccactgatgcatgtactttagctacttctgctaaataagcatattaattttccacatcagaccatcagatcttgagaaccaacagttatctagaattccgtgtctactaatgtttcacctgcatgcagccttcattaattttgtagcaaaatataaagtgatcattatgtagcttctggattaaaaaaatttgtgtgtgaagttgctttgtaaagtgcatgtggaattaatgggacagtgtgccctttgtgttagatgttagagcaaaagaaagggcttatagtgttagtattggagcactttgaagatagatattttcagaaaagatgtaggatttaaaagttaaattttaaattttagaaaaagatatgatggcaattggaaatagtcacaatgaagttcttcatccagtaggtgtttaacagtgttattttgccactggtaatgtgtaaactgtgagtgatttacaataaatgattatgaattcaaaaaaaaaaaaaaa

SEQ ID NO: 23686 - DNA, 6111 bp, Homo Sapiens
gcggccgcttcccaccgtccctctccccttactggcagagcgcgctgcgggcggactcccgggcccggagcagcccaccggccaccccaccgcccacccggctcccggtgtctcctcccggccgctctacccagcaactttccgtgctttgttccccgactggaaatgctttacggaagcgtcttggacagggtctccgccaggcgacaagagctcggtgctgagatgtgttacgttctcatctccccatcaattatggatggaaacaaataaggaagagtcaattttgctgagccccttctccggcaacgagaggcgttctgcagccgggagggagccgccgctcgcgccggcagccgctggcaggggcatggtgaggaggaaggtagctcagtggcatttctgagcaggggccaccctgacttcaccttggcccaccatgagggtcttcctgctttgtgcctacatactgctgctgatggtttcccagttgagggcagtcagctttcctgaagatgatgaaccccttaatactgtcgactatcactattcaaggcaatatccggtttttagaggacgcccttcaggcaatgaatcgcagcacaggctggactttcagctgatgttgaaaattcgagacacactttatattgctggcagggatcaagtttatacagtaaacttaaatgaaatgcccaaaacagaagtaatacccaacaagaaactgacatggcgatcaagacaacaggatcgagaaaactgtgctatgaaaggcaagcataaagatgaatgccacaactttatcaaagtatttgttccaagaaacgatgagatggtttttgtttgtggtaccaatgcattcaatcccatgtgtagatactacaggttgagtaccttagaatatgatggggaagaaattagtggcctggcaagatgcccatttgatgccagacaaaccaatgttgccctctttgctgatgggaagctgtattctgccacagtggctgacttcttggccagcgatgccgttatttatcgaagcatgggtgatggatctgcccttcgcacaataaaatatgattccaaatggataaaagagccacactttcttcatgccatagaatatggaaactatgtctatttcttctttcgagaaatcgctgtcgaacataataatttaggcaaggctgtgtattcccgcgtggcccgcatatgtaaaaacgacatgggtggttcccagcgggtcctggagaaacactggacttcatttctaaaggctcggctgaactgttctgtccctggagattcgtttttctactttgatgttctgcagtctattacagacataatacaaatcaatggcatccccactgtggtcggggtgtttaccacgcagctcaatagcatccctggttctgctgtctgtgcatttagcatggatgacattgaaaaagtattcaaaggacggtttaaggaacagaaaactccagattctgtttggacagcagttcccgaagacaaagtgccaaagccaaggcctggctgttgtgcaaaacacggccttgccgaagcttataaaacctccatcgatttcccggatgaaactctgtcattcatcaaatctcatcccctgatggactctgccgttccacccattgccgatgagccctggttcacaaagactcgggtcaggtacagactgacggccatctcagtggaccattcagccggaccctaccagaactacacagtcatctttgttggctctgaagctggcatggtacttaaagttctggcaaagaccagtcctttctctttgaacgacagcgtattactggaagagattgaagcctacaaccatgcaaagtgcagtgctgagaatgaggaagacaaaaaggtcatctcattacagttggataaagatcaccacgctttatatgtggcgttctctagctgcattatccgcatccccctcagtcgctgtgagcgttatggatcatgtaaaaagtcttgtattgcatctcgtgacccgtattgtggctggttaagccagggatcctgtggtagagtgaccccagggatgcttgctgaaggatatgaacaagacacagaattcggcaacacagctcatctaggggactgccatgaaattttgcctacttcaactacaccagattacaaaatatttggcggtccaacatctgacatggaggtatcttcatcttctgttaccacaatggcaagtatcccagaaatcacacctaaagtgattgatacctggagacctaaactgacaagctctcggaaatttgtagttcaagatgatccaaacacttctgattttactgatcctttatcgggtatcccaaagggtgtacgatgggaagtccagtctggagagtccaaccagatggtccacatgaatgtcctcatcacctgtgtctttgctgcttttgttttgggggcattcattgcaggtgtggcagtatactgctatcgagacatgtttgttcggaaaaacagaaagatccataaagatgcagagtccgcccagtcatgcacagactccagtggaagttttgccaaactgaatggtctctttgacagccctgtcaaggaataccaacagaatattgattctcctaaactgtatagtaacctgctaaccagtcggaaagagctaccacccaatggagatactaaatccatggtaatggaccatcgagggcaacctccagagttggctgctcttcctactcctgagtctacacccgtgcttcaccagaagaccctgcaggccatgaagagccactcagaaaaggcccatggccatggagcttcaaggaaagaaacccctcagttttttccgtctagtccgccacctcattccccattaagtcatgggcatatccccagtgccattgttcttccaaatgctacccatgactacaacacgtctttctcaaactccaatgctcacaaagctgaaaagaagcttcaaaacattgatcaccctctcacaaagtcatccagtaagagagatcaccggcgttctgttgattccagaaataccctcaatgatctcctgaagcatctgaatgacccaaatagtaaccccaaagccatcatgggagacatccagatggcacaccagaacttaatgctggatcccatgggatcgatgtctgaggtcccacctaaagtccctaaccgggaggcatcgctatactcccctccttcaactctccccagaaatagcccaaccaagcgagtggatgtccccaccactcctggagtcccaatgacttctctggaaagacaaagaggttatcacaaaaattcctcccagaggcactctatatctgctatgcctaaaaacttaaactcaccaaatggtgttttgttatccagacagcctagtatgaaccgtggaggatatatgcccacccccactggggcgaaggtggactatattcagggaacaccagtgagtgttcatctgcagccttccctctccagacagagcagctacaccagtaatggcactcttcctaggacgggactaaagaggacgccgtccttaaaacctgacgtgccaccaaagccttcctttgttcctcaaaccccatctgtcagaccactgaacaaatacacatactaggcctcaagtgtgctattcccatgtggctttatcctgtccgtgttgttgagaggatgatgttgtaagggtaccttaaaacaagagactcgcttgtattttaagagaaccaagtggccaaagaaactctttctaactttggcaacatcagaacttgccacatgtagctactgcagcaaggcttctgtgtacttgcctgaaaacaaaggaaggtgctggtcattccatttcttttgtttgaagctaaagagatgtgtagctcacaggggctaccttaccagtataaagagctgataacagtactcagaagaatctgtgaacaaatacttgaaaatgggttcaatgtagactgccattatgtgtggtcttcccattaaatgtgaacattttaatatgtatgcattcaccttgcctcttgcacaaatgtcaaaaaaaagatggtaatatctcaaagaaatgaacttgtagattaccaagcagtttgctaaaaattcaatctttgacccaagctgtagcatttttttttcatgtgtggcatctttttcatgccaccaacaaacttgttgtgtgtgtgcgtgtgtgtgtgtgtgtgtgtgtgtgtgtgtgtgtgttctgtacccactaggatttgtttaggtgcccattgcatctttttgtgctatggagttgtttacattaagcatgaccgaacgagagacaatactatttcccacaggagtccattgggttcagctttgaaagaggaatagaatcgaggctcctttgaccatcaaaatgatgaactttacttatgtggtacccaatgccagaatgtaagagttgcaagtgattttgtgctgctattcattaaaacttgtattccagtcttgccagcttaaggagatcaagatattaagaggtatccttgatttattttccagtattcagtagtaaaattttcctgtccactgtgaatcaaagcctgagtcactctatttaaccttggacacactaataaggttttattttgattgtgttcgtttccccccccccaatagtaaaatttctcctcctttaactcctcctaccccccaaggtaagaaacaaaaaacaaacaaacaaacaaaaatagaagacaaaagaaagacatatgaaaggaattgtaattggcttaacagaaacagtctgtaaaaacctaacagtggtgcaatcatgttgtctgtgttgtgttatgtgagaattttctcctaagtcatgcaggtaatgacaatatactgtaaataccacatgtgagtttacctgaatctgtgcattttgtgccttattcatgagaatgatagaagtactaaaatctgtcaagtgttttcagtatagcacattatttactgagtgccagttgtaaatgtttttcaaccagcacctaaaaagactcttttcaaaaaatcacagaaacaacctaggacaattatttgttacataatccgacctcatagcagcattacattctttgccgtgataaacattccactcctgctttcctaaggatgaaacagtgataatgtgaactcaaatgaggtttcctgggtaatgtgacacctgcagaaactatagagcgtcatttatacgtagtttggcagaaaccacttacggctgatgatgcgcaaccctgctgactgtttcagttaatatgctgcacaccacacacttgtttagtgaaccaaatctagaaagtaccaaggcagaggtatgctcctgctgtaatcaggcaaatgagttcaactggatttcttttgacaatactgttggtacctattacttgggggaggacatgttgcagaagaccagatcatttttatacagaatgtgaaatactgatacagttattcttttttttaaagaacattgttttataaagaacgtgatttccagtgatctctggaagcgctaaagctaaaatttctgttcttgaaacacttcagctttgcaactaaaatattacagattaataataaattaaaccaaccaatgataaacactactcagtccaccaacaacaaacgtgtttgaattcaccttaccaatattaatcccagcgtgtgtaaaacagaacagtaactctatgtgaccccagataacattttgtaacattgtgcttccttgtagtttgtaatgtgagttcaatcagtatttatgttgaaatttctaacattaaatctagtctctatcctgttaatttaatttttaaatgctttatccatttgtgcaaaggtaaacgcagattgtatcttttttaatggtacggcataaaaagtaaccctcaagtgaagtgtctctatactgttttatagagtactttaacatgaatagataccttgtaaacttgtattgtggatgtgtaaataatatgtactttgggtttttaacaccgcatgtaaagtcaaaataaaatatacaaatcattataaaaaaaaaaa
